United States Patent Application Publication US 2004/0123343 A1 - sequence listing, part 38

SEQ ID NO: 107225 - protein, 162 aa, Oryza sativa
  unsure (1)..(162): unsure at all Xaa locations
  Clone ID: PAT_MRT4530_11598C.1.pep
YRGTIATDWCPRLYGWLVTLPFMSVHDFTDRLDFAAADWCFRLHGWPIMPPLLGVYDFTAGLPPSPPTGVLSYTVGWSHHRSWASTTAPTGWTSPPPTGGSACTAGLLCHRCWASTTSSPACLRRHRLVSLPXAYYAAVVGRLRLHRRPASITADXCFRLYG

SEQ ID NO: 107226 - protein, 60 aa, Oryza sativa
  Clone ID: PAT_MRT4530_11599C.1.pep
MAKKTTLSSSQDRKRSQATNADSSCSGLAVAVAVASRGDRVEWDMVALETMGIGRSTSGM

SEQ ID NO: 107227 - protein, 532 aa, Oryza sativa
  Clone ID: PAT_MRT4530_1159C.1.pep
MADGANNDDVWRRRFEEVLERLDALSGQITDLDQQQRDQNMVINRLERGARAQSPHFDDVSGGGGLGGGRGGNYFGRGDPFARGGDGFGPDGGRSGFHGRFGHRYDGDGERPPRYHKLDFPKYDGRDDPLPFLNRCEQLIWGQRTPEDDKVWLASYHLLDGAQQWYTCLERDHGPPSWHRFSELLNMRYGPLLRSAPLGELAAYRRTSTVDDYTDHFLDLLARAGYLSEDQQARPRRLTAPSAVYRRWRWTSARRQGLCFNCDEPYSRGHNRVCRRLFFLEMGEDDADTDSTDDPAAAPATLRISLHVATGVRVSDAMHIMVHLGDTDLYALIDSGSTPTFLSQDAAARVGRDPQPRSGLNVTVANGDKVACPGVFPDMPFQIAGEEFATDVYVLTLGGYDLVLGTQWLATLGPILWDFTALTMSFWHRDHCVTLHGLPGHQRPRALACGPSAHLDSLLEEFTDVFAEPTGLSPVRDRTHRIQLLPGSALVAIHPYCYPARHKDELERQCRVMEENGLIRRSTSAFSSPVLL

SEQ ID NO: 107228 - protein, 1225 aa, Oryza sativa
  Clone ID: PAT_MRT4530_115C.1.pep
MAVAAAQDLPPTFHPNPSPLPSSMEPRLRQLRRVPLLDFVARIADLHADQASPVRKLVAEMIGEVGSKHMAYLPNVMPCLLHLLNDDTPAVARQAIKTGTTLFAKGLFSSGGIDDSLKLSWEALLKLKSAVSHMAFQPMSNEGARLLAIKFVEKTVLLYTPDLDTPPDPPIEVTEDMGFNVAWLRGGHPLLNVGDLAMEASQNLGLLLEQLKPPKVKSLSTSMIIVFVTSLSAIAQRRPSFYGRILPVLLSLDPASSIIKVQVPGAFHALKSAFAACLKCTHSSAEPWRARLLEAQNIINQADSIEHSSNRVESLPLETTSTDNSNKRNLIDDIDNAPEDGDRSNKRIRQSHHDQEHTENVKNNVELTSADTPSSPSNSASTGNSEAVYQLVSMFAALAAQGDRAAGSLQILSSSIAADLLAEVVMVNMQHLPVSHPEVDQQQSPSAGQPSGAPSSSLLSACFPLLESLLKRINQNDREVDEAPQTIDSAVVPSAAGETAAIPAIPGPTSRNVPMEENSNSSSIPSDMETIEAKEPTADAARLSIEIQESSEASHASTELQGTQEHGGSFISSLPADNSSAGLSLAQSSETRSPSSSMVEASQTQFSYSSTLTSQHVLPKLVVTNIDLSDEAKDLLQKEAFLRILDCDKQDASGGSIARLPLLAHLGVEFPLELDPWELLQKHVLSDYVNNENATYLVDWQRKIILDNYHDNYKNISPTSIAKAENLRDMFPASDKSLGKLLCEIPYLPEGVLKLLEGLCSPGSNEKQDKDLQSGDRVTQGLSAVWNLIMLRPSNRDRCLEIALQVANKLFPMASISKRIEDFANEKLNSVLEVVPADESAASEMSTPEAPKDGGSENLSSSVADSQTLMSLYFALCTKKHSLLRHVFAIYGSLPQAAKQAVHRQVPILIRTIGSSPSLLGIISDPPADSRDLLMQVLQTLTDGAMPSQDLISSVKNLYSKTKDIEVLFAVLAHLPKDEVLPVFPSIVNLPLDKFQVALSRILQGSPQNGPSLDPSEILIAIHVIDPEKEGIPLKKVIDACAACFEQRTIFTQQVLAKALNQLLLGHCSSSTFPQVEQIPLPLLFMRTVMQAIGAFPALVDFVMDIMSRLVSKQIWKYPKLWVGFLKCAILTKPQSYGVLLQLPAPQLENALNKNPVLKAPLVEHANQPNVRSTLPRSTLVVLGLAEDQQQPAPQAQSSQNQAAETSSSAADTTTEVTQESSAVS

SEQ ID NO: 107229 - protein, 34 aa, Oryza sativa
  Clone ID: PAT_MRT4530_11600C.1.pep
LWLDLIIPYSPWADQQKLLHITGKTRVFQAWQHG

SEQ ID NO: 107230 - protein, 343 aa, Oryza sativa
  unsure (1)..(343): unsure at all Xaa locations
  Clone ID: PAT_MRT4530_11601C.1.pep
LNLLPLTSSRTTTTTKLFIFCWAVQSYNKMKWLLNRAGFYWPKMVDDCFKYNRGCEACQQFGNGHRFVLVPTDYFTKWAKAVQLKNMTHTEVIDFILKNNKHIIHRFGIPQTLTTDQRDSFMSKELKSFAESYDIKLLSSSPYYAQANGQVESSNKILLKLVKKNNEGHPKRWHEVLFEALXAHRISKHGGTKVTPFELIYLQEAVLLVEVNLGSVRYIKQDDLSAEEYRTLMGDNLDDVTDKRLKALEEIEKEKKRVAKAYIKRVREKSFQVGNLVWKTIFPLGSRCKDFGKWLPRWEGPYRICGIVRGNAYFLETLQGEXFXRAINGKYLKKYFPSVWQDA

SEQ ID NO: 107231 - protein, 69 aa, Oryza sativa
  Clone ID: PAT_MRT4530_11602C.1.pep
MNAVAALPTPTIHTTCAQDIHDIELPQWLEDCLQQWQREIEQGQDQTTAPHCLICRAFCFAYDPLESTC

SEQ ID NO: 107232 - protein, 49 aa, Oryza sativa
  Clone ID: PAT_MRT4530_11603C.1.pep
LSAAVGVLLVGASLAGVARGKDPYVFFEWKVTYGTKTLLDAPYKVYPDP

SEQ ID NO: 107233 - protein, 92 aa, Oryza sativa
  Clone ID: PAT_MRT4530_11604C.1.pep
TIWLVNCDRRLHRVQAQTRHARRPVGLTHRFNDGRSAVREQPSTDLEPLKERVDHLHDVAGRLDQEGPVREQLQDDRMDRARQRTEEHTDTD

SEQ ID NO: 107234 - protein, 255 aa, Oryza sativa
  Clone ID: PAT_MRT4530_11605C.1.pep
MYQETIPFSKILHEVHLEAVLWGIGTALGELPPYFLSRAASMSGRKLDELEELDASVSGEGFLSSTLHRAKRWLMSHSQYLNFPTILLLASVPNPLFDLAGILCGQFNIPFWKFFLATLIGKAVIKVYIQTTLVITLCNNQLLDLVEKRIMWVFGNVPMVSSVLPSLVAKLKTAKSKFLSSSVAASASSVVKETKWNLSFSLIWNTVVWLLIMNFIVQIITSTAQSYLKRQQELEIRKKLSATIQTVSETTGLSN

SEQ ID NO: 107235 - protein, 62 aa, Oryza sativa
  Clone ID: PAT_MRT4530_11606C.1.pep
KNGPDGALHPLLLWGILVTFSRCLSFPFHPVKKMLFFFVPTLGFPVGDERMVIVRIIFLAIH

SEQ ID NO: 107236 - protein, 285 aa, Oryza sativa
  Clone ID: PAT_MRT4530_11607C.1.pep
MQQSIMSTLPLLLLLLFSSLFPAPSHAWGIHGHLIGRLSDAAAAAVRGLLPSYAGGNLSSLCSWADGVKLRYPWSAPLHYIDTPDHLCSYTYDRDCKDEDSFRGRCVAGAINNYTSQLLTYDATSPSTQYNLTQALLFLAHFVGDIHQPLHVGFTSDKGGNTIDVHWYTRKTVLHHVWDDNIIKTAENDYYGEGVAEFVDALMQNITGEWSQRVPGWEECSKNQTTCPDTYASESIAAACDWAYKDVTEDSLLEDAYFGSRLPVVNLRLAQGGVRLAATLNRIFS

SEQ ID NO: 107237 - protein, 216 aa, Oryza sativa
  Clone ID: PAT_MRT4530_11608C.1.pep
MARVQLWVAAACAVVLALAAPSLAGDPDMLQDVCVADLASPVKLNGFPCKANVTADDFFFAGLKNPGNTNNPAGSNVTAANVQSFPGVNTLGVSMARIDYAPGGQNPPHTHPRATEIIFVLEGVLEVGFITTANKLFTKTVTAGEVFVFPRGLVHFQQNRGHGPAAVIAAFNSQLQGTQAIAATLFAAAPPVPSDVLAKAFRVDVPQVDAIKAKFK

SEQ ID NO: 107238 - protein, 66 aa, Oryza sativa
  Clone ID: PAT_MRT4530_11609C.1.pep
RRPPRRRRRWSKPARGSRVCPLLLLELEPEPNLPFQCLPNVDPPPLHGGRVAAVESTPSRPSSSLP

SEQ ID NO: 107239 - protein, 111 aa, Oryza sativa
  Clone ID: PAT_MRT4530_1160C.1.pep
RYVRSITICIVQNGIDEGFFYQTINHQMGGTTPKGALKCSIYWTFKDVYEFHIRGHHSVSKPCMFIHFFRTYVRIQISRNNAMNQRSVGLSEVVGLGGSGNQVYSYPQSKT

SEQ ID NO: 107240 - protein, 83 aa, Oryza sativa
  Clone ID: PAT_MRT4530_11610C.1.pep
GPPVVRLPQVSSHVAAPFVTLSVGSPPMLGSVYGGSVHMSMVSSGLCPRDLVSLLCRVMRVRIPVAQPSACACFFWPISLQGA

SEQ ID NO: 107241 - protein, 42 aa, Oryza sativa
  Clone ID: PAT_MRT4530_11611C.1.pep
SAAPPNFFFSIRHRLSTLNPFSYASTSFFPTHANCGSLQFLT

SEQ ID NO: 107242 - protein, 106 aa, Oryza sativa
  Clone ID: PAT_MRT4530_11612C.1.pep
QCDLHNDQADYEHVAMPGKNGPHPKLSSGIRKLNLVKEGEFISLTGAKMVKAIKGCWEMVWKKDVPAGALLCGFEIPEEYRRNEATLPPGRIYLSFPIWTKESLAD

SEQ ID NO: 107243 - protein, 643 aa, Oryza sativa
  Clone ID: PAT_MRT4530_11613C.1.pep
MLKTPPQLDPEKRWQIYCQEPDPACGASGSGQDAPADQQESDGKRGQHRSPGDEARPDRQLKRRKKKKKKNYNAMKMLQYSLIQLRLLRGQLIGRVEDGGVIARLKLMDKICMELRYVCEWNEYRWKFLLWLLKRTRLDLHPELVMDLSHTKELETKPTYDASQSREEASAAASASDGQGDDKERGDLQAVEAYGSPPGKEKVDLQAAKDSSPTAEKGKGKHIGYEAQQKKNSIEDVKSSSQQEISKPKKKKKQKKRQRRKMDESTENLSCHSGSPSSSHDGTSTSTIEGEPKPSSGDLAKISREHKQEQESMEDLEDLLGMDEDTISNKVSYYFHQLYVQDHLDDDDDDDWLECDGPQQLTELHEQLAFYRIIGYELSNGRKLDELDIAKLKEKYPPSILYEKGYFQYYEDSLEWYFDPERFQPAALDNYQRLVLCDNGLYMDWDQYHSNYSTYESDLAYVKFCEELAHKTKWFQDYLVLIAVEDKITMGQWDKVKNTVYLQAMKIALRIRVVSLMQVMTAFQEYIWSMRFDCCNYKDFDGVYFEVWKRVAKQKMEFTDALSELYREDMFPLRNVDIKDELRSTRGRFRSMKENYDLYVACIDETVPEKEARQLIKDAIIEMAEDQSQEPRRSLHNTAQGRQ

SEQ ID NO: 107244 - protein, 350 aa, Oryza sativa
  Clone ID: PAT_MRT4530_11614C.1.pep
MAATGVLVVVVALVFAVTVAGGGGAGVGGDGGFITWEDLSMPAGAARSSTWDDTAGGGGGKRSGGGGGGEQRTTIVVSPDGTGHSRTVQGAVDMVPAGNTRRVKIVVRPGVYREKVTVPITKPFVSLIGMGTGHTVITWHSRASDVGASGHQVGTFYSASVAVEADYFCASHITFENSAAAAAPGAVGQQAVALRLSGDKTVLYKCRILGTQDTLFDNIGRHYLYNCDIQGSIDFIFGNARSLYQSCHKLTIQAFTNSSILYLTAKELLTLGCTLHAVATSYGAIAASQRSSPSEESGFSFVGCRLTGSGMLYLGRAWGKYSRVVYSYCDLSGIIVPQGWSDWGDQSRTK

SEQ ID NO: 107245 - protein, 52 aa, Oryza sativa
  Clone ID: PAT_MRT4530_11615C.1.pep
ASERGTNPSAYCGNSQQLMTVTQPGRRKWLELGSSKWLDEISVHSKPEEEHR

SEQ ID NO: 107246 - protein, 168 aa, Oryza sativa
  Clone ID: PAT_MRT4530_11616C.1.pep
TLFDNIGRHYLYNCDIQGSIDFIFGNARSLYQGCTLHAVATSYGAIAASQRSSPSEESGFSFVGCRLTGSGMLYLGRAWGKYSRVVYSYCDLSGIIVPQGWSDWGDQSRTKTVLFGEYNCKGPGASTKQRVPWSPTLHLRRGAAVIGRSFINGEQWFRCRSSPIFHKF

SEQ ID NO: 107247 - protein, 225 aa, Oryza sativa
  unsure (1)..(225): unsure at all Xaa locations
  Clone ID: PAT_MRT4530_11617C.1.pep
MINIWSKFSSLFSSLTDRKNPSANFSPRDTNFWLPDSGRLAVIVSSTASAVRSQSWPARTAGHLVWVPPPLSSLSPPFPIPSRLPPCPPPHPPXPPPSRPSARRTPSPSAHSAPPTSSDGGEVGSGEGEVAVTPPRPPPAHTTPPPTPRAGWLRPAPLLATRCPTRACPSARQGHRPERPRRRRPRAPRRWQRPHTFSLSYAGGRGPRRRRRRERQERRRGREGR

SEQ ID NO: 107248 - protein, 95 aa, Oryza sativa
  Clone ID: PAT_MRT4530_11618C.1.pep
LLGSLNFCNFVFSFCQGCTLHAVATSYGAIAASQRSSPSEESGFSFVGCRLTGSGMLYLGRAWGKYSRVVYSYCDLSGIIVPQGWSDWGDQSRTK

SEQ ID NO: 107249 - protein, 506 aa, Oryza sativa
  Clone ID: PAT_MRT4530_11619C.1.pep
MAASRRLARKLPSLISKHQRLISPEIDVEQAAESPASSSSIPLDPSLPILPLAVSHLSPPSPLPALPSVHASTPAALLRILRRARHHPRLAALDLHLLLAAASDSPAFRPDHRLTSLLASRLAESRRLPSLRRLLELVLFRPCPCTDDSIFACPELLPTFRKAILAFAASGDIPAASDALASLRRAADSPLPAEFYNIILHALARLRRHEDTVRFYGEMTSTHRVHPDVYTFNILINSSCRAEGVDAAMRWFQEMRRWSCSPTGVSFNTLMRGFFREGRCKEGIKVAREMLQLGFGLSVASMEIMINGLCRGGEPLKAAEVFIEFLVDGVVPEGFDCLDLVESLCRVRNVEKAVEVVELILERNWVSCLGVPAGVTVLECLMKEGKLDKACQMMGRMVAAEIVPDTISCNYIFEALCEAGRTVDANRLRLQAKEKGFQADGFTYSIIVQGFGRQGIRKEGEAVLDEMLDAGYVPNIATYNRLLDGLHMGRSMQLQQKCSRHRNAAN

SEQ ID NO: 107250 - protein, 381 aa, Oryza sativa
  unsure (1)..(381): unsure at all Xaa locations
  Clone ID: PAT_MRT4530_1161C.1.pep
MATPRTLVPILPPVAALLLLLVAASSIPILAAAQPADACGGAPDQAAADGACHDVPRALRLKLIAIPTILVSSVVGVCLPLLSRSVPALRPDGGLFAVVKAFASGVILATGYMHVLPDAFNNLTSPCLPRKPWSEFPFAAFVAMLAAVSTLMADSLMLTYYNRSKPRPSSGGDVAAVADHGESPDQGHRHGHGHGHGHGMAVAKPDDVEATQVQLRRNRVVVQVLEIGIVVHSVVIGLGMGASQNVCTIRPLVAAMCFHQMFEGMGLGGCILQAEYGRRMRSVLVFFFSTTTPFGIALGLALTRVYRDSSPTALVVVGLLNAASAGLLHYMALVELLAADFMGPKLQGNVRLQLAASPSRRDXFLAVLLGAGGMSVMAKWA

SEQ ID NO: 107251 - protein, 177 aa, Oryza sativa
  Clone ID: PAT_MRT4530_11620C.1.pep
RRRLLSPCPSSWPHPPCAAAAAAAAPPIEAQPELLLLHPSSSPHHATTATATAPPGALQPRLLSPYPSSSPQPPRAPAEAAHPGAPQPWPLSPHPPSSPSPQPPCAPAAAAATPGAARAPTAPPRGSSHCRPATSPTSPSTPPPPYPPLPPPPPVDAAASPAPPPPPSPSGGAPGGP

SEQ ID NO: 107252 - protein, 137 aa, Oryza sativa
  unsure (1)..(137): unsure at all Xaa locations
  Clone ID: PAT_MRT4530_11621C.1.pep
LGIGKPRGKSAKKLKELAGISKILIPGSKITESDFNVLEDDINSXLPLLNIRGMNADTKLFSLRQKIEESGCQVFYVRETKKQNFSLADIRTFASKRFDVFAFSPSRGASRGILVVWASKWSGLIGSFVTPRFSFGF

SEQ ID NO: 107253 - protein, 124 aa, Oryza sativa
  Clone ID: PAT_MRT4530_11622C.1.pep
KGLVSVEVKKKKGQYDMKLLAVDIPMASGPDQRLFLVGDEQEYKVGGGLISELRDPIVKAMAAEKEFDYLDEREDAEDEAREREEAERRQQEEEAEALRREEERLREEYEERKRQEAENLEKTT

SEQ ID NO: 107254 - protein, 115 aa, Oryza sativa
  Clone ID: PAT_MRT4530_11623C.1.pep
PGGRAPGYGVIPNIFNAGLKLGHGPHDRVGNRIGFYQRYFGAFGMGPGGNLDCYNQRPFNNGFSVGLADQLPLPPRKIKNKMETFARPHPHVPVNLTSPLMHESSVPHAKKKTGL

SEQ ID NO: 107255 - protein, 66 aa, Oryza sativa
  Clone ID: PAT_MRT4530_11624C.1.pep
AMFWLQPRYHSRWAYAGLSNSIGLKTLSLTKMIILKLLSLNPQVLPIILGGTVNPSVYTWDCYVTP

SEQ ID NO: 107256 - protein, 82 aa, Oryza sativa
  Clone ID: PAT_MRT4530_11625C.1.pep
SFNCSYNIVTVGCGHCTMVLSMDLAPFHQARTVQDHQVQNRGFQGNNFGSYDIASRNQRTSTAMYPMPTSQQQVSPIRRMHN

SEQ ID NO: 107257 - protein, 255 aa, Oryza sativa
  Clone ID: PAT_MRT4530_11626C.1.pep
MMVIRFFAVLAAALCITSASAAAAGGWVSGTATFYGGKDASGTMGGACGYGNLYTQGYGVYNAALSTALFNGGASCGQCYLIMCDASKTPEWCKAGTAVTITATNLCPPNWALANDDGGWCNPPRPHFDMSQPAWETIGIYRAGIVPVLYQQVKCWRQGGVRFTVSGFNYFELVLITNVAGSGSVQAMSVKGSKTGWIPLARNWGANWQCNSALVGQALSFRVTSTGGQTLQINSVVPEWWEFGTTFTSNQQFDY

SEQ ID NO: 107258 - protein, 805 aa, Oryza sativa
  Clone ID: PAT_MRT4530_11627C.1.pep
MDKNMRHCLYGSEDPCWYRSGLCRSLTPWDAVLPWGSDGGSMWSSVAPSQGISGRGEAEEVEQGERVPWCYDECRRLWGGIGHREETRKGSWGEEEEEGGVGLGRRPFQITRLKRTSKTKAAAASPSTLRQRGGLPSCAAGARYRRHFNRGGRQQGTEGAAADATRGCWGRREPLLPPPAAVARPPPPPDLPAAGGMRVEEGEGIAVGKRRWRRSSWQDETCVAVSGLVGTVTAAGMETDEPATKAAGGEPKPSLATKAAGEQDKDDEEESSGGGGAEPEVSATPAVVVFSSSHMFISYLFDASPKIQELEIQTVPKLEQMLRKIEEERMHRKAKKERSAVQNLDTLAKLVKSALYEAEDVLDLIAYHQIEKDVIGDDEPQGSSSKWHPHIDDAIHACKTSWIGRCITTLLEWAQVNWFEVARSYRDWFYDATGITATGYQLEDGTAVYSFMPAIARWKLRKRIEKLENTVTNVENSPYLTQTSSGAWNDIVNMNRRSITSSSTRKVFGRDRERDMIRSMLREDDSLPSSSSRKCYSVICIYGIPGSGKTTLAQYVCEYEKEDKDRYFDTVMLIYVSKTYRLEDIFRDMLEEITQSRHSEISDCRGLEAKLVENLRGKRFLLVLDDLWVNDENHEKLLSPLNVGKSGSRILVTAQSKEAALGSNRLIPISDLEEEQYFSMFMHYALDSTIFDDREYIPIGRKIAKKLNRSPIAAVTVAGQLWRNPDIRFWQTTANLDVLNKTKGALWWSYNQLVVDVRRCFQYCSIFPRRYELERDNLVRMWIAQEFVKDNDGNNEDVEDVGQSL

SEQ ID NO: 107259 - protein, 139 aa, Oryza sativa
  unsure (1)..(139): unsure at all Xaa locations
  Clone ID: PAT_MRT4530_11628C.1.pep
TLESICITPASRSGTATDRRGEGPQYSRAXDGVRGGRRPSRDARGGRQPSRGARGGRAGQASARGEGAGRAAAXRGDLTSSAPGESRGVRGGRRPRRRHGTAATRRGGAAPNRPSPRPSLSPSSRRTSPARTVPGHPPP

SEQ ID NO: 107260 - protein, 138 aa, Oryza sativa
  unsure (1)..(138): unsure at all Xaa locations
  Clone ID: PAT_MRT4530_11629C.1.pep
YTPTYFNRSKVYHRSLNLYRCVIPVPKLVNXPFRSSNLFDCVIPVPKLADHLFRSSNLFSCVTPVPKLGFEYHLGQIGRDRGDTTEQVVGPKRVICMFRDRDDTVEQNGQICKKKSRVPSSNSPYSESGNYNQIKGPR

SEQ ID NO: 107261 - protein, 318 aa, Oryza sativa
  Clone ID: PAT_MRT4530_1162C.1.pep
HASADAWAATLAASVAGVCLPLFARSVPALRPDGGLFAVVKAFASGVILGTGYMHVLPDSFNDLTSPCLPRKPWSEFPFAALVRGLAAVFTLMVDSLMLTFHTRGSKGRASSAVAHHGDHGHCHAHALGQADVAALSTTEAADQGSGDVEAGNTTKAQLLRNRVIVQVLEMGIVVHSVVIGLGMGASQNVCTIRPLVAALCFHQMFEGMGLGGCILQAGYGGRTRSALVFFFSTTTPFGIALGLALTRVYSDSSPTALVVVGLLNAASAGLLHYMALVELLAADFMGPKLQGNVRLQLAASLAILLGAGGMSVMAKWA

SEQ ID NO: 107262 - protein, 147 aa, Oryza sativa
  unsure (1)..(147): unsure at all Xaa locations
  Clone ID: PAT_MRT4530_11630C.1.pep
GRAPAEPWCEGRARRPSVGARGGRRPSRGVRGDLVGARGEPRREGRPRRRQGRAAAXGEGGDLVGATGRTKRGAVALVKDDDTERRREGRRAASSRGEASVRGEGTTERWLEGRAGRRVGAREVARRHPDRRRGRNPNPMRLALPAD

SEQ ID NO: 107263 - protein, 184 aa, Oryza sativa
  unsure (1)..(184): unsure at all Xaa locations
  Clone ID: PAT_MRT4530_11631C.1.pep
RTPPWQWRRRPRRRRRWRRGRXIRMRSISRSGMASRRRSWREGRPPAEPRRXGRAPAEPWCEGRARRPSVGARGGRRPSRGVRGDLVGARGEPRREGGDLVGATGRTKRGAVALVKDDDTERRREGRRAASSRGEASVRGEGTTERWLEGRAGRRVGAREVARRHPDRRRGRNPNPMRLALPAD

SEQ ID NO: 107264 - protein, 367 aa, Oryza sativa
  Clone ID: PAT_MRT4530_11632C.1.pep
MDSRLVAFSHRRRRWILLAAGGAAAVFGAYKIYHHPAVAARRRRLARLAGAVAAFLDAAAASADAAALVASDLSDFVRSGSDELPRSVTQLAKLAASPEVSATVSAISEAITAGILRGVGSDSGPGSGGGVALSDRLVDRLFSESGERLAAAIAGSFARHLVAAIYSASSTPGETSSPMKWVNLIATGKGQKAISNWVEVFVSTAVGVFVDKTIHINTYDQLFQGLTNASHDAKVKELLVSVCNGAVETMVKATHHVMSNANYKSVGSGSNGAGEGWVETVSSTLAVPSNRKFVLDVTGRVTFETVRSFLEFALWKMHAGAKKGGNTVMDSGLRAMQYMTDKSMVIATICITLCLHVLNGTRLLVTA

SEQ ID NO: 107265 - protein, 83 aa, Oryza sativa
  unsure (1)..(83): unsure at all Xaa locations
  Clone ID: PAT_MRT4530_11633C.1.pep
PRVRATCAGGRGDTRSDGAMALNTCCMLSLHHRQLAPRAEGHDDKALPLFWMVHXDHPGVSSGGKIKXHLIKHLLRRVYGIAS

SEQ ID NO: 107266 - protein, 61 aa, Oryza sativa
  Clone ID: PAT_MRT4530_11634C.1.pep
PNQIKKGPFLLELTIRGAQGKLDPKFFTGFFLKQTSYTQSIGGVRQKNWDRGLITFQNQKF

SEQ ID NO: 107267 - protein, 1399 aa, Oryza sativa
  Clone ID: PAT_MRT4530_11635C.1.pep
MEKQNNDFGKVLAEIQESLVSLNNKQAETQAVVAKLDAGVNGWRPQVESAIHDLRAEDWRMKCEHYFDVNNTFPGLWEEVLETADGNSGNSGKEQKKIEGGILHRPNTAFKGAYPLPAPPVRSGGSGVKFEDKRETEIKRGTNSVDKIGALKAQRCAQGLCYICAEKWSPTHKCANRVQLHAVQELFTVLFESEEDTGSVLDTAAEQQIMAISVHAMQGSEHRGSMRMLGQIQGKDILILVDSGSTASFISKKVAAGLVGVWWLPTKVQVKVADGALLHCQSVIQDCEWVSQGHMFCTEFKVLALGNYDVILGMDWLMQHSPMTVDWSTRTLMLKELDKKMAVANLVQFCFITEDVQTEVIPAAVQKLLTDNVSLFDEPEGLPPQRPFDHTIPLIPGAMPVNVRPYRYTPSQKDEIESQVQEMLSKGIIQPSSSPFSSPVLLVKKKDGSWRFCVDYRHLNAITVKNKYPLPIIDELLDELAGAQWFTKLDLRAGYHQIGMHIEDEHKTAFQTHHGHFEFRVIPFGLTSAPATFQSVMNNILSTLLRKCVLVFVDDILIYSRTMEEHLIHLQTVFQILHKHQLKVKKSKCSFAQQKLAYLGHIISPNGVSTDSDKIVVVQSWPVPSSVKELRSFLGLAGYYRKFVLNYGILSKPLTSLLKKGQLYLWTSATDQAFQAIKHALVTAPVLAMPDFSIPFVVETDASDKGMGAVLMQNNHPITFLSKALGPRHLGLSTYGKKSLAIMMAVDHWRPYLQHAEFFIKTDHRSLAFLDNQRLTTPWQHKALTKLLGLWYQIIYKKGSDNRVADALSRYPLGQQVELLALSVALPAWIQEVVDGYQQDTDACCKIQTLCINSGAVPDFSLKDGSCTVCQQAKPKHVKYPSMLQPLPVPAHAWQIVSLDFIEGLPRSATFNCILVVVDKFSKYSHFVPLSHPFTALDVAEAYMQHIHRLHGLPQSLISDHDRIFTSTLWTTLFRLAGTQLRMSSYHPQTDGQTEHVNQCLQTYLHCFVHACPSQWSRWLALAEYWYNTSFHSALGTTPFEVLYGHEPRYFGLSATSACQSEDLLDWLHEREQMQSLIRSHLLRAQTRMKSQEDKCRSERSFAVGDWVYLKLQPFVQQSVVTRANCKLSFRFYGPFQVLDRVGEVAYKLALPATSLIHPVIHVSQLKKALAPGEQVHAPLPVLRPTIADPPQPIHVLERHFIRKGAKMVEQVLVQWSGDDAAICTWENPHELRRRFPSAEAWGQASAQGGKNVTASSSPCDPEAQDIQIRRSTRARRPTSKFPQRDWLLHGRRVRHGVPRGVVCGDGGEGGGHEGRGEPHDDARRWAAALPACGGARFAATIMKYLGISAVGQLFQDSVDRTVVTTPGCYGAQPLGFGADKPGYNVAYGGPGGLYCDIP

SEQ ID NO: 107268 - protein, 72 aa, Oryza sativa
  Clone ID: PAT_MRT4530_11636C.1.pep
ESTWTWTGDSPSPWTTFNKRGDAQHTEGNTTCRRRGCGRTCTHTQEAGACSSMFSPSTTSQMQISRDRSAWI

SEQ ID NO: 107269 - protein, 188 aa, Oryza sativa
  unsure (1)..(188): unsure at all Xaa locations
  Clone ID: PAT_MRT4530_11637C.1.pep
RSSATNVGLCIVSRCFHRRFVCTVEGMDCILENTSFIHSETLQEIKHTHKEPSIVESKPILCTSQDSPFEPSSEPHEPKEEEIQPSKIPFVFEEGLFEDYRNTSNYSYQKRXMLKGTVKELTTIMSDVWLREVEPSSEVIRISPPYLAIQCLVKETVVIVLYNPTVGANILFATFALTLLTYPPRKLT

SEQ ID NO: 107270 - protein, 737 aa, Oryza sativa
  Clone ID: PAT_MRT4530_11638C.1.pep
MPALHPRASTTPPRCTAPALPFTTPTAQLGLGWEIFHERERWGGREGAPPQSPVKQSTSVLALPVACLAGGGDGDGAAQDGAAGGVGACAGGGGGGGRAVNGSAKRKGKKRRGKTVILREIFTDDRVRTLSHQVSTLGDRVWELEHKNPRLLGEKEGKVERSLKGENDKLRLEVLTPEEKYSQSAAEVEKLQKELVALAEVKEVAAKAFDDEKAKMMMESVDLKSRLEEIQGNMDMIKSENDKLRSEALVAEQKLNICEAEIERLKMELGALTEANEAAAKAFDTQNEEITKELEDLKTKLEEIKTNKDLAESENGKLRSELLSAEEKYSQSEAEVKYLKQVMGAVVEAKEAAAKAFAAEKEDIMKESDNLKRKVKEIQDSKLLVESENDELRSEILSMKQKHGQFEVEVTSLKKELGALEEAKEITTKAFEVEKTEILKELEDLKRKVVEIQTNKDLVEVGNDKLRLDVLSAQQKQSILEVEANNLKMELGALVEAKEVATKAFDAEKAKITKELEDVKRKMEEIQVKKDLVEGEKDKLRLEILIAEQKHSMSELEVKRLKMELGALAEANETAVKSFDAEKEKFIREMGDLKRKIEEIQVSKEAAEEVGRNKNAEADRLRAELVKIQVSLSQLQASYNELDAKHSLLNDEKNSAQKALDVEKVEAYKLKSKFEELENYKAEKDEEAGKLKAALEEKKSEIDVLIKDNELLRLAIAEAQEKNKGSILSCLSPCGSK

SEQ ID NO: 107271 - protein, 74 aa, Oryza sativa
  Clone ID: PAT_MRT4530_11639C.1.pep
GDGGGGRSGGRRWCGSGRRGQRRSGGRRRKQRGGRGRRGRGEAGGDDTEAGDAGGEGNRCGGPGRHQWSKSGRL

SEQ ID NO: 107272 - protein, 145 aa, Oryza sativa
  Clone ID: PAT_MRT4530_1163C.1.pep
RKPEIPYLCKWQVVFRKAENVCRSYESSYSKLCRRFYEQRVVADKRKANIQNCAEGFHQRSCLINNFRILRDLLCRCYTNLFKSELRVFPALFSLRTVFYAFCRSARDYLSYWRHNDKPLGLKPSLFEISFSFLQSLWIFLSLAV

SEQ ID NO: 107273 - protein, 164 aa, Oryza sativa
  Clone ID: PAT_MRT4530_11640C.1.pep
DIEKFLRIRSDPDLDKSPSPQVGKENQMPKKPRGIKLKEKGIHGSARRVGGLEKASSQRKRKKKDDDVPDHVLEPQPEMQSQPPATVMLQLSGKALDQWWRARDNRLLGQAVLELTRKAAESGGVHLGQGGEFLFCCSNSRSAAWRETMPSVGGGKGSRDYAVV

SEQ ID NO: 107274 - protein, 117 aa, Oryza sativa
  unsure (1)..(117): unsure at all Xaa locations
  Clone ID: PAT_MRT4530_11641C.1.pep
CSNLSISSTVKTAASRVXAPWPPPVPSGLSAAGDARAAHLLPTPSPPAPSRRWRRQRCMAPASSASHTPIVCPTAAASTRRRFIGDFLPGIAQIPQPSNPGNSSNPNCNTVSAHLHS

SEQ ID NO: 107275 - protein, 245 aa, Oryza sativa
  unsure (1)..(245): unsure at all Xaa locations
  Clone ID: PAT_MRT4530_11642C.1.pep
MAASASAPPHSLLLAAVALAALASVAAARDENGVYDPCSDTRIQRGDGFGFGIAFATLGAFYSGGSVQLSPCDRRLSLASSGQLAVFRPKVDEISLLTINTTTGFNPAIVQIETVNVLNXKYAARSVPTFVSNSSYTVSSFTLVLEFNKGRLQNLHWKKDGCGACAKSSSLVCIGKQTCALQTQSLQSQGPVDCSIGIQLAFSGTDKHESVLNSWYEVSNLRQYSLYGLYSNLKDTLSGQFNKFF

SEQ ID NO: 107276 - protein, 117 aa, Oryza sativa
  unsure (1)..(117): unsure at all Xaa locations
  Clone ID: PAT_MRT4530_11643C.1.pep
ALYDPRCGLADPGPGSSPQCRDEVPXIXRMWEYEESXXMPLEQXCCFXSEXXGGEGFXSEXGXYGEGSEXGXYGEQQQQPGMTRVRLTRARQXAAQXPSMCRVEPQQCSIFXAAGQX

SEQ ID NO: 107277 - protein, 45 aa, Oryza sativa
  Clone ID: PAT_MRT4530_11644C.1.pep
TIATIGATYLLSKQDMFKQANRAYTTQYEKRTFPNLNNQLNMYGY

SEQ ID NO: 107278 - protein, 116 aa, Oryza sativa
  Clone ID: PAT_MRT4530_11645C.1.pep
MGGGLKGPQNQWVQEWDPGPQNPEFPFPWGPPSPAVGGPLGLAGPLLVFKGIGPEFPFPGEGPGRPDRKFLLGPPPVDAPRLRPGEGPPPRFVPPPVFICPGGFLRAPPVAWGLFF

SEQ ID NO: 107279 - protein, 54 aa, Oryza sativa
  Clone ID: PAT_MRT4530_11647C.1.pep
KKSVPLNIGGNNRFLKGKEGGAFEIYGLQAPGFLGVWWQLNRHRHKKPGLIVKL

SEQ ID NO: 107280 - protein, 152 aa, Oryza sativa
  Clone ID: PAT_MRT4530_11648C.1.pep
MAPWGMRIEGLNKQHLDPLPPSCRQQRVILDPLALKLLSEGKLLERGTVGTPFLVRTRDTGEALRVDVGRCRGVGPLGNDGDTSDLDRDYHKGPRPSFKGKENILYRLARGAPAQATYVKQSVEGVRVARHLERMGGSRRSNSGPDPRGGRH

SEQ ID NO: 107281 - protein, 77 aa, Oryza sativa
  Clone ID: PAT_MRT4530_11649C.1.pep
MASHDVPISHVVNHHQQLLVEEGVTCSHHQLTFEGMKQGQESLIGEDFREGKATSLGSKLRRGLVNLISLPFLTIPF

SEQ ID NO: 107282 - protein, 103 aa, Oryza sativa
  Clone ID: PAT_MRT4530_1164C.1.pep
MKRSNRAEALPKNLITCLPGADLRRSERLQVEVHPYCRQNKLREFCKGKGIQMCAYSPLGANGTSWCSNVMDCPLKQIALERGKTVAQVCLRWVYECMSKVTA

SEQ ID NO: 107283 - protein, 459 aa, Oryza sativa
  Clone ID: PAT_MRT4530_11650C.1.pep
MSTAALRACAVIFGRRRRLRAGRRRSPPVTARAAAGRHGRRSALKPSRAVPSRLPRAVRSPLRPIRTVGPVDRRWTTRVVPMTRKVAAMDAKEAEEVMRRNAKLEAAAAEAAAREARLRRELEAALARLAVAEEGEERLCVQLGELEAEAMAQAVEYQQRGFLNHRGQGYRAPAVSTVTAAREEEEIDGGGGESSGGGSISREEEEGSWKEVVVEGGGCGRRNPSPTARHPLLAATTPAIFGGGEGAATARRPPPPAVSPLAGSGGGEGAAGTRCLSSCAAACCLPSCRIQRRVPPPPVAWRLSSCAAACCLPSRRIWRRGGCRRHPAPLVMRRHLLPPLPPDMAEGRVLPPPVARRLASSHRHTRDNVGFVSVRRPAGSFNFDGTWETWFSVDSGSAATTPPPAAAGFTPVVFTVFFLCVRAMQSQVAIREHCVDGDVRRRYDDRPDVLHRGVLHDGR

SEQ ID NO: 107284 - protein, 397 aa, Oryza sativa
  Clone ID: PAT_MRT4530_11651C.1.pep
MDAKEAEEVMRRNAKLEAAAAEAAAREARLRRELEAALARLAVAEEGEERLCVQLGELEAEAMAQAVEYQQRVRELSDRLAFVDGILRPYESLLGIARGFLNHRGQGYRAPAVSTVTAAREEEEIDGGGGESSGGGSISREEEEGSWKEVVVEGGGCGRRNPSPTARHPLLAATTPAIFGGGEGAATARRPPPPAVSPLAGSGGGEGAAGTRCLSSCAAACCLPSCRIQRRVPPPPVAWRLSSCAAACCLPSRRIWRRGGCRRHPAPLVMRRHLLPPLPPDMAEGRVLPPPVARRLASSHRHTRDNVGFVSVRRPAGSFNFDGTWETWFSVDSGSAATTPPPAAAGFTPVVFTVFFLCVRAMQSQVAIREHCVDGDVRRRYDDRPDVLHRGVLHDGR

SEQ ID NO: 107285 - protein, 80 aa, Oryza sativa
  Clone ID: PAT_MRT4530_11652C.1.pep
FHYTFAGCVTYENYNCTSQSFMCVIVAKVSTTRSSTICATGLAHVTVRVCTTNTNSYSPSRVPRRVPCWHPNGCDSMWPL

SEQ ID NO: 107286 - protein, 56 aa, Oryza sativa
  Clone ID: PAT_MRT4530_11653C.1.pep
TSSTPLTLPYPTLAARRPWRDRGARGVRTGDPPLRRGQSDMGRPRQLGQITCRELY

SEQ ID NO: 107287 - protein, 594 aa, Oryza sativa
  unsure (1)..(594): unsure at all Xaa locations
  Clone ID: PAT_MRT4530_11654C.1.pep
MELRPPPPKHHHHRRRRGGGGEDGGEEEEEETGRLSLRGGGFWRRHDGEEEEEKGGGRRGEIKEVDFFLGASGRDVVVASRRHDDGFRGTTHGGGGGGDVNIGLDLLTTTTAGAAAGGAAAGAGEEDTGKNHRKEATTAAVDVELRRVVEENRRLXGMLDELNRSYSALYHQYLQVTQQQNHRHPDHHLIMNNNNNRPSLAQTHRTAATTTATTQQFLEPRASSTAQATADADMAASDDEAGRGGGDGDASSPSLSNAAGGGGGGNKMRRVGGQDETAAAAPARENGEQQAAAAAELPCRKPRVSISDGCQWRKYGQKMAKGNPCPRAYYRCTMAIGCPVRKQVQRCAEDKTVLITTYEGNHNHQLPPAATTMANTTSAAAAMLLSGPAASRDGAAAALLGHHHHHHPAAMFHQSFPYASTMATLSASAPFPTITLDLTQTPAGGAGAASLLHALHRPPVIHPGAAAQAMPFAVPPQLAMYLPQQRAAAAGLGGAGAARQPSVMETVTAALAADPNFTTALAAAISSVVAGGAHHQALSTTPRGSAAGAGDGNGNGSSAAAVATGAASPAATAEAPAASGSPPRLATQSCTTSN

SEQ ID NO: 107288 - protein, 800 aa, Oryza sativa
  Clone ID: PAT_MRT4530_11655C.1.pep
MRVKGTYRKYLTTDVQFLSDVLVESSTFLSCIALSAGDHRSVLWRGGSIAVEDAAENVLVSPSGNFSCGFYKVATNAYTFAVWFTASADATVAWTANRDSPVNGVGSRAELRRDGSLVLQDYDGRVVWSTNTSGTPADRAQLLDTGNLVVADAAGNRLWQSFDWPTDTLLAGQPVTRYKQLVSASARGLPYSGYYKFYFDSSNILNLMYDGPEISSNYWPSPFNKWWDNNRTAYNSSRYGSFDRRGVFTASDQLQFNASDMGDEGVMRRLTLDYDGNLRLYSLDAAAGRWHVTWVAVGRQCYVHGLCGSNGICSFRPGPTCSCPVGYVPNDASDWSKGCRRSPDVRCGGDDVVDFVEMPHTDFWGFDVNYTAGVTFDACRRLCLDDCNCKAFGYRPGTGRSVKNQMINQSSSFLHFDGHACTVDERDASVGSSYLHGRSNEINFIYFYSFLAVVFVVEAIFVVVGYLFVFRADPVAAGRVRDDGYSLVFSHFRRFTYDELSDATCGFRDEIAKGGTGSVYKGVLEDGRSIAVKRLGELTQADEVFRSELSVIGRINHMNLVRIWGFCSEHPHRLLVSEFVENGSLDKALFCDDGESSGVVVLPWRSRYKIAVGVAKALAYLHHECLEWIVHCDVKPENILLDGDFEPKVTDFGLVKLLSRDAGSHMALSRVQGTRGYIAPECWTVGRPITGKADVYSFGVVLLELLRGQRVCDWVAAADGAWDLQRLAAWLKEKLKRDDDEEEVSTWLEELVDARLRGDFNHVQAAAMLELAVCCVDGEPNRRPSMNAVAQKLLSLHDTR

SEQ ID NO: 107289 - protein, 848 aa, Oryza sativa
  Clone ID: PAT_MRT4530_11656C.1.pep
MNRVHGLHLIVLTSLCCVALSAGEGDRRSVLWRGGSIAVEDAADSVLVSPSGNFSCGFYKVATNAYTLAVWFTASADATVAWTANRDTPVNGVGSRAELRKDGSLVLQDYDGRVVWSTNTSGTPADRAQLLDTGNLVVSDAAGNRLWQSFDWPTDTLLPEQPVTRYRQLVSAEARGSPYSGYYKFYFDSSNILNLMYDGPEISSNYWPDPFKKWWDNNRTAFNSSRHGSFDRRGVFTASDQLQFNASDMGDGGVMRRLTLDYDGNLRLYSLDAAAGRWHVTWVAVQRQCDVHGLCGRYGICTYSQGPTCSCPDGYVPHDASDWSKGCRRTFDVRCGEDVAFAEMRHTDYWGFDLNYTAGISFDTCRRLCLVDCRCEAFGYRQGTGECYPKISLWNGRVMSIPYQTIYLKFPTGAKNLNPSLLHFDGHTCTMDERDATVSSSYLHGRRNTINFIYFYSFLAVVFVVEAIFVVVGYLFVFRADSVAAGRVGDEGYSLVFSHFRRFTYDELSDATCGFRDEIAKGGTGSVYKGVLEDGRSIAVKRLDEMTQADEVFRSELSVIGRINHMNLVRIWGFCSEHPHRLLVSEFVENGSLDKALFCDDGESSGVVVLPWRSRYKIAVGVAKALAYLHHECLEWIVHCDVKPENILLDGDFEPKVTDFGLVKLLSRDAGSHMALSRVQGTRGYITPECWTVGRSINGKADVYSFGVVLLELVRGQRVCDWVAAAATADGAWNVQRLAVWLKEKLKCDDGELPAWLEELVDARLRGDFNHVQAAGLLELAVSCVDGEPSRRPSMSTVVHKLISLDTIEHHLYATHELAANAAVVSLVGDVGGINCVCRVEDLNCFSC

SEQ ID NO: 107290 - protein, 124 aa, Oryza sativa
  Clone ID: PAT_MRT4530_11657C.1.pep
MVRSWPVAENEKRRKVSAQRYHVLLVKKHDYTASLFTAPVNAPAPAKEHGCCERGHAARRASAVGTTRAWVGWLTPWLDERPKGYLFKRSSPLAGEFRKPGRTRKGANRQQQQELLVSVEAQAE

SEQ ID NO: 107291 - protein, 102 aa, Oryza sativa
  Clone ID: PAT_MRT4530_11658C.1.pep
GQHLGGFFRPPLCFWAGFLEAPLLLGDISPPPFFGGGGPFLILGGDPPGFSLVCLLGGGFFYLAPLFFVKKKKKKKKKKKKKKKKKKKKKKKKKKKKKKKKK

SEQ ID NO: 107292 - protein, 393 aa, Oryza sativa
  Clone ID: PAT_MRT4530_11659C.1.pep
MAVLARLGVIVVLWAVVAEGILDPVDFLALQAVRRSLDDMPGSSFFEAWDFTADPCGFPGVFCDGNKVSALALGDPRAGSPGLSGRLDQALGRLSALTELSLVPGRVEGELPESLSSCRNLRFLAVSKNLISGQIPDGLGGLSNLRTLDVSFNQISGTIPASIATLPSITNLILCHNHLTGGIPSFPDSSPLIRLDLKHNDLSGGVPNLPSTLQYLSLSANRLTGTVDSVLPRLTRLNYLDLSMNQLDGPIPASVFTLPLSVLQLQRNFFSGLLQPANDVTIQVVDLSYNRFWGPVSPLLAGVGQLYLNNNRFTGEVPARLVQELVGSGGLQVLYLQHNFLTGIEISPASSLPSSVSLCLMYNCMVPPVYAPCPLKAGSTNTRPADQCPEWRG

SEQ ID NO: 107293 - protein, 171 aa, Oryza sativa
  Clone ID: PAT_MRT4530_1165C.1.pep
PASARRQARERRPELHDIAPPPPAPPHRSARVAATASSQPRDTVSVALTGPGTRARSRSRRCPLPQSPPYASKFLIFMALCSCSGGLIDWCASADDLCKDDAKNAHLVSLDVAAERLRLFKADLLDYGSVAAAIAGCDDVFHVACPIATRADQCGSAAEVFVGGGAEVVQL

SEQ ID NO: 107294 - protein, 129 aa, Oryza sativa
  Clone ID: PAT_MRT4530_11660C.1.pep
MGTGAWLTRSTAAGAAPWTRTTGVVHGTDGLGSMARARHGSKPASRTTAMGSARPLAVWNGGKRPRGGGKGDRKGRGTGEEGSSPEAAAGTEEDDDGDDSVASDEGGGEAEGRLHLGKLLEGLGKREKA

SEQ ID NO: 107295 - protein, 56 aa, Oryza sativa
  Clone ID: PAT_MRT4530_11661C.1.pep
FIILFFSSNICQPFIFRSLASSAHQHIHPTHRCPITMVVGGFIIISLSLPCITFRF

SEQ ID NO: 107296 - protein, 46 aa, Oryza sativa
  Clone ID: PAT_MRT4530_11662C.1.pep
MKKTVFIYELCILHRIKPPPISSFVQTDIDKSPFCGARKIGRARCR

SEQ ID NO: 107297 - protein, 235 aa, Oryza sativa
  Clone ID: PAT_MRT4530_11663C.1.pep
MGTVPRNPLGKNSIRGSRASPARICLLTQDGGVVEWIRIPHRRRRLRSNRSSETTTPLRCAAQISHAPPTAGDQVMPLESTTLGNAAWINQLCGASPSSHPRCSSCRCRLRAARQRLVSSPSPRRCFAPPHALPPPLRITPPLLDYSSHHTDATSQHGRRFSFSPSGVRNPAGVQYPHGDGDGRKPRPVCGDRDRERGSFSARGRGRSASLLRSLPRPYFGNMGRGSFVGSQKDK

SEQ ID NO: 107298 - protein, 92 aa, Oryza sativa
  Clone ID: PAT_MRT4530_11664C.1.pep
MAVTGREGTAPAGVRVGPGCQWVGIAGAACVGHGPSGGGAMYGAATGSPACAATHAAGEVGASRCSTVFSTSGLRLAHRLVLLFTCRPLFAF

SEQ ID NO: 107299 - protein, 106 aa, Oryza sativa
  Clone ID: PAT_MRT4530_11665C.1.pep
GMPDHTNYKISRFAQHCSKKEMYMYHFKGLTDEDARELFLTKERPVTTSRRMHAAGGGAPATTRGRRTPSLAAHSATTRAACLGLGANGWGFLFFCFNFSRSRAKN

SEQ ID NO: 107300 - protein, 44 aa, Oryza sativa
  Clone ID: PAT_MRT4530_11666C.1.pep
ITWHIYNNIQRALTKKKMPHFYCLHPTKMEWELERSAAIILLHN

SEQ ID NO: 107301 - protein, 192 aa, Oryza sativa
  Clone ID: PAT_MRT4530_11667C.1.pep
AFIEFETKEACERAFFKMDNCLIDDRRIHVDFSQSVSKLWGQFRQSKRNANKDGCFKCGAPDHIAKDCDQGTEQKNKGPSYVLKDENTQRGGNNRRSYDLVFDEDGENYTDQQDPGSTGRRKIQRTDDRKSGLPPRGDHDRISRRGTHSDENGREGGKEGDRDRGIRKHEDYHRYNKSGERSSSRYDDRGYS

SEQ ID NO: 107302 - protein, 601 aa, Oryza sativa
  unsure (1)..(601): unsure at all Xaa locations
  Clone ID: PAT_MRT4530_11668C.1.pep
MELGRPGCPVDRLPDSLRHERGAARCLLGTGRTLSFMQKNLSLPWIYPASYLLFRYDLLSTSFKGDLFHTYILKGQTPNFNTFLKLRDHWDEFVAYKIGQQGQAMMETNKENAAKKKYHHHLGSGGYSVAMPKCEEMEASLLEREKDELSLALQTPEHPRRTRGKGVIPWKIGFKEDIHTYRSRMRSKRDTEAKIEDLEYRVSSYELSMQEEVVRKVDERMAAHRSHDPQPTIPPAMMSPSGNRSSCASTGQVGSQSMDAIQTQDETTCLIDDITQRTPCEVHIPFKNLSIKVASGMAILTDPSKTYHCRPIPVGYSKVPAPSPPQAPAPTPPQAPTPTPPQAPRPAPSKSRAPQAPPPAPTKAMKKAKVDAAKNKDPGYDCTQEKLDAYVASEVRRQLKPRSPENKIPIDPSVKNFFRGAPIEKAEVKYMYELGKPLVKPEQLQSLPTQMYQFHQLYMEMSATSREMIGVRIRDTDFMQGEDILWINFXGMEIQRARQRGXVFDTGFVDPRKVNVAMLDQYPQATEDNLVHLLKAQHYKTFILLPYNTEAWYRFRHLVRCKWRERLRRKFNFHVIHMRDKLTHKEFIAAVQEQLMGFINE

SEQ ID NO: 107303 - protein, 412 aa, Oryza sativa
  Clone ID: PAT_MRT4530_11669C.1.pep
MAAHQSQDPQPYISPAMVSPSGNRSSCASTGQVGSHSMDTMQTQDETTCPVDDITQRTPCELHIPFKNLSIKAFAPSSPHAPAPSPPQAPAPTPPQAPAPTPPQAPRLAPSKSRAPQAPPPAPTRATKKAKVDAAKNKDPGYDCTQEEPDAYVASEVRRQLKPRSSEKKIPIDPSVRNFFRGMSAPAKEAIKLSADYERTLKKASSGKSKPVPQLGEQPNQEIEPLVTGEEFGIQDFINDTRLTTDQLLRGAPIEKVEVKYMYELSKPLVKPKQLQSLPTQMYKFHQLYMEISATGREMIGAMIRDTDFLQGEDILWINFKGIYELYQLDALDLLDFNGDSKGPTVGGFRYWIHRPSESKHHNARPVSASHRGQSRPSPEGAALQDVHTIAIQHRVSFYCLPTKFHSRTNKL

SEQ ID NO: 107304 - protein, 398 aa, Oryza sativa
  Clone ID: PAT_MRT4530_1166C.1.pep
MAARVVWVNGPIVVGAGPAGLSVAACLRERGVPSVLLERADCIASLRQRRTYDRLRLHLPKHFCELPGMPFPDGYPEYPDRRQFVDYLQAYAARAGVEPRFNQSVTSARYDDAAGLWRVRAEDVSVDAAGDVTEYIGRWLVVATGENAERVVPEIDGADDFEGPVSHVAEYKSGAAYRGKRVLVVACGNSGMEVCLDLCHRNALPAMVVRDSKVHVLPREMLGVATFSVAVFLLRFLPLWVVDRILVVLAWLFLGDLAKIGITRPSRGPLELKNTRGRTPVLDIGALARIRSGDIEVVPGIRRLLRGGAELVDGRRVPADAVILATGYQSNVPQWLKGSDFFTQEGYPRVPFPDGWKGESGLYSVGFTRRGLSGVSSDAVKVAQDIAMAWNHQTATTR

SEQ ID NO: 107305 - protein, 916 aa, Oryza sativa
  Clone ID: PAT_MRT4530_11670C.1.pep
MEYKIMWSKARRALSIRAPGSGGHRGAKPLLNPRVSHRHARGRLPRCRHRQLEPTRTLPFLHLLASHRAPQPLPLTPAHGHLPPRKRPRGVGSAAAPPPPRAAASAEATYSDRSAALRALCSHGQLAQALWLLESSPEPPDEGAYVALFRLCEWRRAVDAGMRACARADAEHPSFGLRLGNAMLSMLVRFGEIWHAWRVFAKMPERDVFSWNVMVGGYGKVGFLEEALDLYYRMLWAGMRPDVYTFPCVLRTCGGIPDWRMGREVHAHVLRFGFGDEVDVLNALVTMYAKCGDIVAARKVFDGMAVTDCISWNAMIAGHFENHECEAGLELFLTMLENEVQPNLMTITSVTVASGMLSEVGFAKEMHGFAVKRGFAIDVAFCNSLIQMYTSLGRMGDAGKIFSRMETKDAMSWTAMISGYEKNGFPDKALEVYALMELHNVSPDDVTIASALAACACLGRLDVGIKLHELAQNKGFIRYVVVANALLEMYAKSKHIDKAIEVFKFMAEKDVVSWSSMIAGFCFNHRSFEALYYFRYMLGHVKPNSVTFIAALSACAATGALRSGKEIHAYVLRCGIGSEGYVPNALLDLYVKCGQTSYAWAQFSVHSEKDVVSWNIMLSGFVAHGLGDIALSLFNQMVEMGEHPDEVTFVALLCACSRAGMVIQGWELFHMMTEKFSIVPNLKHYACMVDLLSRVGKLTEAYNLINRMPIKPDAAVWGALLNGCRIHRHVELGELAAKVILELEPNDVAYHVLLCDLYTDAGKWAQVARVRKTMREKGLEQDNGCSWVEVKGVTHAFLTDDESHPQIKEINVVLHGIYERMKACGFAPVESLEDKEVSEDDILCGHSERLAVAFGLINTTPGTTISVTKNRYTCQSCHVIFKAISEIVRREITVRDTKQLHCFKDGDCSCGDIGYG

SEQ ID NO: 107306 - protein, 844 aa, Oryza sativa
  Clone ID: PAT_MRT4530_11671C.1.pep
MNLTKDVVIVVPQAGVYLNEEGNVERDAEGNQEGNVERDAEENEEEEASGSQPSAGQKRARGQRGAAKKLEGRHIITEVDEDGRPSAPAEAAKNYVRHSGWVVRDNVPVSTVYWRKTRACGDHESFVPDSEKEMLWTTMLETFTLPAGTEDKVKRWTLKKIAEQFQSFKRVLYQKYILKGQTPNFDTFPKLRDHWDEFVAYKTGQQGQAMMERNKENAAKKKYHHHLGSSRYSVAMPKWEEMEANLLERGIEPATAKWPYRSKFWYYAHGGTLNPVDGSLVFSDQIREAARRLTDAAEASSQGTFRPDREKDELSLALQTPEHPGRTRGKGVVPWKIGFKEDIHTYRSQMRSKRDTEAKIADLEYRVSSYELTMQEEVARKVDERMAAHRSHDPQPYIPPAMVSPSGNRSSCASTGQVGSQSMDAMQTQDETTCPVDDITQRTPCELHIPFKNLSIKMASGMAIPTDPSGTYHCRPIPAGYSKVEVELVEGAYEDLELDYPGGDGSCTVSSSCSCTDSSSGSCTDSSASSSSGTFQVKGPQASPPAPTRATKKVKVDAAKNKDSGYDCTQEELNAYVASEVRRQLKPRSPEKKIPIYPSVRNFLRCMSAPTKEAIKLSDYERTLKKTSSGKSKLVPQLGEQPNQEIEPLVTGEDFGIQEFINDTGLTTDQLLRGAPIKKAEVKYMYELGKSPIKPEQLQSLPTQMYKFHQLYMEMSATGREMIGARIRDTDFLQGEDILWINFKGIYELHQLDALDVSIMSCWILMEIQRARRRGVFDTAFIDPRKFIRMSDNLVHKEFIAAVQEQLMGFINEQILDPKSEFYYDGNTIHRSLASEITTTASKS

SEQ ID NO: 107307 - protein, 102 aa, Oryza sativa
  Clone ID: PAT_MRT4530_11672C.1.pep
GSTRPKWGPPVQNTQAGTTTILWTRIQIWKYKATKRMGATIWGGRLTEAVWETLPKGPFAGKTLELPGKPGILPPAFPTSGAGYGPRNKPWFTGIGGPPRGG

SEQ ID NO: 107308 - protein, 567 aa, Oryza sativa
  Clone ID: PAT_MRT4530_11673C.1.pep
MTIDNNLFRKAHFTVLQQSSLVAPYIEEHLALIRARNIELAFLARGPSGSIATFQGYEINRYTLYTRAQDMKSTNQNSVVRIDAMGHDGTTGTYYGVIEDIWELDYGPLKVPLFRCQWVRLTGGGVTIDDSGMTTVDLNMVGYSDEPFVLANDVTQVFYVKDMSSKGKKGKGPDEPKRHVVLPGKRKIVGVEDKTDENYDQLDGQPPFTVTIDPSILLSNEDTPYSRRDNKEGTIVRRKYVRSTVTADVLPRASTPPLRCRPCRPISERKANEQKKIPIDPSARNFFRGMSAPAKETIKLSDYERKLKKASSGKSKPVPQLGEQPNQVIEPLVTGEEFGIQDFINDTGLTTDQLLRGAPFGKAEVKYKYELGKPLVKPEQLQSLPTQMYKFHRLYMEMSATGREMIEVRIRDTDFLQGEDILWINYKGIYELYQLDALDVSIMSCWTLMEIKRARRRGVFDTGFIDPQKVNVAMLDEYPQATEDNLVHLLKAQHYKMFILLPYNAEYVSVLSELSVELATSVSRQQHDGVDIDDGVVEQTTAWWSGGRALPSMRKKGTTEEEQQEER

SEQ ID NO: 107309 - protein, 88 aa, Oryza sativa
  Clone ID: PAT_MRT4530_11674C.1.pep
LLILCVIILFCFCIRGAAGTAGLPPYACTERLFRSCHRIWCCKYVLYYLNVIARVAYVFSLTALTLTMMNQTSRESFQANLMAHVHEL

SEQ ID NO: 107310 - protein, 745 aa, Oryza sativa
  Clone ID: PAT_MRT4530_11675C.1.pep
MEEDEVEDDNIPNFAQYVGFEGNQTGEEEIAADGNDVVDDLGQMLQDAREDCEGEKEAHKLDKMLEDHRTSLYPGCEQGHKKLDTTLELLQWKAKNGDGMLRHLADGSQCGYSSWPITMCIYNLPPWLCMKRKYIMMPIIIQGPKQPGNDIDVYLRPLVEDIKLLWKKEDVPVWDEDKQEEFYLRALLFVTINDWPALSNLSGQSNKGYKACTHCMDEIESTNLKHCRKVVYMGRHRFLATNHQVQKKGKHFEHKADHRTKPKHCSGKTVFAMVKDLKVVFGKGPGNQPIESKDGHAAMWKKNSIFWELPCWGFLDVRHAIDVMHLTKNLSVNLLGFLGVYGKSKDTLEARNDLKCMEQRGDLHPEPKEKGSHYFSPASYTLSKAEKESMFECLESIKVPSGYSTNIKRIISTKDKKFTNLKSHDCHVLMTQLLPVVIRGILPDNVRATITKLCAFMNAISQKVIDPDRLEALQNDVVQCLVSFELIFPPLFFNIMTHLLCHLVKEIGILGPVYLHNMFPFERYICVLKKYVRNRARPEASIAKGYGTKEGYDINGYTFYTRAQDMKSTNQNSVVRIDAMGHDGTTGTYYGAIEDIWELDYGPLKVPLFRCQWVRLTSGDVTIDESGMTTVDLNKVGYLDEPFVVANDVMQVIYVKDMSSKGRKGKGPDEPKRHVVLPGKRKIVGVEDKTDEDYDQLDGQPPFTVTIDPSILLSNEDTPYSRSDHKEGTIVRRKYVRSTVIADVL

SEQ ID NO: 107311 - protein, 453 aa, Oryza sativa
  unsure (1)..(453): unsure at all Xaa locations
  Clone ID: PAT_MRT4530_11676C.1.pep
MRVKVISRSTDEFTRERSQDLQKVFRNYDPALRSQEKAVEYTRALNAAKLEKIFARPFIGAMDGHVDAVSCMAKNPNYLKAIFSGSMDGDIRLWDIAARKTVCQFPGHQGAVRGLATSTDGDLLVSCGVDCTVRLWKVPMLKMVDTNDAIGDAXSQPSAVYTWKHAFWGVDHQWDGNLFATVGAQVDIWDQNRSEPINSFEWGKDTVLSVRFNPGEPDVLITSASDRSITLYDLRMSSPARKLIMKTRCNSICWNPREPMNFTAVNEDTNCYSFDARKLDEAKVVHKGHVSAVMDIDYSPTGREFVTGSYDRTVRIFQYNGDHSREIYHTKRMQRVFCVKYTYDGTYLVSGSDDTNLRLWKSKASEQLGVLLPRERRKQEYLDAVKERYKHLPEVKRIVRHRHLPKPIYKAANLRRTMIEAENRKEERRRAHSAPGSMPVQPFRKRRIIKEVE

SEQ ID NO: 107312 - protein, 119 aa, Oryza sativa
  unsure (1)..(119): unsure at all Xaa locations
  Clone ID: PAT_MRT4530_11677C.1.pep
TKREISPAMVSPSGNRSSCASTGQVGSHSMDTMQTQDETTXSRALSPPQAFAPSSPHAPAPSPPQAPAPTPPQAPAPTPPQAPRLAPSKSRAPQAPPPSESKHHNARPVSASHRGQSRP

SEQ ID NO: 107313 - protein, 1643 aa, Oryza sativa
  unsure (1)..(1643): unsure at all Xaa locations
  Clone ID: PAT_MRT4530_11678C.1.pep
MDRQWMYADRRSKEFIDGVHYFLRVAEANKHKGFICRPCNMCKNQKEYYASRTIHFHLFESGFMPSYNCXTFHGEKGVEMEEDEVEDENIPDWAQYAGFEGNQTGEVDRDADDNDATDDLGXMLQDAKEXPRLRRLFRNKGNARMMRWHAEERQQDGMLRHXADGSQWRNIDRTFKDFGKDARNIRFGLSTDSMNPFGEMSSSHSTWPVTMCIYNLPPWLCMKRKYIMMPIIIQGPKQPGNDIDIYLRPLVEDLXLLCKKEGVPVWDEDKXEEFNLRALLFITINDXPALNNLSGQSNKGYKACTHCMDETEGVYGKXKDTLESRNDLKHMEQHSDLHPEPKEKGSHYLSPASYTLSKAEKESMFECLESIKVPSGYFTNIKRIISTKEKKFTNLKSHDCHVLMTQLLPVIIRGILPDNVRATITKLCAFMNAISQKVIDPDKLEHLQNDMRYMGALKKYVHNRARPEASIAKGYGTEEVIEFCVEFIEDLRPIGVPESRYEGRLRGKGTLGRKAIMMVDNNLFHKAHFTVLQQSSLVAPYIEENLALVRARNIGKSDAWITRHHIDTFPAWLRLLMGNETINQQLAFLARGPSSSIATFQGYEINGYTFYTRAXDMKSTNQNSVVRIDDMGHDGTTSTYYGAIEDIWELDYGPLKVPLFRCQWVRLTGGGVTIDDSGMTTVDLNKVGVDRGHATAAAPRCRRHYRQPRRHRRRRRTTPMPPPPRHATAVVSRKYFLYEQMADRDNEQILYDTIAEGSSQYWNEEEGNEDPNQYLNEEVNEEGNVEEGNEEGNVEGNEEGNGEEASGNEPSSAQKRGRRQRGAAKKIEGRHIKTEVDEDGRPSAPAEAAKNYVRHSGWVVRDNVPISKVYWLRTRARGDYDSFVPESEKEMLWTTMLETFTLPAGTENIVKQWTLKKMVEQFXCFKEELYKKYILKGLTPNFNTFPKLRDHWDEFVAYKTGQQGQAMMDRNKENAAKKKYHHHLGSGRYSVAMPKWEEMEASLIERGIEPATTKXPDRSKFWYYAHGGTLNPVDGSLAFSDQIREAASRLTDAVEASSQGTFRLDREKDELSRMRNKRDTEVKIADLKYRVSSYELSMQEEVARKVDEHMAAHRCXDPQLYIPHVIVSPSGNRSSCTSTRQVASXMAIPMDPLGTYHCRPIPAVEVELVEVAYEDLELDYPRGDGETHLRDTSHTIILWRKRYIILPRQQAASPAPSPPAPPSPPPPPPAPSPPAPPPPSPPSCPPTPPKTRSHQAPPPAHTRATKKAKVDATKNKEPPHDCSQEELDAYVASKVKRQLKPRRPEKKIPVDPSVKNLFIKMSTTNKEALKLLDYYRTLEKAYYKKSKPVPQLGEQPNQELEPLVTGEEIGITXFISDTGLTVDQLIRGAPILKAEVAYKFELGKPLVTPEQLQSLPIXMYKFHERYMEMSAKGREMLXARIRNSDFLQREDVLWIEFKDVFELYHLDALDVSLLSAWILMEIQRAXWWGVYDTGFIDRRKINVEMIDKYEKDTEDNLVHLLTQQHFKTFILLPYNTEVNVYDSMNKEDKTFDKFFQLIDRAWDRFRQLVRGTWKEKLGRRFNFPRIHIRDNLPHKDFITAVQEQLMGFINEEVHNPKGEFYYDGSTIHNIGPSSSDITPASKS

SEQ ID NO: 107314 - protein, 124 aa, Oryza sativa
  Clone ID: PAT_MRT4530_11679C.1.pep
LTTPTSHHVLYLCTTIEISKWLNTISQVTGAGSDAEGASPGGHGTTSAWSIAAATNEPITRRSTTYMRTDDAGAGPGDPEPAEGADCEATESTGHSTPPSSPTLISAQIPPPMTVCVCVCADHC

SEQ ID NO: 107315 - protein, 277 aa, Oryza sativa
  unsure (1)..(277): unsure at all Xaa locations
  Clone ID: PAT_MRT4530_1167C.1.pep
MATDQSQSLDLSIYRRKYYIPLVSSADRIDLVLSCLFTTADRLKYDIGSKINDTSSATGRSGAPSTAVFAQPASTSATITTSQANANLEAQAEADMGXMRQNMAKLQDTLRQMQEQQQATGVLRQPTQANAARPTRQMVPAPVRPAAHHAQYPKPTHNPQAMMKEASTLQAQFQAFPQXLNQHHNNIPRASPPAQAEGSPSQGVSAGQLLGQFALLSQIQGPSPQGPPSLFDPSTMAQAPTTFAQAVPPXVQNGPTIDSSLESTHVRPSHGDASHFD

SEQ ID NO: 107316 - protein, 60 aa, Oryza sativa
  Clone ID: PAT_MRT4530_11680C.1.pep
MDLQWMYIDWRSKEFIEGVHYFLRVAEANKWVEMEEDEVEDENIPNWAQYVGYEGRGSSR

SEQ ID NO: 107317 - protein, 119 aa, Oryza sativa
  unsure (1)..(119): unsure at all Xaa locations
  Clone ID: PAT_MRT4530_11681C.1.pep
LGLNFLEREKRGGKNLGPLTPKKKKGTPIXXPQIXPPXGPFXEKRAPRAQRFKNPKKGLAQRVWKIFWALGGGLVWGPKFFNXPLGXFLXPPGLLXPPPPIFPNWEPNFFWGGNFPPWG

SEQ ID NO: 107318 - protein, 1797 aa, Oryza sativa
  unsure (1)..(1797): unsure at all Xaa locations
  Clone ID: PAT_MRT4530_11682C.1.pep
MDLQWMYIDWRSKEFIEGVHYFLRVAEANKXYGFICCPCNKCKNQKEYSASRTIHFHLFESGFMLSYNCWTSHGEQGVEMEEDEVEDENIPNWAQYVGYEGNQMGEVDRDAGDNNAADDLGQMLQDAKEDCEGEKEAHKLERMLEDHRTSLYPGCEQGHKKLDTTLEFLQWXAKNGVSDKAFGDLLKLVKNILPEGNKLPETMYEAKKIVCPLGLEVQKIHTCPNDCILYRGEEYENLEACPVCKALRYKIRREDPGEVDGQPTKKRITAKVMWYFPIIPRLRRLFRNMGNARMMRWHAEERQQDGMLRHLADGSQWXNIDRKFKDFEKDARNIRFGLSTDGMNPFGEMSSGYSSWPITMCIYNLPPWLCMKRKYIMMPIIIQGPKQPGNDIDVYLRPLVEDIKLLWKKEDVPVWDEDKQEEFYLRALLFVTINDWPALSNLSGQSNKGYKACTHCMDEIESVYGKSKDTLEARNDLKCMEQRGDLHPEPKEKGSHYFSPASYTLSKAEKESMFECLESIKVPSGYSTNIKRIISTKDKKFTNLKSHDCHVLMTQLLPVVIRGILPDNVRATITKLCAFMNAISQKVIDPDRLEALQNDVRYIRVLKNYVRNRARPEASIAXGYGTKEVIKFCVKFIXDLRLIGVPESRHEGRLRGKGTLGRKAIMTVDNNLFRKAHFTVLQXSSLVAPYIEEHLALVRAGNIGKSDARITRHHIDTFPAWLRQHLMGNETINQXLAFLARGPSGXATFQGYDINGYTFYTRAQDMKSTNQNSVVRIDAMGHDGTTGTYYGAIEDIWELDYGPLKVPLFRCQWVRLTSGDVTIDESGMTTVDLNKVGYLDEPFVVANDVMQVIYVKDMSSKGRKGKGPDEPKRHVVLPGKRKIVGVEDKTDEDYDQLDGQPPFTVTIDPSILLSNEDTPYSRSDHKEGTIYLNEEGNVESDAEGNQEGNVERDAEGNEEEEASGSQPSVGQKRARGQXGAVKKLEGRHIITKVDEDGRPSAPAEAAKNYVRHSGWVVRDNVPVSTVSWRRTRARRDHESFVPDSEKEMLWTTMLETFTLPAGTENIVKRWTLKKMAEQFQSFKGDLYHKYILKGQTPNFDTFPKLRDHWDEFVAYKTSQQGQAMMERNKENAAKKKYHHHLGSGGYNIEMPKWEEMEASLLERGIEPTTAKWPDXSKFWYYAHGGTLTLVDGSLVFSDQIREAASRLTDAVEASSQGTFRPNREKDELSWMRSKRDTEAKIADLEXRVSSYELSMQEEVARKVDERMAAHQSQDPQPYISPAMVSPSGNRSSCASTGQVASGMAIPTDPSGTXHCRPIPAEYSKVEVELVKATYEDLELDYPVGDGETHLRDTSHTIILWRKRYIILPGXLPASRALSPPPSPPQAPAPTPPQAPAPTPPQAPRLAPSKSRAPQAPPPAPTRATKKAKVDAAKNKDPGYDCTQEEPDAYVASEVRRQLKPRSSEKKIPIDPSVRNFFRGMSAPAKEAIKLSADYERTLKKASSGKSKPVPQLGEQPNQEIEPLVTGEEFGIQDFINDTRLTTDQLLRGAPIEKVEVKYMYELSKPLVKPKQLQSLPTQMYKFHQLYMEISATGREMIGAMIRDTDFLQGEDILWINFKGIYELYQLDALDVSIMSCWTLMEIQRARRWGVFDTGFIDPRKVNITMLDQYPQATEDNLVHLLKAQHYKMFILLPYNTEVNVYDSMDKKESTFDKVFELIDRAWYRFRRLVRGNWRERLRRKFKFPVIRMRDNLTHKXFIAAVQEQLMGFINEQILDPERNTIHRSLASEITPTTTSKS

SEQ ID NO: 107319 - protein, 127 aa, Oryza sativa
  Clone ID: PAT_MRT4530_11683C.1.pep
MEQELTSSGPYKDLKSMGSSNNSFKFGGGLELTAGSRAATGSSMTGKEAGKDGSADADADDIERGGGGARAAIELRHSALQRRRRQVIARARCVAVNSRASPIIATNSSPVTSPSTSAAKATSITKI

SEQ ID NO: 107320 - protein, 109 aa, Oryza sativa
  Clone ID: PAT_MRT4530_11684C.1.pep
RGHTHHGQHRRHKATSQYKPTYAKTRRQISNSEIGTASPLRCLRILSGETKALSLISPGTDSRRKTTLLSTTSQTFRPPCRQQLDRLPQILYWCDYEESNPFLCCGSEK

SEQ ID NO: 107321 - protein, 21 aa, Oryza sativa
  Clone ID: PAT_MRT4530_11685C.1.pep
LVDRYIDRGIYPNLFNLTHFY

SEQ ID NO: 107322 - protein, 219 aa, Oryza sativa
  unsure (1)..(219): unsure at all Xaa locations
  Clone ID: PAT_MRT4530_11686C.1.pep
MAAAGPFSSAPXSPGEGVATMAAGRRGRGDGDGAATALRXALHGDGGGALRGGRLRLWLQRRVTELPDPVAPLRGGRIWPEAAAAAARTPGRGVAGGGDGGGCGCDEVRDDGGGLRRVPRRRXTVSRTSPPRGRRGALVNAPAMNAVPVKPSSMTPVTRAARCTSXDPCHPGXIWMTGAWRRWLXDGGGWTVVADGGGWRRWWLWRWRWRLVTVVAVAM

SEQ ID NO: 107323 - protein, 75 aa, Oryza sativa
  unsure (1)..(75): unsure at all Xaa locations
  Clone ID: PAT_MRT4530_11687C.1.pep
YRGWSCPLQALLHVQLRVETKGNPKHAFPSKETLRPDETQSDSDLPVRPXTHCRSDRPXTGGLTTQHTGVKPAHL

SEQ ID NO: 107324 - protein, 127 aa, Oryza sativa
  unsure (1)..(127): unsure at all Xaa locations
  Clone ID: PAT_MRT4530_11688C.1.pep
MAAAGPFSSAPXSPGEGVATMAAGRRGRGDGDGAAXGAARRVTELPDPVAPLRARPRRRRRWGSTRGETRLEAGVCAGRGRGVAGGGDGGGCGCDEVRDDGGGLRRVPRRRXVSRTSPPRGRRGALV

SEQ ID NO: 107325 - protein, 183 aa, Oryza sativa
  unsure (1)..(183): unsure at all Xaa locations
  Clone ID: PAT_MRT4530_11689C.1.pep
HGHRRRGTRRSPPPSSRTSSQPHPPPSPPPATPLPGVRAAGTGKPLSAEPSLRDCGPSSGAGPPQPPHRPRPAHTPASSRVSPRVDPHRLRRRGLDRRXPPPPPARSGHPGEGQPDLATPSPVAGARAGADRRGEPRRRRREEPYRSAVAAPSPSPRPRRPAAIVATPSPGEMEPRRMAPPPP

SEQ ID NO: 107326 - protein, 56 aa, Oryza sativa
  Clone ID: PAT_MRT4530_1168C.1.pep
MQPSRMARPMSPPAASALNSLARIRTGRRLLSLAAVLATDPAAYVAVAVAGLCKVN

SEQ ID NO: 107327 - protein, 219 aa, Oryza sativa
  Clone ID: PAT_MRT4530_11690C.1.pep
GVGGAGGVERGGGGSGDFFILLMKLTAILIIFWNWTRLCSRMTAMSPLSSLQLYVHMVTSLMARSTSVLATSSSPALSAAAAPWISFMALDTVTLQLSRQALKSGTDLLNPGSFPSNTVAATAPDSVAASMATATRDLKSTCPGAPAMAAPWFDTDVSTVWMSSRRWPRSLTHSLENGPAVHAATSGLDPGGRRAWAAIAEAHIRTTTNIAMDNNDDAI

SEQ ID NO: 107328 - protein, 96 aa, Oryza sativa
  Clone ID: PAT_MRT4530_11691C.1.pep
GICEIEIKEIETGIFIQVRAPELSVDNRVAFLLEFVPGEIRDSAFVSPNSIRKHRRGLAVLISKVDIRRRVLAYVGFYVVASMSIVLNCFRMGYSM

SEQ ID NO: 107329 - protein, 102 aa, Oryza sativa
  Clone ID: PAT_MRT4530_11692C.1.pep
METRIFIQVRAPELSVDNRIAFLLESVPGEIRDSAFVSPDSIRRHRRVLAVLIPEVDIRRRVLAYVGFYVVASMSIVLGCFRIGHVRSPNPGQIRLQQIKAK

SEQ ID NO: 107330 - protein, 75 aa, Oryza sativa
  Clone ID: PAT_MRT4530_11693C.1.pep
PSSSLTQLGLGQGRSASAMLPTETASCGHSTTFICEVFLRDNDLVAACGCRPRSTGYGIRDATGSVASLPSIVTC

SEQ ID NO: 107331 - protein, 36 aa, Oryza sativa
  Clone ID: PAT_MRT4530_11694C.1.pep
PALDMCLCGVIGCFGLSLCCLPSAQLFRPLFDCCTP

SEQ ID NO: 107332 - protein, 71 aa, Oryza sativa
  Clone ID: PAT_MRT4530_11695C.1.pep
MSVSPLTGPPVRKRSAGVNGAGAAAMRVRGAGTVDRWSMVGAVGAPPYTAVPNGWCCQNPPRSWPKAPAQR

SEQ ID NO: 107333 - protein, 62 aa, Oryza sativa
  Clone ID: PAT_MRT4530_11696C.1.pep
PPLLPYAELFTENRAAVVDVARARHGLAGEAVHPSSKPALPAAVAIDQPTRPPTRQRTSGRT

SEQ ID NO: 107334 - protein, 187 aa, Oryza sativa
  Clone ID: PAT_MRT4530_11697C.1.pep
MARSKENARYFYHLLSPVKERPNFGGISIEELHRLVYAQVLCSHALTWQIAPTYLSSCLNQGLGLLEILLLKQPIQDNRVVLKTLEICRLYELENVSTNIMKQWEGLLELLGSDIGSAGGLEFLHRYRDFKRSLQMAQEGRTGESVRQTVEFLIQLMRNPSTPQRFWLPLLHDSAFDSVSIPGCFCR

SEQ ID NO: 107335 - protein, 129 aa, Oryza sativa
  Clone ID: PAT_MRT4530_11698C.1.pep
MGHDELLSSRLLFPLSQRSPSLPSAAGRPAVSPVSPAPLRRETYGKGKFKAEQEPAIVVCLLLAVGAAAACLSAPVRVRENMTKRCPCLLGFFFFHGHALGPAPLRKQRAVAVTACLCVCVVGTAATSG

SEQ ID NO: 107336 - protein, 674 aa, Oryza sativa
  unsure (1)..(674): unsure at all Xaa locations
  Clone ID: PAT_MRT4530_11699C.1.pep
MPGMIMDGSRAFVPLAHGRRPAGMAGLLMESVGAIVPSPVEPGHAVVAAPNVRKVPHVRAPTPAGVCVXWRSGTLLRVACMCPPNLEGGGVRGPKGGCGRRVVXVSLRGGGCGPVGAVAEEINGAXMGPVCYGWGQSVAMQQSRKNSLIAGTGAVGLLAVSVHAVCWQFVLERSTTRLSLLXSFRAFVVVLXEIFIVDTQGQTWLPERLVDWLADYDSLLTKTENTIYRTLINFQKKLINLQVVEDDPDYWSGLSAALSVGWLDIVVNMLRFHGSYQLDQMDSRETENGLVEAVAVLVSTMPRMRPDLPSGKLGQCCKTRPDFIKALEKWRGQGFEGMHQLAQKCIQLKPSADNSGLTGLLTGILSENREVVLAECTKNFGPWMVTHAMELLTADNDYADMMLHEERPNFGGISIEELHRLVYAQVLCSHALTWQIAPTYLSSCLNQGLGLLEILLLKQPIQDNRVVLKTLEICRLYELENVSTNIMKIAGIYHWKHGRKGTGVYWFQQANDKVRLDRIAQQLFEHIGKSVTDDSFKQWEGLLELLGSDIGSAGGLEFLHRYRDFKRSLQMAQEGRTGESVRQTVEFLIQLMRNPSTPQRFWLPLLHDSVRLLNCKPCPLLNVAETTLLLNKLQELSLAKLRPDFSNIHLPSHALNSVRLALASNLARAILEEP

SEQ ID NO: 107337 - protein, 79 aa, Oryza sativa
  Clone ID: PAT_MRT4530_1169C.1.pep
EIISCRSSTRTSFAQPSGISLAPELQELIVADSESSSIRVVNLKSGGSRSLAGGDPMIPENLFRFGDHDGTGSDVLLQH

SEQ ID NO: 107338 - protein, 118 aa, Oryza sativa
  Clone ID: PAT_MRT4530_116C.1.pep
PPSILWQHIIKTFALFLQTLYEISLHTPTSCVWAHKHLSRRPLGVAAHPHCLAPSRTDALLYPLCVSHQRHLSRTLKLQNLLHASLWLYIFLYLFDCAHIFLGLSQSLPQICLIGALF

SEQ ID NO: 107339 - protein, 55 aa, Oryza sativa
  Clone ID: PAT_MRT4530_11700C.1.pep
IKVCKDQGYTRAQNRIKIQGRQSASTPTQLKVGNQQLHSSALEVNTSNLKYYIHP

SEQ ID NO: 107340 - protein, 117 aa, Oryza sativa
  unsure (1)..(117): unsure at all Xaa locations
  Clone ID: PAT_MRT4530_11701C.1.pep
AHHEPPAAEPPRTPRTXPLSTPSPPPPHGHGPKHQTLPPTPPXPPQPTDQPPPPRRLPWTTYSPPPTLLPPPPPPTNQLSPPPPTDQPPPPPPKDHLAAASERCSRPAPPPPLTDQS

SEQ ID NO: 107341 - protein, 45 aa, Oryza sativa
  Clone ID: PAT_MRT4530_11702C.1.pep
LKHPLLISTLDEEVLSSCSSLVTRYQPRYSCFRPQGCRKHTLMLH

SEQ ID NO: 107342 - protein, 117 aa, Oryza sativa
  Clone ID: PAT_MRT4530_11703C.1.pep
MAATAFQRGVARVRRQAPSGFHLRRLGGGTREGRQAVPWRWRSSEAAEPEGSCQAGASRPRRGTVRRGLQGGAHMEVNQDDRDGEMARARRGTRGRRSSPCGDDGDAFFPAKPVRRC

SEQ ID NO: 107343 - protein, 71 aa, Oryza sativa
  Clone ID: PAT_MRT4530_11704C.1.pep
MLFDTADRISRDIGGLAPSSMKINVVAPPERMNTVWIEGSMLASLNTLHQMWIAKAEYNKSGPSIVHRKSF

SEQ ID NO: 107344 - protein, 862 aa, Oryza sativa
  Clone ID: PAT_MRT4530_11705C.1.pep
MRGGGGRGGGGGGGGRVPFYAAAAAAEPRAGDAAAIPPASRKLVQGLKGILTDRSEAEIYATLLDCGMDPDVAVERLISQDPFHEVRRKRDKKKEIKAPQETRPRPFYKPAFRGSKTGGDSTGSGKGPTKKETELHSLPKSSVSDSVKESNPTEKISAADHATINDSLILSSGQADAKSTPLQPPSQVKHGWGGMPGRPSMADIVKMGKPQAKPVRSVACNTGMPTIGGSVISNATNHTSKDSQDLVLPSQVNSVATDRIPNGTNEVSPASNDSSIDVLPPREGLEVPESVATVKPGSSTADVYKDEVEEDMDSDKNKDMSASNADDRTSSGPYPASSKEVHSEHTQIATHHNDLIVETEDSQSDGNAFENNRVADSEGNMSATDKQFEQLILHEEKKSKSSEDNPAVIIPDHLQVSNADCAHLTFGSFVSGTLDAPVSLKTANGDEEVAAVSDNHSIDQSDVRIHEYENKDTVAPAADEHVASSTKSDTENVDVAPVQQPELRTADLIDVPNNTMYNNLSTSDYATPSAVQPDSSAHIYLQEHRQLQNISPLSSFMQGNIPNGLLPPALPPLRDFDPAFSLLLTNPPLATMVHGTTSSSMGNATTVSTQPQEIVNPGASSNPQLNQSQPSTSTSIASGPPLPQHLTLHPYAQATLPLGYASMIGYPSLAPSYTYLPPPAFQQPYMNSGLFHQAAAAVPNSSVKYPLPQYKGNVSLASLPQQASLLSSYVGGFGAASSMPGNFALNQSTPSATAAPGFDGTVPAQYKEGNQFVSLQQSENAAMWMHGASSRTMPPLAANALYYQGQQGHQGGLRQGQLPSQFGAPLAPTQPGLGHEHRNPSDGNLSSAAAAAQANQMWPNSY

SEQ ID NO: 107345 - protein, 87 aa, Oryza sativa
  Clone ID: PAT_MRT4530_11706C.1.pep
EVLSISLLAHLVETTIVSPLLLHDARRAMAHCLVIGRITECISRRSISIGVSLFQVFHSGIAFNIGCIIWMRAVLSSVCGCFIFPTV

SEQ ID NO: 107346 - protein, 92 aa, Oryza sativa
  unsure (1)..(92): unsure at all Xaa locations
  Clone ID: PAT_MRT4530_11707C.1.pep
ATPPPAAAPARPPARSSSPSAPHPPXPPSSVSTGTPSPPPTPTGXPLSSAVPPCRALAAPPCTFTLPXPPMPPRCGRRWWLLVGAAVRPAAH

SEQ ID NO: 107347 - protein, 170 aa, Oryza sativa
  Clone ID: PAT_MRT4530_11708C.1.pep
MRVTEESAGSRLGAQVDRVKGAPAWSSRCAVVVPVASEAARMSLWPTWPPPRLPVLASLGLVVASTPITADANSWPHEAKVVFVWPTLPAPPPRVHPSRGRPKSVFASHRRRLRLKHQTQVARAAASNQSPPPATKLWSRVVPFLTVTSDQASPAPHRRHHVLHVPRARV

SEQ ID NO: 107348 - protein, 52 aa, Oryza sativa
  Clone ID: PAT_MRT4530_11709C.1.pep
EGFPWAGRRPVCGATGPLAGRRRRRQRPGRGGWPPWIGFWGVLEGSRSGRVG

SEQ ID NO: 107349 - protein, 114 aa, Oryza sativa
  Clone ID: PAT_MRT4530_1170C.1.pep
MDITGGGGLRSPFPDLGAPLSATNTSSPSLQGWKPWERRLRWGEVGAAAVAGDRRGVDACADADFGARRHLKTPTTSSRRPPQDAATSSRRPRARHMLKDERLAQHQPTQYPTS

SEQ ID NO: 107350 - protein, 409 aa, Oryza sativa
  Clone ID: PAT_MRT4530_11710C.1.pep
MAKWRSWMPATPAGGSGGGANDGGGDGEDKKKSGEVAEAVISVPVHCDGCARKLRRSVQRLDGVEEVTVDCRTNTVIVRGPKAAVDPAGIVEVLDRRTGKKALLLSSLPSANLKPPLSPEKRSSETAKKDAAEQDMGKEMSEEDMEMVVVMRIDLHCEACCEEIKRRILKIKGVEEVTPHMKSSQVMVRGKVEPATLVGLIHKWTGRRAAIFRAEPQHPLPPPSESPPKVDDDNEPPKVAGSTEPAEEEETKQGGDPSPSDDAQEKKEGEEADQMKDQKEEPEEKEKKEEPDEKNEGGEADDLKPLTEDDASYNGVAEESHSTKDHLFRVALPRSVVAVAPPESEKMAMNSLCYSYYYYPAYPYPCHQYYQYPQQNIYAAGNYPAMYGYYPHHVPEDFSDANPNVCTVM

SEQ ID NO: 107351 - protein, 154 aa, Oryza sativa
  Clone ID: PAT_MRT4530_11711C.1.pep
LGSLQYPLPPLPSLLAFSPSQQSSARRRTMGGAVGCGGGGGVGCGAGGCVAFSSSPLSLSLSLASLGAGGGCGWASDDELRARLGERRQLRVPRTPQQLQEISDDAPRILGDRRRECPAPDARRGKDEACRCRSRSRHGCHRSRRTIRSCVEQS

SEQ ID NO: 107352 - protein, 380 aa, Oryza sativa
  unsure (1)..(380): unsure at all Xaa locations
  Clone ID: PAT_MRT4530_11712C.1.pep
LDEPLMPSASYFXSDTLNAXLNHGSMTPTLLDISMLTGLDTTSFINIVSLRTKCNYKLDTKGGGGWSGYITRHSNQGSVIEKEHVAFLNLWLDRFVFCGXSCGPTANMPLLXGPFSSRKEMPLGKYLLGXTYQLLHKTTRKLLTGKPIGCGGPRWFVQLWLNLYTVQVANRMSNPRRICISNDADEITHQCMSFREATSIYPRLGPLDEKLQIWFEHFYNGFXRSTRIWYSNTDFSSYELPIDLRLDEINSDNKSRDIFISVVSPCILSTGISTGRYSEVSYEFYHLMVAARQLGYGQLPIGLYFLRKIQTRGIVISTLLFDRLLNLEGPILRSPADIDIHPMRSRLFDXWWIEWMKHLYVLGSNFYLTIVNPSISPCNS

SEQ ID NO: 107353 - protein, 119 aa, Oryza sativa
  unsure (1)..(119): unsure at all Xaa locations
  Clone ID: PAT_MRT4530_11713C.1.pep
MSAAEEAANGKDLASGSVRDGGGRGRPRGXAXTVAAAVDGEDLVSGGGGWGRRRLQPRRMGKLRRWLGKTSPLVQCAAAAEGDDDARRVRRRRRIRVTAISAASAAARWEGEGGEGAAA

SEQ ID NO: 107354 - protein, 101 aa, Oryza sativa
  Clone ID: PAT_MRT4530_11714C.1.pep
ASSIVLRNHRGEVLLTAWKTIRNCDSAEEAEVIACRERVSLSVDWIRQPIILEADCANVIACLKAREIDRSKLCHILYSIKSSLQVLPDFRLEKIRRESNG

SEQ ID NO: 107355 - protein, 93 aa, Oryza sativa
  Clone ID: PAT_MRT4530_11715C.1.pep
SVKEVIGEINTAAPDISLEATEAERAIADIEITDDWRTPLIKFINSEELPEDDAEVLKCVSSDDGRHLLLDIHEGICGPHAAGRTLVGKAFRH

SEQ ID NO: 107356 - protein, 75 aa, Oryza sativa
  Clone ID: PAT_MRT4530_11716C.1.pep
LFLHCFILFLYFLIHLLNTYNILSNALNIWVEISFLFCGDFGFALFRGVVIFEGLTCPEAVVSDTCHDQQQQQQR

SEQ ID NO: 107357 - protein, 138 aa, Oryza sativa
  unsure (1)..(138): unsure at all Xaa locations
  Clone ID: PAT_MRT4530_11717C.1.pep
MYTSKQPFHKSKQTFRKSKQPFRKPKQPFRRRPRIGPGDQINYKNMSLINRFIEQGKILSRRINRLILKQQQLITLAIKQARILSFVLFRNXVSIITGPRPRKNRHIPQLTQKFNSNGNLRNSNXTLRNNNRYLSSDC

SEQ ID NO: 107358 - protein, 442 aa, Oryza sativa
  unsure (1)..(442): unsure at all Xaa locations
  Clone ID: PAT_MRT4530_11718C.1.pep
MGSTAITVSNSYFSHHNEVMLLGHSDEYLLDSAMQVTIAFNHFGIQLVQRMPLGREEEGNSPMGRRLRAVSAHLLPPASTTTTTGGVDLAANPTAGEYAHVQGYSAVLPEKLQTGKWNVYRNAKTPLRLIDRFPDTPDIATLHDNFVYAVETFRDCRYLGTRICADGTVGDYKWMTYGEASTNRTAIGSAVKXFITQMPCVRLIVVIGGDNANMPSTPTSTGVEIITYSRLLNQGKMSSQSFRPPKPEDIATICYTSGTTGTPKGVVLSHGNLIANVAGSSLVIKFYPSDVYISYLPLAHIYERVNQVSVVHYGVAIGFYQGDNLKLMDDLAALRPTVFPSVPRLYNRIYAAXSNYTRNLDTFMLGKTISSHILFEVSIFFPFQYSXVGSCLSFCRITNAVKESGGLKERLFHAAYNAKRQAIINGRNPSPMWDRVVFNKIK

SEQ ID NO: 107359 - protein, 82 aa, Oryza sativa
  Clone ID: PAT_MRT4530_11719C.1.pep
VIRRGINHTRKCDKICPSSMDSPQTGEISSEQIFHGLEKYYSREGGPRVGKRLGAAPKPPALPIRVQNPDGVWSNPGKFSGP

SEQ ID NO: 107360 - protein, 106 aa, Oryza sativa
  Clone ID: PAT_MRT4530_1171C.1.pep
PTRPLGTAAFAFFCFYLLIAVIAGEMMLGLKLVFITIHPMKYLTYPMAFPFLCSIFFGIIDNAFFFRWGGTLMNSFLFNVGLILLCSIRCATEASFRCNCLLLLFL

SEQ ID NO: 107361 - protein, 717 aa, Oryza sativa
  unsure (1)..(717): unsure at all Xaa locations
  Clone ID: PAT_MRT4530_11720C.1.pep
MARQQQQREEERAPMGAAQRRLRAVSGHLQPATETGGVDHAANPTAGEYAHVYNSLLIAAPVQGNTAVLPDTAHTGEGNVSNSAEYSLVLINRFPDSPEIGTRNANIVYTVETISACRYVVTTLRDNVADGDDTWMAYRYVSTRMCAEGSVVVYKWMTDGEGIGLYFAIGPGLIKDDNAYAAYFYVSVPLYDSLGQGAVXFIVNHATVQAIFMILLVLMPLISFITKMPCVRLIVVIDGDNANMPSTPTSTGVEIITYSRLLSQGKMSSQSFRPPKPEDIATICYTSGTTGTPKGVVLSHGNLIANVAGSSLVIKFYPSDVYISYLPLAHIYERVNQVSVVHYGVAIGFYQGDNLKLMDDLAALRPTVFPSVPRLYNRIYAAITNAVKESGGLKERLFHAAYNAKRQAIINGRNPSPMWDRLVFNKIKARLGGRVRLMTSGASPLSADVMEFLRICFGGEVLEGYGMTETSCIISAMNIGDRLIGHVGSPNPSCEIKLVDVPEMNYTSEDEPYPRGEICVRGPTIFCGYYKDEIQTREAVDEDGWLHTGDIGLWMPGGRLKIIDRKKNIFKLAQGEYIAPEKIENVYAKCKFIAQSFIYGDSLNSSLVAVVAVEPDVLKAWAASEGIQHEDLRQLCADPKARSAVLAEMDSIGKEAQLRGFEFAKAVTLVAEPFTLENGLLTPTFKVKRPQAKAYFAKEIADMYAQLRQAEQIKPKL

SEQ ID NO: 107362 - protein, 58 aa, Oryza sativa
  Clone ID: PAT_MRT4530_11721C.1.pep
KRGKPSQNGGEKTTGACQQNFFTFFKGGLHHRTGVYKGFFFWGTLKGMIIPTAKACFF

SEQ ID NO: 107363 - protein, 117 aa, Oryza sativa
  Clone ID: PAT_MRT4530_11722C.1.pep
PPPLPARAQPRPKVRARRGQATDPHSIAERLRRERIAERMRALQDLVPNTNKTDRAAMLDEILDYVKFLRLQVKVLSMSRLGGAGAVAQLVADIPISVKLFLHCTLPVITRNVQGFS

SEQ ID NO: 107364 - protein, 701 aa, Oryza sativa
  Clone ID: PAT_MRT4530_11723C.1.pep
MGRRLRAVSAHLLPPASTTTTTGGVDLAANPTAGEYAHASPVQGYSAVLPEKLQTGKWNVYRNAKTPLRLIDRFPDTPDIATLHDNFVLHALQENYYSSNLSSVLSSEAIYPKLRSYKWMTYGEASTNRTAIGSGLIYHGIPEGACIGLYFINRPEWIIVDHACAAYSFVSVPLYDTLGPDAVQFIVNHATVEAIFCVPQTLSTLLSFITQMPCVRLIVVIGGDNANMPSTPTSTGVEIIIYSRLLNQGKMSSRPFRPPKPEDVATICYTSGTTGTPKGVVLSHRNLIANVAGSSVVIKFYPSDVYISYLPLAHIYERVNQIALLHYGVAIGFYQGDNLKLMDDLAALRPTVFSSVPRLYNRIYAAITNAVKESGGLKERFFHAAYNAKRQAIMNGRNLSPMWDKLVFNKIKARLGGRVRLMSSGASPLSADVMEFLRVCFGCLVIEGYGMTETSCVIATMDCDDRLIGHVGPPNPSCEIKLVDVPEMNYTSEDQPYPRGEICVRGTTIFFGYYKDEIQTREVIDEDGWLHTGDIGLWLPGGRLRIIDRKKNIFKLAQGEYIAPEKIENVYAKCKFIAQCFIYGDSLNSSLVAVVAVEPEVLKAWAASEGIQYEDLRQLCADTRARAAVLADMDSIGKEAQLRGFEFAKAVTLVAEPFTLENGLLTPTFKIKRPQAKAYFAKEIADMYAQLREAESTKSKL

SEQ ID NO: 107365 - protein, 293 aa, Oryza sativa
  Clone ID: PAT_MRT4530_11724C.1.pep
MAGQQPPTGGAEDDFFDHFFSIPSAAAAGAGGVGGFGSGDHHPFPLALSLDAEGAGAARRLLDGGHDGGRTDRDPVQLAGLFAPVFGAAAGVQPPHLRAPPPPQVFHAQPKPGEGAMAAPQPQQPPAPRPKVRARRGQATDPHSIAERLRRERIAERMRALQDLVPNTNKTDRAAMLDEILDYVKFLRLQVKVLSMSRLGGAGAVAQLVADIPISVKGEASDSGSKQQIWEKWSTDGTEKQVAKLMEEDIGAAMQFLQSKALCMMPISLAMAIYDTQHSQDGHSVKPEPNTPS

SEQ ID NO: 107366 - protein, 116 aa, Oryza sativa
  unsure (1)..(116): unsure at all Xaa locations
  Clone ID: PAT_MRT4530_11725C.1.pep
MLSLDIVPPPSPPRKGMSSPAVTPMPLHRASPPRSLVVVPPXSSLHRRPHLPDVVVPSPYHHLHPIRVLVLPPPECSSYHHPLLPLSPPCYRGRFPFRRHYCRQLVVENWRMDDWR

SEQ ID NO: 107367 - protein, 97 aa, Oryza sativa
  Clone ID: PAT_MRT4530_11726C.1.pep
MAMRSSSSPCIELVAPMRRGRDRALHLARLPVPIFSAEYRSLTARARAVRRTSTTVRARAARRTRMTAMAVARRGVRARLYLMRFLGRRFDRTWTAG

SEQ ID NO: 107368 - protein, 223 aa, Oryza sativa
  Clone ID: PAT_MRT4530_11727C.1.pep
WQFVCETETVRVSLLARGCLPQSPLRITHDGEFYARLLTKESSQGNPSFRYYGAGTGAVPFVWESHPGTPKVDASSPFAEAGGVPAITPPPSYHLRAAAAMSSSPQPHGRSGRRNVVNGRGKYCGYCRLKWIKIGFIAAVFRRLALGKPSRASSSSSAVQPSPSTRWLFSGSGSVETSDEPQPPAISPASTKQGGLLCLGVRPSPWMVQLCGVQSIRRVDTGS

SEQ ID NO: 107369 - protein, 110 aa, Oryza sativa
  Clone ID: PAT_MRT4530_11728C.1.pep
MPLEEKSESEKEKEEVDATREHCTGQRTDRAVLLRAAGLAGSGCAAGCGQDATVLAGRDRVGAGRRARCPRHDDMGRDVCGMDERGGRGTNHCAVGGRFLGKWKAACLRR

SEQ ID NO: 107370 - protein, 61 aa, Oryza sativa
  Clone ID: PAT_MRT4530_11729C.1.pep
FIHWQMAFYMSSVKYYRDCITLLVLDCSQRHVFSVSVIRPTLTEFGKVEISMFFVLFKRNW

SEQ ID NO: 107371 - protein, 101 aa, Oryza sativa
  Clone ID: PAT_MRT4530_1172C.1.pep
MGARQRNKSCSPPLPRSDPLWTIIVVEAESRGGDEWIPSATIVGVEHEGMTTSTLDGEVKATIDAGVIKEATLASAGDEEGTRWLRLCWHHGVQVRHSEEE

SEQ ID NO: 107372 - protein, 86 aa, Oryza sativa
  Clone ID: PAT_MRT4530_11730C.1.pep
PPSCMAGFNDLIIIRYGTIFFSQTSDKFLLHTFLGMVLGIILQSSDYLDKVCVPTYAHFYRGTYNYCSTSIFQNHITSQDQTFLAC

SEQ ID NO: 107373 - protein, 80 aa, Oryza sativa
  Clone ID: PAT_MRT4530_11731C.1.pep
QRKKSLRFLSSSPDCRKDGQLKVAGPNACSHGQEHVLSNLLALLVCDLLSEREERRGEREGRLLELLFMISAFPVFLKSG

SEQ ID NO: 107374 - protein, 70 aa, Oryza sativa
  Clone ID: PAT_MRT4530_11732C.1.pep
TGSQDSDMGINSTQDGLLSSYFSCKFTLDQILRKSPIRHRNRPSIRVNTIISSNLPIKHIRWITMAMFSN

SEQ ID NO: 107375 - protein, 289 aa, Oryza sativa
  Clone ID: PAT_MRT4530_11733C.1.pep
RLSTSRAPWALLFLLSAFHCLASARWEFIVSSTTGHVSGSDWLVDETSRDGKAGSTGKDPGGLGEGWSCYLGKSLVKESDLAEFVHSGALARGQATCGGEAVVPSPGDRRTIVFAAFLTAGLRLPCDNFLPPVLEMYELKLPQLSPSAFPKLAVFTWMCRTCGFAPTAELFAILFTACAMTKDVNIPASSRKTVFSCVNFMLRPERSDAWPVPALMWFYVANPYPTEDDKANWLRFRRLLVSIVAKPSVEVDRTLESRLILLRKVARRLSARDLCEEFCLLRISLLAHE

SEQ ID NO: 107376 - protein, 108 aa, Oryza sativa
  Clone ID: PAT_MRT4530_11734C.1.pep
HASVHASVHASGHVRNIAQALLYKIKQKQKGSDRILMPSVEGQQAGKWIVIDSGSIIIHALEERAREYYDLESIWTKEVSPNISVQELETSLVKTRRMDHSQKPMKSI

SEQ ID NO: 107377 - protein, 145 aa, Oryza sativa
  Clone ID: PAT_MRT4530_11735C.1.pep
MPPKARKPSARSALHPLHRAHQISRAAPACPRPFRRRLRLCGRWKSKCGGNGNHVWRSLGSGGRNADVVAVAAALAAQIEQIGGRREAERLAVFFHFSQIGGGAVEGEPAIGSTGGGDRRGCGGVVGRRRRGRRKNHVAYGREAI

SEQ ID NO: 107378 - protein, 449 aa, Oryza sativa
  Clone ID: PAT_MRT4530_11736C.1.pep
MWEYHHQLSTHAALQPSSSFPYSYWSPYSGSTALAGSAFAADSSSSSTDVMRLPAAGEHAHGHGWSHGELSNSTTGGGYRENFLDLLASKNVTPEMFEEVPASEHYNVAPAGTTLTTTARSFDHHARSDVSPIKYEIAGSPLYLGGTNTVLQVQDMTMMSSTPACYGEHHHHHHHQLTKEGSCNHQQQEQHELAISPMASFLQQISSGSASVGVHNSSLDYSGLGDQPDKICCQDGREMEASPFGMRSLPDLGSFAGYTPAIESTSVQPYMRCANSSDSNRQEQETVPARSSSSGSGAAATDRKKRKSEERQESTVKKSKQEASKASPPKQPVPKVKLGEKITALQQIVSPFGKTDTASVLFETIKYIKFLHEQVQLLSEPYTNSSRSNKQGNSVPWGDQAEASKGETMEHDLRNRGLCLVPVSWTPEVYRDGNAMDYWTPAYRGCLYR

SEQ ID NO: 107379 - protein, 76 aa, Oryza sativa
  Clone ID: PAT_MRT4530_11737C.1.pep
LLQGPSPAAGGFRPWPTGGPAPLSPPPPPGRPQGPPIAGLLFFHSHRMSFEGPNTARWFLAWFIFLWHADGPPRMP

SEQ ID NO: 107380 - protein, 785 aa, Oryza sativa
  Clone ID: PAT_MRT4530_11738C.1.pep
MEIEEAGGAGEDELEMEAPSVSTVAIAVNGSRNSKHALKWALDKFVPEGKVLFQILHVRPTIKMVPTPMGNFIPITQVREDVATAYKKEVEWQANNMLLPYKKMCAQRKVEAEAVLLESDDVPTAISEEISKFSVCKLVLGSSSSIFRRKNKGSKTATKICECIPSFCTAYVVSKGKLSSVHSATSDAIGTPESISSSTVSSPSSSGLSSWVPAEWGDTYGSANVSFHQPSLSSQRDQAIANMNKLSNRRASPSGSGGSEISNHDDTVLTSSHSINSETRFSSSSSGNSIYKSFNRDRSFDNSDQASVSDMATNLKHSHDQEYLKLEIERLRVKLRHLQKLNELAQKESLDANQKLHKLGIQDIEDEIKLKETELTEEKVRRLIRKKEREEQEVARREDQLRNENAESEATKQSNGNQEGDENKTGERIFVRCFDEYNRGSYGTVYKAKFHHTVAAVKVLNSPEGCGTQQLQQELEVLGKIRHPHLLLMLGACPEHGCLVYEFMENGSLDDMLQRRNNTPPLTWFDRFRIAWEVATALMFLHSSKPEPIIHRDLKPANILLDRNLVSKIGDVGLSTLLPSMDQYLSTMIKNTAPVGTFCYIDPEYQRSGVVSMKSDVYALGIVILQLLTAKSPMGIAHVVETALEDGHFVDILDAAAGQWPLNEAQELAFLALKCAEMRRRDRPDLSDHVLPALERLKDVATKAREMAFNGHQTAPPSHFICPILQEVMADPYVASDGYTYDRKAIELWLSMNDKSPMTNLRLPHKSLIPNHSLRSAIIDWRTKS

SEQ ID NO: 107381 - protein, 219 aa, Oryza sativa
  unsure (1)..(219): unsure at all Xaa locations
  Clone ID: PAT_MRT4530_11739C.1.pep
MGSIDAAVLGSEKKSNPGKAXILALGKAFPHQLVMQEYLVDGYFKTTKCDDPELKQKLTRLCKTTTVKTRYVVMSEEILKKYPELAIEGGSTVTQRLDICNDAVTEMAVEASRACIKNWGRSISDITHVVYVSSSEARLPGGDLYLAKGLGLSPDTXRVLLYFVGCSGGVAGLRVAKTSPRYSGSRVCLPVWDTLFGSFPQXGGPXDLVGAPLFGVGPR

SEQ ID NO: 107382 - protein, 91 aa, Oryza sativa
  Clone ID: PAT_MRT4530_1173C.1.pep
MAQSGVATASGGVLDLESEIGRHAAGDESTVDERRRTADAMRRSAGGQEIEKDSAGFDAEDRLRHHCRIEDSAGFDAEDRLQHHCRIKEAD

SEQ ID NO: 107383 - protein, 181 aa, Oryza sativa
  unsure (1)..(181): unsure at all Xaa locations
  Clone ID: PAT_MRT4530_11740C.1.pep
ETSQNNEDIFVLALLAIDTCDASARIDPLSRSYTEYQLQSHLLLQXQVLSPCSEFVRQAXSIVAAPFCQPATVQLIDNQVMQQQCGQQIKVVSQQSHYQVINIVQAIVQQLRLHQFSGDYFDQTQDQVQALLTFSLPSICGIYPNYYRAPRQRLPLMMVSGTELEQYNSSYVRNKVIHHPV

SEQ ID NO: 107384 - protein, 118 aa, Oryza sativa
  Clone ID: PAT_MRT4530_11741C.1.pep
MELEGHGRGHKRRRLSGQATTQLVEEVDKQQEEEAPAPTCSICLQPWTCNGDHRICCIPCGHVYGRSCLEKWLLHAVLQRGTGQAKLVTILSSVLNAVKVRATAHFLANAQKNCSSIY

SEQ ID NO: 107385 - protein, 554 aa, Oryza sativa
  Clone ID: PAT_MRT4530_11742C.1.pep
HPSPAGGGGGGGGGTAEQFWSLLDKADRRFARVRDLPLFGRREPDEYGKAFRIYTQLWRMQQEHRHRLLDAGLRRWQVGEIAARIAHLYYSQYQRTSDTALLSEAFVFYHAVLDRGYFLADAADHLFAPTKHLRFLARFLLVALLLARRADTVPRLTTHIRTLLDDSKKTLQEADYKEWKHVVQEIARFLRADSPFINMRPLRYSYAFDPPPDTLPTVPPTVKKRGLVLNDAMLCSYYQNEIKFTDLTIDVFRMLQCLEWEPCGSFALTNGYSTRDESGQNHPNLLKDLRDAALPPNPLKTILYRPSVTHFLTVLATKCEELPSNGMMLIYLSAAGEVGSSGFCPDTNEMVVSSLNKFDNFNLGPSKSIHGFEKGETTAMLLSPSCRSSSAGFSGDSVRQIGSQFTMFLTAPLQAFCHLIGNNGVDIDRDTYNKAEELLSLSLNEWATTLVASSSLHPVWVEVLGDPLLRRLLLRFIFCRAAHSIFKPTYHKVDFLPTCTPPLPESVDAESMLSQCCLLRVASFFGATNQFSFSEVTTWPEVDVEEAAVVNPSI

SEQ ID NO: 107386 - protein, 295 aa, Oryza sativa
  Clone ID: PAT_MRT4530_11743C.1.pep
KTNPRTKLATKCEELPPNGMMLIYLSAAGEVGSSGFCPDTNEMVVSSLNKFDISNTSTINVNEDNGPRLWLGCREGEGSNCIYPCDLIPFTRRPLFLVIDSNASYSFKSIHGFEKGETTAMLLSPSCRSSSAGFSGDSVRQIGSQFTMFLTAPLQAFCHLIGNNGVDIDRDTYNKAEELLSLSLNEWATTLVASSSLHPVWVEVLGDPLLRRLLLRFIFCRAAHSIFKPTYHKVDFLPTCTPPLPESVDAESMLSQCCLLRVASFFGATNQFSFSEVTTWPEVDVEEAAVVNPSI

SEQ ID NO: 107387 - protein, 96 aa, Oryza sativa
  Clone ID: PAT_MRT4530_11744C.1.pep
EGGDNEVEQDPGWAPAVLIVGALQNCKELLGCAIDNLNTSFHKLGGFDMTNFNKAVDDLRTWLSATLTYQGTCLDGFLNTTTAMPPPRCATALNSS

SEQ ID NO: 107388 - protein, 275 aa, Oryza sativa
  Clone ID: PAT_MRT4530_11745C.1.pep
MMISSSFAELKLEYPGTTTTTNSFAVGDGEQSWVIRCYPRGYREEDNGEYVSLRIGVPARSNTVRAIFHTFLMRRDGGVGAPSIICSDRAFPMSVPGHPRGYGGAFRHLVRRSDLEPLYAVDGVVTIVCGVVVFADAGGGGGDDDDGGPIPVPRSNLGGQLGGIVDRADCSDVSFSVAARRSTRTAPCSPRARRYALERLKLMCAQKLWESVSVETVATTLGYAETYHCPELKSKCLNFLMAESNFKKVAVTNGYFHLRQDFPLIIEEIKKRIES

SEQ ID NO: 107389 - protein, 119 aa, Oryza sativa
  Clone ID: PAT_MRT4530_11746C.1.pep
MEQRSGVGGDGDGSERGTGDHGAGSGTEQGATEPGVAGRGELRRCPVLAVVDLGMWRRASLPARATSEDIVVDAIYFMGCARSRRDGDAGVYPGSGPQYEIWRFSMWNMVNLRFGLVPG

SEQ ID NO: 107390 - protein, 249 aa, Oryza sativa
  unsure (1)..(249): unsure at all Xaa locations
  Clone ID: PAT_MRT4530_11747C.1.pep
MRIGRRPGRPQGVRVGRFINAAGTTGFPTGKMDRVDTALPCFSSQCMNISLRTLFPPIFTFLKYILYAGDDDGTIPIPRSNLNGQLDDIADRADGSDVLFSVGSETFHAHRAVLAARSPVFKMELLGSMAESTMPCVTLHNIDPATFKALLHFVYMDALPSPTXRYALERLKLMCAQKLWESVSVETVAMTLGYXAYAERYHCPELKSKWLSFLMAEINFKKVAVTDGYFHLRRDFPLIIEEIKKRIES

SEQ ID NO: 107391 - protein, 213 aa, Oryza sativa
  Clone ID: PAT_MRT4530_11748C.1.pep
FPPIFTLLKYILYAGDDDGTIPIPWLNLNGQLGDIVDRADGSDVPFSVGGEMFHAHHAVLAARSPVFKTELLGSMAESAMPCVTLHNIDPATFKALLHFVYMDALLSPTRGGASSTSTTTGFFKSLLMAVDMYALKRLKLMCAQKLWGSVSVETVATTLGYAETYHCPELKSKCLSFLMAESSFKKVAFTDGYFHLRQDFPLIIEEIKKRIES

SEQ ID NO: 107392 - protein, 65 aa, Oryza sativa
  Clone ID: PAT_MRT4530_11749C.1.pep
PRGQNGSGPTPRGDRGRGGLVTLRPDPPEGVRPRGAGLYRRAETQWSQIAHIGKGKTTVNNERSL

SEQ ID NO: 107393 - protein, 37 aa, Oryza sativa
  Clone ID: PAT_MRT4530_1174C.1.pep
IHNIYQFHLLLNYHIKQHTIKIIIPNHINILIILLKQ

SEQ ID NO: 107394 - protein, 341 aa, Oryza sativa
  Clone ID: PAT_MRT4530_11750C.1.pep
MMISSSFAELKLEYPGTTTTTNSFAVGDGEQSWVIRCYPRGYREEDNGEYVSLRIGVPARSNTVRAIFHTFLMRRDGGVGAPSIICSDRAFPMSVPGHPRGYGGAFRHLVRRSDLEPLYAVDGVVTIVCGVVVFADAGGGGGDDDDGGPIPVPRSNLGGQLGGIVDRADCSDVSFSVGGETFHAHRAVLAARSPVFKAELLGSMAEAAMPCVTLHDIDPATFKALLHFVYTDALPSPSTSSSSSSTTTGFFESLLVAADRYALERLKLMCAQKLWESVSVETVATTLGYAETYHCPELKSKCLNFLMAESNFKKVAVTNGYFHLRQDFPLIIEEIKKRIES

SEQ ID NO: 107395 - protein, 91 aa, Oryza sativa
  Clone ID: PAT_MRT4530_11751C.1.pep
MAGLGVVDPTTMVLGAHIDGNGTESYGSRWWWALGATDLGHVFQKQWIKDGRPRSTPLSLSPNLAFWAAHRLHGTHPMEIDFLDLGLQGMG

SEQ ID NO: 107396 - protein, 70 aa, Oryza sativa
  Clone ID: PAT_MRT4530_11752C.1.pep
CCCSSRSSSEGVGTRTVALVLLAGGRLQALLPVQAEEGLQRIALNKRPIDENSLVAGLLYRQEGARTDGP

SEQ ID NO: 107397 - protein, 73 aa, Oryza sativa
  Clone ID: PAT_MRT4530_11753C.1.pep
MGDGIGRPTGIHMNSSTAVGVDPHELIHTVAKWINASLSPVVADHGKPVHSGGGRIEPIHDGSGDALAAIEYE

SEQ ID NO: 107398 - protein, 1127 aa, Oryza sativa
  Clone ID: PAT_MRT4530_11754C.1.pep
MASKGILKNGGKPPTAPSSAAPTVVFGRRTDSGRFISYSRDDLDSEISSVDFQDYHVHIPMTPDNQPMDPAAGDEQQYVSSSLFTGGFNSVTRAHVMEKQASSARATVSACMVQGCGSKIMRNGRGADILPCECDFKICVDCFTDAVKGGGGVCPGCKEPYKHAEWEEVVSASNHDAINRALSLPHGHGHGPKMERRLSLVKQNGGAPGEFDHNRWLFETKGTYGYGNAIWPEDDGVAGHPKELMSKPWRPLTRKLRIQAAVISPYRLLVLIRLVALGLFLMWRIKHQNEDAIWLWGMSIVCELWFALSWVLDQLPKLCPINRATDLSVLKDKFETPTPSNPTGKSDLPGIDIFVSTADPEKEPVLVTANTILSILAADYPVDKLACYVSDDGGALLTFEAMAEAASFANLWVPFCRKHEIEPRNPDSYFNLKRDPFKNKVKGDFVKDRRRVKREYDEFKVRVNGLPDAIRRRSDAYHAREEIQAMNLQREKMKAGGDEQQLEPIKIPKATWMADGTHWPGTWLQASPEHARGDHAGIIQVMLKPPSPSPSSSGGDMEKRVDLSGVDTRLPMLVYVSREKRPGYDHNKKAGAMNALVRASAIMSNGPFILNLDCDHYVYNSKAFREGMCFMMDRGGDRLCYVQFPQRFEGIDPSDRYANHNTVFFDVNMRALDGLQGPVYVGTGCLFRRIALYGFDPPRSKDHTTPWSCCLPRRRRTRSQPQPQEEEEETMALRMDMDGAMNMASFPKKFGNSSFLIDSIPVAEFQGRPLADHPSVKNGRPPGALTIPRETLDASIVAEAISVVSCWYEEKTEWGTRVGWIYGSVTEDVVTGYRMHNRGWKSVYCVTHRDAFRGTAPINLTDRLHQVLRWATGSVEIFFSRNNALFASSKMKVLQRIAYLNVGIYPFTSVFLIVYCFLPALSLFSGQFIVQTLNVTFLTYLLIITITLCLLAMLEIKWSGIALEEWWRNEQFWLIGGTSAHLAAVLQGLLKVIAGIEISFTLTSKQLGDDVDDEFAELYAVKWTSLMIPPLTIIMINLVAIAVGFSRTIYSTIPQWSKLLGGVFFSFWVLAHLYPFAKGLMGRRGRTPTIVYVWSGLVAITISLLWIAIKPPSAQANSQLGGSFSFP

SEQ ID NO: 107399 - protein, 87 aa, Oryza sativa
  Clone ID: PAT_MRT4530_11755C.1.pep
SRPPPAPARERRGRRRWDPHRRPAVKGRSGGGGKWRKGAAAARPPPAPGHEGRERRRWEAEEGSGSGSGSPAGLRARPRRSSARSPS

SEQ ID NO: 107400 - protein, 169 aa, Oryza sativa
  Clone ID: PAT_MRT4530_11756C.1.pep
FIIQIDTKNILFICGGAFVDLEKTISERRHDSSIGFQAPIRSNMRTGGVINAEITSSLLESVESGDLIAYGLIPEFVGRFPILVSLSSLSEDQLVEVLTKPKNALGRQYTKLFEMNDVKLHFTEKALRLISKRAIAKNTGARGLRSILESLLTESMYEIPEIRTGKDKI

SEQ ID NO: 107401 - protein, 31 aa, Oryza sativa
  Clone ID: PAT_MRT4530_11757C.1.pep
PTSMCDRLSYIYLHRCLESTDFLMMFWMIPF

SEQ ID NO: 107402 - protein, 277 aa, Oryza sativa
  Clone ID: PAT_MRT4530_11758C.1.pep
MPRVVVNEPLDCSDRVDLQSDHTSDCRQLMQKALAQESRVKETKMFVRSNDKKPNVSIVDFHDENDDDDDDDDDDDDDDDDGDHDIYIVEWSWTNKNKTFVCSNLMPTPRKDRQSEIKHSFHVVQSAIEEERLKLTEGSKMKLDHDPFHVNTIDFNDKNVLIRLEVGPRDAAFEKPDESNRHMRPLYQKGHIDGKPISRMLVYGGVAVNLMPYSLFKKLGRGDEDLKKTNIPLNGFNSEPMEAKGRIHMYIFEERHDTCRRGWKASGGGKDPLRIKG

SEQ ID NO: 107403 - protein, 195 aa, Oryza sativa
  unsure (1)..(195): unsure at all Xaa locations
  Clone ID: PAT_MRT4530_11759C.1.pep
SRVGGGWCQYYLKTGTCKFGATCKFHHPREKXAIATRVQLNALGYPLRPNEKECAEYLRTGQCKFGSTXTYPGAVTNWPLSRSASFIASPRWPGHSSYAQVIVPPGLVQVPGWNPYAAQIGSSSSDDQQRTAGGAQYYTGSRHSETPNMGDQGMFSSYQAGSVPLGLYTVQRESIFPERPDQPECQFYMKTGDCK

SEQ ID NO: 107404 - protein, 59 aa, Oryza sativa
  Clone ID: PAT_MRT4530_1175C.1.pep
GQARGLGLAGVVQRLCRALRAWCGAQPAPCMVQPVASGGTPSIGVRRRLQVVCTTIRLR

SEQ ID NO: 107405 - protein, 589 aa, Oryza sativa
  Clone ID: PAT_MRT4530_11760C.1.pep
MSAAAVRSRAAAVAATAARRIHAGRAVAEEQGQGPGLRRPWAYFRRRHQQQQQKASFPGAVAAPPLRGPVPQKGVAGGSNGGGKPPEIWRQPGEAPPGGGARGAEVGRIDVVRVAAGGGGGGGDGSDGNEGGGGGAGWGGSNLGRRFPTPKEICRGLDKFVIGQERAKKVLSVAVYNHYKRIHCELLSSRSAGDCSETDSCASDTDGVELEKSNILVMGPTGSGKTLLAKTLARFVNVPFVIADATTLTQAGYVGEDVESILYKLLAAADFDVAAAQQGIVYIDEVDKITKKAESINLSRDVSGEGVQQALLKMLEGTVVSVPEKGARRHPRGDNIQIDTKNILFICGGAFVDLEKTISERRHDSSIGFQAPIRSNMRTGGVINAEITSSLLESVESGDLIAYGLIPEFVGRFPILVSLSSLSEDQLVEVQVYLATFKFISLYFVKHSRSYVLTKPKNALGRQYTKLFEMNDVKLHFTEKALRLISKRAIAKNTGARGLRSILESLLTESMYEIPEIRTGKDKIDAVVVDEDSVGSTNQHGSGAKILCGEGALDLYLDEHNKESTLRRSEKVDGEPDIDTEAPSRVASM

SEQ ID NO: 107406 - protein, 87 aa, Oryza sativa
  Clone ID: PAT_MRT4530_11761C.1.pep
EPICTFYSRYGICKFGPNCKFDHPMGTVMYGLATSPTGDVSARRMLAPVPAHSEVSPDNVSGRSRRITHSDSQQIPSGERGTEREAS

SEQ ID NO: 107407 - protein, 478 aa, Oryza sativa
  Clone ID: PAT_MRT4530_11762C.1.pep
MSKAWGGLGGAGAWALDAERAEEEERESAAAPAPAAGFPSLREAAAGAAAGKSKKKKGTTLSLSEFTTYGAAAGRRPAAAAAEPKGLTPQEMMMLPTGPRERSTEELDRSRLGGGFRSYGSGERRGGSDDDGRSGCSGRDADLDLPSRADECGNWSLNKKSFTPSPADSGARSSLGSGGGGGGFRDSPTSTDSDRWSRAAPLPPHNGERERPRLVLDPPKRDASATPTPPPAEAARSRPSPFGAARPREDILAEKGLDWRKMETEIDHKTSRPTSSQSSRPGSAHSSLPGSPGSQTSAVGSEGVPRARPKVNPFGDAKPREVVLQEKGKDWRKIDLELEHRRIDRPETNEEKDLKEQINLLRVDLKETEANISDEDKKGLSEKLSQMERELERLTVELDNKVRFGQRPGSGSGKVTAHLSNSPDESQITESMEQPRSRSSIDQNPKPAEERWGFQGNRDRGSFGGNRNTDRSLTGQRW

SEQ ID NO: 107408 - protein, 444 aa, Oryza sativa
  Clone ID: PAT_MRT4530_11763C.1.pep
MAAAPSAGGVGEGSSSSAAAAAAAAAATIGPHVVDEEAMWQMNLGEAMEAGPYPERIGEPDCSYYMRTGLCRFGMTCKFNHPADRKMAVAAARMKGEYPQRIGQPECQYYLKTGTCKFGATCKFHHPREKAAIATRVQLNALGYPLRPNEKECAYYLRTGQCKFGSTCKFHHPQPSNTMVAVRGSVYSPGQSVTSPSQHTYPGAVTNWPLSRSASFIASPRWPGHSSYAQVIVPPGLVQVPGWNPYAAQIGSSSSDDQQRTAGGAQYYTGSRHSETPNMGDQGMFSSYQAGSVPLGLYTVQRESIFPERPDQPECQFYMKTGDCKFGAVCKFHHPKERIIPTPNCALSSLGLPLRPGEPICTFYSRYGICKFGPNCKFDHPMGTVMYGLATSPTGDVSARRMLAPVPAHSEVSPDNVSGRSRRITHSDSQQIPSGERGTEREAS

SEQ ID NO: 107409 - protein, 129 aa, Oryza sativa
  unsure (1)..(129): unsure at all Xaa locations
  Clone ID: PAT_MRT4530_11764C.1.pep
NHRCRSGQGRAGFSPVAHHLRIHGSRRRRRCRQTPPPPPLPLPRQLPPQQPSGHRHSSPAASQQPHQPPFPTPAPPRRPSPPPSFPAAGCRSPRSGRPWRGSGHRLRRSXAVSPAANSHAAVSTTAATF

SEQ ID NO: 107410 - protein, 178 aa, Oryza sativa
  Clone ID: PAT_MRT4530_11765C.1.pep
MDGSAYFTNLINEGDTTYDWSALGSQPEDPKSQVGEGEAYVRSNQKRSKNFSMKEDVLLVSAWLHLLVLRAAFLKIENLIPANGMQLSGKPTGRKKEKEKQRQHSDQSQIDALDHLWVKKKEADVEKEWQRAERCKVASALDQQQIDLEKEMFEFKRMIVEDRIMRLDTRVMSIEEQD

SEQ ID NO: 107411 - protein, 121 aa, Oryza sativa
  Clone ID: PAT_MRT4530_11766C.1.pep
FHIINVTSHMHCRVQDSIVSNNRCRDHILICYSSSHTAFLLSLYMSYPSCSNPNAILKAKKFLDKSSINLTRQKEYQRQWQPDLSMCHISFCTLVTYSVHFCGYVQQFPLSSICVKNTTSE

SEQ ID NO: 107412 - protein, 192 aa, Oryza sativa
  unsure (1)..(192): unsure at all Xaa locations
  Clone ID: PAT_MRT4530_11767C.1.pep
LLSIASSSPGDSRDDAAAAPFLFNASSLTSPPPERALAKPCARKDGGGGALSHLPFAPNGWGRRXSGGGGAQIRAVAGRIWGSDSRWQGMKVAAVVDTAAWELAAGDTAXERRRRCPDPRHGRPDLGERQPAAGNEGGGDGRRGGAGVGNGGSWKRRRLVTVADVAMGKALGDDKVGGVQRGENAVSMTGGR

SEQ ID NO: 107413 - protein, 358 aa, Oryza sativa
  unsure (1)..(358): unsure at all Xaa locations
  Clone ID: PAT_MRT4530_11768C.1.pep
QFGILTLNCFHCPLLSSPIASSSPGDSRDDAAAAPFLFNASSLTSPPPERALAKPCARKDGGGGALSHLPFAPNGWGRRLXSVVAVPRSAXAGRIWGSDSRWQGMKVAAVRRRRCPDPRHGRPDLGERQPAAGNEGGGDGRRGGAGVGNGGWWXDCGCRRXAVTAAVGGEAAAAMVTVVAAAEAAAAXEAAGELWRWPDGCCGGSWRGNGSGGGGGVWRQRRRRRLVTVADVAMGKALGDDKDDGGGNGGGRRHGGLERLVVGMADGCIWSAQQRLEEXGRRSAWHREAQLMAAEAGSAREARAVEMEAGLARETRPMEGGWIGARRVRWRRPAWCERRDWRWRRRPRCEEELPVDVA

SEQ ID NO: 107414 - protein, 216 aa, Oryza sativa
  Clone ID: PAT_MRT4530_11769C.1.pep
MAATATATAAPEEEEGKRVMTRALEWEGCVVSPVPTATADEAWALLSDFLAFHRWHPRVAKCRPASPSAAASTAAAPPGSVVRYCEGTPRGDGAPPDWAHETLLEHDAARRFFRYEMNDNNMGFGVFVATFRVVPDAGGGDADAPGCELRWEFEGDPVRGTPKEALVARLQAGLDGMAARVQEHLMSARAADAAVIAAGGVEAADELNRDKYSIAV

SEQ ID NO: 107415 - protein, 85 aa, Oryza sativa
  Clone ID: PAT_MRT4530_1176C.1.pep
MADAAPGARRRRRRERGGSGEEKPYLRIDPGSFYIREEVIRRFDFGCTPLLRLALVIVTPARSRLNPNDGCDKDPVSSVVEPPPG

SEQ ID NO: 107416 - protein, 54 aa, Oryza sativa
  Clone ID: PAT_MRT4530_11770C.1.pep
SARAPPSPRRVQPSAAATPVVAVAREGCRQVRKVAAILIPSSDSAEVCREHRRH

SEQ ID NO: 107417 - protein, 79 aa, Oryza sativa
  Clone ID: PAT_MRT4530_11771C.1.pep
MEAALMGVVANSAMGLSPKRHLRERNLGKIATSDTRINQRGKKTSVRKFDEYGDMMTLIIVMSRDGRRDLDDLDHRDVT

SEQ ID NO: 107418 - protein, 142 aa, Oryza sativa
  Clone ID: PAT_MRT4530_11772C.1.pep
SLMDMYAKSNESWEAEKILKQLKSSQLKPDVVSYNTVINGFCKQGLIKEAQRILSEMIADGMAPCVVTYHTLVGGYASLEMFNEAREVLNYMIHHNLKPMELTYRRVVDSYCKAKRYDEAREFLSEISDTDQNFDSEVAAHA

SEQ ID NO: 107419 - protein, 38 aa, Oryza sativa
  Clone ID: PAT_MRT4530_11773C.1.pep
VIIEFGKWECFWIIVVWGFFSRIIFYILLMLGSRNKWR

SEQ ID NO: 107420 - protein, 228 aa, Oryza sativa
  unsure (1)..(228): unsure at all Xaa locations
  Clone ID: PAT_MRT4530_11774C.1.pep
AIEPQTRSRKLDEPEPIYGTINKSPEAIARANAKADEAIQALGYDPRIKPVVPEEAPPALPPRNLQTKAISDYDDVSYVPDFKVRKTDEPEPIYGTINKSPEAIARANAKADEAIQASGYDPRIKPVVPEDAPPALPPRTQSLIDSTEVPSYRSALANVKFDDASPWPQPSALRSKAFADEPSSETPKSRGKRGISKKSLSRTVQPRSRKISEEYSSFXERLPLRIID

SEQ ID NO: 107421 - protein, 65 aa, Oryza sativa
  Clone ID: PAT_MRT4530_11775C.1.pep
MGRKGEEEHLAHGQEFGESFRSKSELVLPMNSLAMYGNRDALFICNSYKDNDRQCWTRDHQQCRY

SEQ ID NO: 107422 - protein, 63 aa, Oryza sativa
  Clone ID: PAT_MRT4530_11776C.1.pep
QGERPQKLGETRIQARIKASLRFRISLALCLASSSAVLLILCNCKMYLSMTQCCRNFFLVAPA

SEQ ID NO: 107423 - protein, 125 aa, Oryza sativa
  Clone ID: PAT_MRT4530_11777C.1.pep
RPFDLPDIYRSAKNRFGHLHWDMKVDANAGKCAKQSCLRRDYAICFCLLSYSDLLLGWLVRWFWLKEMASGELLLVIILVSILVACVEFTILCSGVLPLLLLYINIFLQRGEKLLFWKKKKKKKK

SEQ ID NO: 107424 - protein, 64 aa, Oryza sativa
  unsure (1)..(64): unsure at all Xaa locations
  Clone ID: PAT_MRT4530_11778C.1.pep
HHGDAYATAREIAVVGVIGAAHMGSGIAHLAAAAGCGVLLLESDXTAALSRAVDSISSSLRRLV

SEQ ID NO: 107425 - protein, 64 aa, Oryza sativa
  Clone ID: PAT_MRT4530_11779C.1.pep
MARDGRTAINGASMLAGIYSPPTTNRRGPGAPRREGGDEPEEGGGPDRWGLSVSGGGEGVGSAW

SEQ ID NO: 107426 - protein, 646 aa, Oryza sativa
  Clone ID: PAT_MRT4530_1177C.1.pep
MATEPSTSAPASPAAVAGGDDSLEPWSARVRTLTRLGRHREALALLRHGDPSPPPHALALPAAVISCAKLHLASGVAQIHALAAKRGLLPSSDAYLLSALLSSYSRLRLLPLARQLLDELPLASTPPATARTAFNSLISGCALHGVPAGCFSLFRRMRVAAGVRFDAVTLLALVPVAPLGIVPQLHALAARSGLAANTSVANCLVSVYARGGGGGASLARQVFEEMPRASRDLVSWNAVISAHAQNGLAVEAVELYRRMRGPEGGGVEPDAVTLVGVLSSCAHTGARRVGLDVERYVRDTIPGFRDNLPLCNALINFHARCGSLAQAQELFDEMPERSVVSWTTLIIGYGMHGQGDIAVDLFETMVSEATAPDSVAMVGLLSACSHAGMYDEGRKYFSTMERDYCLRPKLEHYTCMVDLLGRAGRLDEARELIASMPMAADGAVWGALLGACKIHKNVEMGEEAFERVVSLEPANVGYYVLMANIYADAGQLDGVAKVRAAMRRRGLRKEPGCSYVEHKGKVHLFMADDHSHPQARRIYELVVELERMVKEKTGGDVVEERAEKAVAEAAAVPLVGFHSEKLAVAFGLLNTEAGSEIVVIKNLRVCGDCHSFLKTISELTNRAFLVRDASRFHRFENGACSCRDYW

SEQ ID NO: 107427 - protein, 110 aa, Oryza sativa
  unsure (1)..(110): unsure at all Xaa locations
  Clone ID: PAT_MRT4530_11780C.1.pep
MAEVANVGIKSSINNNEDTSRRRRRRSTVKAKMPTNGGIIGQPCRQRHQSAAAKASRSVKTXTPMNGGVTNQPYRRGHQSAVDGESEDAHQRRHNRPAVXAETPVGGGKG

SEQ ID NO: 107428 - protein, 639 aa, Oryza sativa
  Clone ID: PAT_MRT4530_11781C.1.pep
MGSSGEAVAEWGKEGEGGLRHRWRAEAVGASSSFAEGMGEFVLRSMDARFSGSADADGFPSSRHPGFGHSKSTTATSDCSKGQEHVFVRSYSDRLLKCDLTLDMLSENEKIKIIENLVKIQNDGTLEVDVKRSALIASELSEIDAFGSLSRDIVEAAPGLSKSVPKLKIVILVVSPFSCQSIMDDELILTPHYSNKSLITILCRSRFDCACDQFHSDSTVPNQMVVMGAVGKARDGKILSIQLDEFGHYVRLATHANFRTFVKSAGIDFYPLGGDPRILAQYMTKNKGFCLAGPTEISVQRKQLKEIIFSVLPACTEPDLDTGLPFRAQAIIANPPALGHLHIAEALGVPLHIFFTFPWTGFINEFRKKLKLAPIAYFSTYHGSISHLPTGYMWSPHLMPKPNDWGPLVDVVGYCFLNLGTKYQPPQELSQWLQQGPKPIYIGFGSMPLGDEKKVTSVILDALRETGQRGIISRGWGDLGSFSEVPVDVFILEDCPHDWLFPRCAAVVHHGGAGTTAAGLVAGCPTTIVPFFGDQFFWGERIHAQGVGPAPIPIAELTVEALSNAIRFMLDPEVKSRTMELAIAIGNEDGVAAAVDSFHRHLPAELPLAPPPTDVKEEQLDFFQWFSQALEKCCFPFNP

SEQ ID NO: 107429 - protein, 54 aa, Oryza sativa
  Clone ID: PAT_MRT4530_11782C.1.pep
PAWWRRRRRHPYGETTSVDNRVWRRPHPPAPLPQAAQLGYKPNVFSFWILFLQP

SEQ ID NO: 107430 - protein, 118 aa, Oryza sativa
  unsure (1)..(118): unsure at all Xaa locations
  Clone ID: PAT_MRT4530_11783C.1.pep
MCGILAELGADDWSQAKRAHVLSCCRRLKHTGPGCSRLHQCEGNFLAQQRLAIVLPVSGDQALYNADRAIVVGANGEIYKHKKIRKQFDFQDTVTTGSDXCQGIIPLHEEDREDLVVM

SEQ ID NO: 107431 - protein, 102 aa, Oryza sativa
  Clone ID: PAT_MRT4530_11784C.1.pep
MEGALLCSFGFLEGENAGRCREKTALNAGLGGDVILFQLTSAKAVDGIGIGLWKIWPIFVWPVILRGRSVIRPKERGILSRISSPAVSQLYIEVVSHPLEQV

SEQ ID NO: 107432 - protein, 44 aa, Oryza sativa
  Clone ID: PAT_MRT4530_11785C.1.pep
WAGTARHEVPIRPCRPDGWWAVPCRAWAGPCRVDLLAIYTWFCD

SEQ ID NO: 107433 - protein, 92 aa, Oryza sativa
  unsure (1)..(92): unsure at all Xaa locations
  Clone ID: PAT_MRT4530_11786C.1.pep
SLTFFLVGRTLSLLASQLACLQLHXALKLAWPRGARTGWTRHAFLPSYGDPCTHAXHSCSYLLLAGAGDGGGGGGGLVVLLRRRLCRRGLDV

SEQ ID NO: 107434 - protein, 31 aa, Oryza sativa
  Clone ID: PAT_MRT4530_11787C.1.pep
GCVRFFPKSSSSCRVQVRIQTCESVTLLVKL

SEQ ID NO: 107435 - protein, 719 aa, Oryza sativa
  Clone ID: PAT_MRT4530_11788C.1.pep
MEIYIVYLGERRHDDADVVTGSHHDMLASVLGSKEVALESIVYSYRHSFSGFAARLTEAQASTIRGLPDVISVRENQIHRLHTSRSWDFLGMDYRQPNGLLAKAKYGEDIIIGVIDTGITPESPSFADDGYGPPPSKWKGVCQVGPSFKAKSCNRKLIGARWYIDDDTLRSMSKDEILSPRDVVGHGTHTASTAGGNIIHNASILGLAAGTVRGGAPRARVAMYKTCWNGVGCSAAGQLKAIDDAIHDGVDILSLSLGGPFEDPGTLHVVAKGIPVVYSAGNDGPIAQTVENSSPWLLTVAAATMDRSFPVVITLGNNDKFVAQSFAISGKTSSQFGEIQFYEREDCSAENIHNTVKGKIVFCFFGTKFDSERDYYNITKATSEKGGIGVILPKYNTDTLLGDTLLTLPIPLVAVDYEITYRIYQYIKENDGTPKVKISLTQTTIGKVSAPKVAAFSSRGPSYIYPGVLKPDIAAPGVTVLAAAPKAFMDAGIPYRFDSGTSMSCPHVSGIIAVLKSLHPQWSPAALKSAIMTTAALTYDNNGMPIQANGKVPKIADPFDYGAGVVNPNMAADPGLIYDIEPSDYFKFFNCMGGLGSADNCTTVKGSLADLNLPSIAIPNLRTFQATTRTVTNVGQANARYKAFLYTPAGVEMTVDPPVLVFSKEKKVQSFKVTIKATGRPIQGDYSFGSLVWHDGGIHWVRIPIAVRIVIEEIYSKIS

SEQ ID NO: 107436 - protein, 59 aa, Oryza sativa
  unsure (1)..(59): unsure at all Xaa locations
  Clone ID: PAT_MRT4530_11789C.1.pep
YISRCLLTASTVIRIDGLXTLRDVHFTRTPDLPNMSLRPKNETCHWKAFQQLNLAVPTP

SEQ ID NO: 107437 - protein, 518 aa, Oryza sativa
  Clone ID: PAT_MRT4530_1178C.1.pep
MKSSIEGNEKSSKDGITKENGSKGSNEDIFIDPTVLKHMDRDELVAHFNKMMNQMKRQHDSTLQEKTEEIFRLKRENLKKEGPNPWHLRNNKEFELMRKKIWEVITKLDEVLVENKRTIRIKSDVFPGQQDKIKVVDSHNHQLQGAPTDNEEEECTTLIKASHFTPIETNYLNQIRRLESDIEDASIVTIVREETEKILVTEFISEIKMGLHGYEMEFNMNLDFWSIIQKEAIAEAASNINSFLLKYSEENSCAEAQSLHMQEMDKLKLNVDTFNLVIREKEEYLSQIEFKAIEDHLDFLRHELDSLRGKVAKQDSGISDKCRDFDVIVSRLEQALQHVHRNEIALKELNDRFRTVSDSQKEVEKQNKVLHAIIKEKEKGFSSSISKEKEFTECMRCVVESMRGFEKLVTDQQTIIAHKVQHNESRFSLLKEQCKILAKEGNTLRKKALRYKEISETRASNLQKAELEVDLLGDEVEALTDLLAKIYIALDHYSPVLQYYTGVMEILNMIKKHLNMSK

SEQ ID NO: 107438 - protein, 80 aa, Oryza sativa
  unsure (1)..(80): unsure at all Xaa locations
  Clone ID: PAT_MRT4530_11790C.1.pep
AGRMQRRRRRGFPFXSLLVKWXGAPMRPEHEGRSLERTARSGAGEFGSGPPLDGSGLDAQXGGESGRARWDRGARARRKR

SEQ ID NO: 107439 - protein, 326 aa, Oryza sativa
  unsure (1)..(326): unsure at all Xaa locations
  Clone ID: PAT_MRT4530_11791C.1.pep
MAGLVGVWLGEFAKMGRGAAPAADAGVGQRAQSEGESCKSKVGDGVVQEITTRTRDSSILLSDSEATPALSIGNVGQLAVDLLVSSSRARRVAYLDEPSVLPCAGNDAFGPDAVGDLALALEAYESPSHRLAFIQQRSPIITGMVVSFAKNVANFISSIEKDHVVILSSLDSGKRRIIDASSDMQVYYLSSCNEDGSDPKCENLGWKKLEEYDPSQQRWEVSRLAYLKGGQSFEKILTGDPEEMTDXDYYSSLPFAALFSACKAKGLKGTCVLCYCSEGDDMPESFQLAEAACKLVAPRPLNQFHGNGSNGWTIPLSWKSVYGPPP

SEQ ID NO: 107440 - protein, 100 aa, Oryza sativa
  unsure (1)..(100): unsure at all Xaa locations
  Clone ID: PAT_MRT4530_11792C.1.pep
HLRGSIPRAKLTLSSLQDSRRSTNSGFGNVSNGGRIKCMQVWPTYNIKTLETISHMPALTVGDLMNQISYLLGSKRVPCLELCKAXLAYHENHRPPGCYD

SEQ ID NO: 107441 - protein, 110 aa, Oryza sativa
  unsure (1)..(110): unsure at all Xaa locations
  Clone ID: PAT_MRT4530_11793C.1.pep
NNLYNFKYNYSTGYLAVTNLKKKKKNXRGGPVPNSPYNEXYYNSLAVVLQRRXWEXNPGVTQLNXLAAHPPFPXXAVIXKKAXXDXPXLTPPMANQTLIFSLKFPNIIFF

SEQ ID NO: 107442 - protein, 261 aa, Oryza sativa
  unsure (1)..(261): unsure at all Xaa locations
  Clone ID: PAT_MRT4530_11794C.1.pep
MQQQQAWAAGLGGLAVAGVGEEGGGGGPAPTTVDEASMERSKSFVKALQELKNLRPQLYSASEYCEKSYLHSEQKQMVLDNLKDYAVRALVNAVDHLGTVAYKLTDLYEQQASEVSTLELKVACLNQXLANKRMQAFSEMQTDADIDSRPRPYPSAKTLFWHLASEKNSKTNGARQSEFVXKEPSTSPLPKHLQTNLASSDFAMHNVGMKDQPGVRHLSSFSSFDNPRGRQIQKAPLRTKSMLAAFFVKHKSGKMKNVSVR

SEQ ID NO: 107443 - protein, 128 aa, Oryza sativa
  Clone ID: PAT_MRT4530_11795C.1.pep
KKKKKKKKKKKKKKKKKKKKGGKKKKKKKFKKRGGGSKRVFFGKTKINWRGVFLKRGERKKPGGTKKNGGGKKSLFAKLVYFERGPPFPPFKKFAKPERGMGPPLVGGIKGGGGGGFPEGVLLLWGGP

SEQ ID NO: 107444 - protein, 283 aa, Oryza sativa
  unsure (1)..(283): unsure at all Xaa locations
  Clone ID: PAT_MRT4530_11796C.1.pep
GTKAPRSSSSPLRGAKHTLVSLARLRYQLYSASEYCEKSYLHSEQKQMVLDNLKDYAVRALVNAVDHLGTVAYKLTXDLYEQQASEVSTLELKVACLNQQVLTCQTYTDKEGIRQQQMTGTATRHHKHYIVPTLANKRMQAFSEMQTDXADIDSTPRPYPSSXTLISHXLATGKKAKTNGTRQSQXVVLGETTATRTWHREVKERARSPXLPKHLPTSLASSDFAMHKVAKKDKPGVRHLSSFSSFDNPRGRQIQKAPLRTKSMLAAFFVKHKSGKMKNVSVR

SEQ ID NO: 107445 - protein, 104 aa, Oryza sativa
  Clone ID: PAT_MRT4530_11797C.1.pep
RAAVFPHVGRRSSSPPRRRSFSHRAASPLHHPVNSAAMEGSLSHPSNRSPRHAMLIPSKSSILLLRSFRCRFGFVLFAFCFSFGLSFLLDRSCLRRCKFILSFF

SEQ ID NO: 107446 - protein, 85 aa, Oryza sativa
  Clone ID: PAT_MRT4530_11798C.1.pep
GARRLRHARRRAVPLPDVPRRAADVHVRAAAAAAAVPSRGRHRRRADAVSAGSSRRRQRPRREAGVTAITSLHLQSPIRHCGGLA

SEQ ID NO: 107447 - protein, 108 aa, Oryza sativa
  unsure (1)..(108): unsure at all Xaa locations
  Clone ID: PAT_MRT4530_11799C.1.pep
LSSLXLXNSXTXRXXXFGLHLXPXXLRXAXLXRPPXXXPVLHVXQXXRHVQQRRQARLVQHRPRWXRAAXSSTTTATATAASVDVGHPXCAAMARSLGALMASGSLGG

SEQ ID NO: 107448 - protein, 119 aa, Oryza sativa
  Clone ID: PAT_MRT4530_1179C.1.pep
GSPPLGPPGVYFLGPGFAFWGKVSADYAFPPGTPFFPGFRGALQGAPQGERGGPPGAGAGLPGAAPGAGVFPFNPALTLLFGFFFPLKALDGPFFFKKKKKKKKKKKKKKKNPKKKKKQ

SEQ ID NO: 107449 - protein, 100 aa, Oryza sativa
  Clone ID: PAT_MRT4530_117C.1.pep
MTVVTVGMVGNTLQPSLGINPSYPSKPCIHRCHGRFGRTLWFGRTMGWPNPAHLRLVASFVVLLHRLVNFGPVCRVISDFLAYSYISLVLNIVRLIYRLC

SEQ ID NO: 107450 - protein, 307 aa, Oryza sativa
  Clone ID: PAT_MRT4530_11800C.1.pep
MSASKLQFTPCSTPIQGNEINFSKLYLHHTPAGPRPNQSGVTSTNKETGLGSLVVNNWQVYDGIGCDAKVVAHAQGLHVYAGNWHNSFTLVFEDERFKGSTLEVMGIVVEQGEWAIVGGTGQFAMANGVIFKKFHEQKKEGNIMELTIKGFCPVLKGSPSQGLVTKIGPWGGIDGGRAQDITESPICLESITLYHGWSVDSISFTYLDHAGEKHKAGPWGGPGGDPIMIEFGSSEFLKEVSGTFGPYEGSTVITSINFITNKQTYGPFGRQEGTPFSVPAQNNSSIVGFFGRSGKYINAVGVYVQPI

SEQ ID NO: 107451 - protein, 178 aa, Oryza sativa
  Clone ID: PAT_MRT4530_11801C.1.pep
SMIARRPNGDGRTEAAGCSFGSSMSRRLQRWLLDAVMGEPEHQAVVVAPRRDDRVASLRLASHLELAVGTASGVRWTIVSTGCQSSHHLLLWSDLNHSLESDVALLGGGGGSPSDAPPWLPPCKMLPASSDGIALKAALVVGFVRGGAISARCCLPSHTPIEAELELARDLPPIATLT

SEQ ID NO: 107452 - protein, 92 aa, Oryza sativa
  Clone ID: PAT_MRT4530_11802C.1.pep
WANTTAERALKERLFRADPAEVWSIHYLGLKPDAAHARWWQVYDDMGEAMRSPCRLSERRKIEIAWDRHLAEEAGFSDHHWKINITDPRKWE

SEQ ID NO: 107453 - protein, 653 aa, Oryza sativa
  Clone ID: PAT_MRT4530_11803C.1.pep
MQRRPGLGKTARTSARDARQPRRRSTTRGQASPARCAIGMGVTGGAGEAVKPSSSSSLSPVAGLRAAAIVKLNAAFLAFFFLAYMALLLHPKYSYLLDRGAASSLVRCTAFRDACTPATTTTAQLSRKLGGVAANKAVAAAAERIVNAGRAPAMFDELRGRLRMGLVNIGRDELLALGVEGDAVGVDFERVSDMFRWSDLFPEWIDEEEDDEGPSCPELPMPDFSRYGDVDVVVASLPCNRSDAAWNRDVFRLQVHLVTAHMAARKGLRHDAGGGGGGGRVRVVVRSECEPMMDLFRCDEAVGRDGEWWMYMVDVERLEEKLRLPVGSCNLALPLWGPGGIQEVFNVSELTAAAATAGRPRREAYATVLHSSDTYLCGAIVLAQSIRRAGSTRDLVLLHDHTVSKPALAALVAAGWTPRKIKRIRNPRAERGTYNEYNYSKFRLWQLTDYDRVVFVDADILVLRDLDALFGFPQLTAVGNDGSLFNSGVMVIEPSQCTFQSLIRQRRTIRSYNGGDQGFLNEVFVWWHRLPRRVNYLKNFWANTTAERALKERLFRADPAEVWSIHYLGLKPWTCYRDYDCNWNIGDQRVYASDAAHARWWQVYDDMGEAMRSPCRLSERRKIEIAWDRHLAEEAGFSDHHWKINITDPRKWE

SEQ ID NO: 107454 - protein, 195 aa, Oryza sativa
  Clone ID: PAT_MRT4530_11804C.1.pep
LGGGGRWWRIRRRGAAGDGEDGRAGAPPRRHLEERREGGEGVGGGGGVSPGGEGLAGAIDPFQDAGEAGGGMVGRWGGGGGGSREDGGVVAACDRLGDHGGRDGWGRNGDWGQGEGAAEAAAAASSSSLGPRRRHAVRVPRLRTRRCQRQLMKINAATQQEESAARGGEVMQLRPPLLLSRLSPAAARRFSAIVH

SEQ ID NO: 107455 - protein, 103 aa, Oryza sativa
  Clone ID: PAT_MRT4530_11805C.1.pep
KVKSAVLKSKQKAAGCPKIHTSSIITTLETRSRPRMQESPYALGTHKRDTDTSLSEERSGDRDLYTPGCASIRSPTRWACRRHGEAAAATLCAPWVREGEERV

SEQ ID NO: 107456 - protein, 221 aa, Oryza sativa
  Clone ID: PAT_MRT4530_11806C.1.pep
MADEDVPFEVALAAGDTITVFDTLVSPDDTEDRGESAMVDKTSAMVDKSGVNTVLGPQKLWLKGHLAAVSELVDAAAQCLRIEWYRRIRAVKTESRDLRLVLVNGEDRDYLREEQRSSAIGIPCEKRPPLAAGSVVGGGHPTSNGGGLPSARSGERGACGAGSGDAAGSRTDGCLAEASAAHLSNGGGHAIPMRRRRQGWRRTPMVLGINRDGGYALRADG

SEQ ID NO: 107457 - protein, 79 aa, Oryza sativa
  Clone ID: PAT_MRT4530_11807C.1.pep
MEKSRLGLGLEKGANEWGGGWGGACWLCGCEPEGERRDDWHRAMRWGASVTSATPSCHVSLHACVVPRWHGHGERRPVI

SEQ ID NO: 107458 - protein, 313 aa, Oryza sativa
  Clone ID: PAT_MRT4530_11808C.1.pep
MTTTTATNTATNTAAAMEVTKAVTQLCAQGGGGGGRRRGRGRPAVLRLDLRWGRLLRLAVISRVVRLVWDQLLACSSCAGGGGGRYRRLGPPPQGVAAGAVLSPLPRDADDDAAAADRDAADVEDVVSLKVSLLGDCQIGKTSFMVKYVGDDEEQNGLQMTGLNLMDKTLAVRGARIAFSIWDVAGDSQFLDHVPIACKDAVAILYMFDLTSRCTLTNVIDWYERARKWNKTAIPILIGTKFDDFAQLPLEMQWTIVNEARAYARAMKATLFFSSSTHNINVNKIFKFITAKLFNLPWTVERNLTVGEPIIDF

SEQ ID NO: 107459 - protein, 122 aa, Oryza sativa
  Clone ID: PAT_MRT4530_11809C.1.pep
MGGVERPVMVDIMGGGIGGRLRRGGKARVLVLLNSSNTTKSFSLSAGRREGTCLRPALFECRTCGRQFLTFQAGRHWTGTVPATSGRTTHSRHVAIHEVSPIRKNIMEGGRKKMNLTGGSHV

SEQ ID NO: 107460 - protein, 92 aa, Oryza sativa
  unsure (1)..(92): unsure at all Xaa locations
  Clone ID: PAT_MRT4530_1180C.1.pep
GNMNCTQMYSRIVXLYAEHNELQFAEPGXLIGVGTTMDPTLSRADRLAGQVLXERRSLADVYVVLEINLFLLKRLSGVRTKSTVKAGKVSML

SEQ ID NO: 107461 - protein, 35 aa, Oryza sativa
  Clone ID: PAT_MRT4530_11810C.1.pep
MAAPSTVAPLEVSFEQRRPDKDMWRGVTLLRLHRT

SEQ ID NO: 107462 - protein, 484 aa, Oryza sativa
  Clone ID: PAT_MRT4530_11811C.1.pep
MARFVVAGASEYLAITGWGIDDVKLAKKAWVFAGQKCLKFDATPVSYDIDVQAMSSEKLPFRLPAAYTIGPSPKIKRNPVVDGPAPPADTQRRLEDCDEEAIRSPNHVIDLVKGVIEGETRVLASSMTMEEIFQGTKKFKQQVFDQVQLALNELGLYIYSANVKQLVDDPDSPGNDYFSFLGQKRQAEVEGKAKVAEAEARMKGEIGAKEREGLTLQNAAKVDAETKVLSARQQGVGCREEIKVKADVEVYENEREADIAAARAALAVKKAGLDKQSKVAEVEAVKAVVVREAELQLEVERKNALRLTEKLKAEKLSKATVQYETQVQDSNAALYDRQMAADATLFEQVKSAEARKAQAGAKFFEQKLAEDARLYARQREAEALAGVGRAKAELVASMLQELGGDHGALRDSLMIDGGVYEEVARVNASAMSGIQPKISIRSGAGGANAGASSAGAVQQVAAADVYDMLPPFLQSSGGFNKLPL

SEQ ID NO: 107463 - protein, 137 aa, Oryza sativa
  Clone ID: PAT_MRT4530_11812C.1.pep
RRSAAGTCAAAGTGTPQDATMTTVAAGLRPHPTGVGASRANGSAAASCFPRSMPCLKLRQQPSRTGWTADDAATRREESIEWSLILTELEMMIQLRWELMMTKHDELPKDSSRMLGCILATTIVSNQQAKGKYGKKE

SEQ ID NO: 107464 - protein, 83 aa, Oryza sativa
  unsure (1)..(83): unsure at all Xaa locations
  Clone ID: PAT_MRT4530_11813C.1.pep
QLGTNFILYLLIIRTVRSGFRRRNPTGEGWTRWPARRRTRRRRRRGLARXASGGQSNGGGGGEGVTQSNRLYPTGLTGPMPSV

SEQ ID NO: 107465 - protein, 110 aa, Oryza sativa
  unsure (1)..(110): unsure at all Xaa locations
  Clone ID: PAT_MRT4530_11814C.1.pep
APKRGGVVSVVLAHCYGACQAAXDKFFPSVSKSHNLLLLNWDFTVTGAGKDNYXYTYRRFAYELIALMEERTLCASCAAVLAHYMYAMAGCISSQRRPRLCTHILLVCAF

SEQ ID NO: 107466 - protein, 222 aa, Oryza sativa
  Clone ID: PAT_MRT4530_11815C.1.pep
MHTDTRVTYGFTLNTRSRSSIKQEQSEVSNVQSPFSTGMMQQAAAAAEAHGSGHPAASMADDGKEEAVSAAWHGSVRAAVEGPTPDQAWALLGDFCSLHRWVPSVQTCRRVEGAEGQPGCVRYCAGPVNKAAEAVAGWSKERLVEFDPVARRYSYEVVETNKGFGRYAATLRVEPDPAGCAVAWSFEADPVRGWSLEGFVGFLDELARGVARRLEEEIMSRN

SEQ ID NO: 107467 - protein, 96 aa, Oryza sativa
  unsure (1)..(96): unsure at all Xaa locations
  Clone ID: PAT_MRT4530_11816C.1.pep
MADSCLTQETALNQLGKKHRRAQTXPISQRKKKTDTFKAPRMIAAGCQETRIRLPRPKNDPGAAMQGRLGQERKSAGRKAGKWGGEKRDGGFMGFL

SEQ ID NO: 107468 - protein, 85 aa, Oryza sativa
  Clone ID: PAT_MRT4530_11817C.1.pep
MARGSAPLDGSVLPPSRIVSERQVGLPRRFMPESATGREIVTLGEGRSAPRYPGRPQLARVGASAWGDPHVETGQAGSVVTEGYG

SEQ ID NO: 107469 - protein, 75 aa, Oryza sativa
  Clone ID: PAT_MRT4530_11818C.1.pep
MVASDMASMLLKPSAAALLERSKLRGKGTMARPSVIIAAKKAKKTQTFEPYGPAGGVASISGVRMLRAIALQLHQ

SEQ ID NO: 107470 - protein, 209 aa, Oryza sativa
  unsure (1)..(209): unsure at all Xaa locations
  Clone ID: PAT_MRT4530_11819C.1.pep
SNNGALLNAEVYIGXRHRRSTDSAYAVFLDECMTAAKHNYGARVLIQFEDNADHYACELLAQYGTTKLVFNDDIQGTGYGDLSELAAILKLCVDXLQEHRHLCLXLNRLGQTLHXLIVIEISRHTKAPIEERRKKIXWLADTKGLIVRSRKETLXHYKRPWSHEHEPVGKLLDAMKTIKPTVLSVTSVTVQTLTQEDGEAISSFNERPA

SEQ ID NO: 107471 - protein, 111 aa, Oryza sativa
  unsure (1)..(111): unsure at all Xaa locations
  Clone ID: PAT_MRT4530_1181C.1.pep
MAHSPSGSVAAAAAGEEEGAMVEAAAEDGGAESRITALLFDVSQQVQEALQGMLKMTGEIEQCGAEIXAEIERAKEAVADKGRALDDDRERFQKAAVAALNILSGGAAGDI

SEQ ID NO: 107472 - protein, 95 aa, Oryza sativa
  unsure (1)..(95): unsure at all Xaa locations
  Clone ID: PAT_MRT4530_11820C.1.pep
LRRFTXHGANTYGCFKYSNQSAYYFFTLKSNLPIQHXAYIKHTKLYFNKALYNIQYYRHQRPVLSLLSIFSTFNLQKKNIFFFYIFHNPPRNFPL

SEQ ID NO: 107473 - protein, 712 aa, Oryza sativa
  Clone ID: PAT_MRT4530_11821C.1.pep
MGAGHRGGSGELREGAGENFGELPPAQEGLRGTPIPSPAMKYTFLLFLCLVSFVTSSEHQFVFSGFTGSNLVLDGAATITEDGLLELTNGANNIEGHAFYPTPLRFRKSPNDMVQSFSVSFAFSILQKYANRSNDGMAFFIAPSKNFSDASLPAQYLGLLNNQNNGNRSNDLFAVELDTFQNKEFQDMDDNHVGINVNSMKSLDAHYAGFYEDRSGIFRNLTLVIHEAMQVWFDYDGDAKKISVTLAPARLAKPKRPLLSVTYDLSTVVADSAYIGFSAATGGVVNTKHCVLGWSFRMNGPAQAIDISRLPKLPNLGSKKSHSSRILVIISPVATAVLIFLVGVLLVLCVRRRLKYTEIQEDWEVEFGPHRFSYKVLYDATEGFKDKNLLGVGGFGKVYKGVLPVSKRVVAVKCVSHESSQGMKEFVAEIVSIGQLRHRNLVQLLGYCRRKGELLLVYDYMSNGSLDNYLYCDLTEPTLDWAQRFNIVKGVTSGLLYLHEKWGKIVIHRDIKASNVLLDKDMNARLGDFGLSRLYDHGTDPQTTHLVGTMGYLAPELVFTGKASPATDIFAFGVFLLEVTCGQRPLNNNQQDNQPPMLVDWVLEHWQKGLLPETVDKRLQGNYNVDEACLVLKLGLLCSHPIAMERPTMSQVQRYLDGDAPLPELAPSELKFNMVALMQGQGFDSYVLPCLSLSSVVSIETSPEVDDDTASV

SEQ ID NO: 107474 - protein, 593 aa, Oryza sativa
  Clone ID: PAT_MRT4530_11822C.1.pep
MAMDDLAGSSSSSSAMDAVVADPSHGWQKVTYPKRHRKQGAAALPSAAAPDLGFLPNGGGKVNVFEAVDRNAEKRHRALLAARDAADPDAARIAAATASAYSDDDDDSDEAQATRPEGEVKKPKVKKPKKPKVTVAEAAALIDAENLAAHLVQISESYENQQDIQLMRFADYFGRSFASVSAAQFPWAKMFKESLVSKMVDIPLCHIPEPVRNTASDWINQRSPDALGDFVMWCIDSIMSELSGQAVGAKGSKKAAQQTPRAQGPEDCMVVAIFVVLALTVRRKPEVLTNVLPKIMGNNKYLGQEKLPIIVWVIAQASQGDLVTGMFCWAHFLFPTLCAKPSGNPQTRDLVLQLLERILSAPKARGILLNGAVRKGERLIPPVTFDLFMRAAFPVSSARVKATERFEAAYPTIKELALAGPPGSKTVKQAAQQLLPLCVKAMQENNADLTGESAGVFIWCLTQNAESYKLWERLHPENVEASVVVLSTIVTKWSELSHKLSAESLKVTLKNLRTKNEAALEAATDSGKQASIKAADKYSKEILGRLSRGGACLKGSLLVITLAVAAGFVLSPNLEIPSDWDKLQAMVASHLSF

SEQ ID NO: 107475 - protein, 874 aa, Oryza sativa
  Clone ID: PAT_MRT4530_11823C.1.pep
MEAALLDVSEAPIDQPPNNQVKLWARNVRELSYNIEDSIDKFMVRIDTHAAPHKLHSFRDFIDRSLDLLTKAKIRHSIGTDIKDIKSRIKEISERRDRYKVDNVVTVPFSPTVDSLRLSALYKKMTELVGIEEKSDELVKMLMEGDKQELKIVSIVGFGGLGKTTLAKVVYEKLKVQFACGFFVTMSLNPNMEKIFSNMLCQLDKEKYSHVTKASWGEAQLINEIREFLQNKRYFIVIDDIWSNVVWETIKYTFLGNECGSKIITTTQILDVAKEVGGVYQLKPLSPAVSRKLFYQKIFGAEGRCPVQLAVVSEGILKKCGGVPLAIITIASLLASKNDRDNILEYWSKVYHSIGSGLEDNLHVNNMRKILSVSYYNLPPHLRACLLYLSCYPEDTNIGNKDVIWKWICEGFVRAEHMKTLHVVGMEYLNELWNKSLIQPISNCDNMPWDYCLHDMVLDLITFLSNEEQFMTSLGDQQPMLVPHKIRRLSLQSIKQEYFKLISNADLSHVRSLIVSKQAFSLLPNLSSFPVLRVLDLSGCDQVDNRHCRDICNTLHLRYLNLHRTSISEIPEEIGNLQFLLVLDITKTRLREVPSTFVQLQQLVDLCVGPGMRLPDDFGNLKTLQSIWPHIYVMSPTMLRNMGGLTKLRHLSIRFHEWDESYQKSFELCLSNLVNLRSITVRVYEGVMDSKCENLSPGPQQLEDIDMNRSVANSVPIWMSSLSFLSSLDIKLKTLGHKDLQILGNMPSLSDLTLWVNEPTQDRHERLVIDNCYPFHCLTFLKLMANNMEVAFAQGPMQKLQKLRFGFGVRKTVDQFGNFDFGLEKISVEHLDVCVNYSDANRWEVNAAEAAIREAVNMNPNNPTLKLTTLFVLL

SEQ ID NO: 107476 - protein, 251 aa, Oryza sativa
  Clone ID: PAT_MRT4530_11824C.1.pep
MAEELVLDTAIRDWVLVPLSVVMVLIGVLRYFVAKLMRSPSASPSPDPKLVKEGQVVIRARNLRINSQYIPAKAFKSRKVYYTNEENGLLHVPKEEAQKAQAAMFSDPNMAMDMMKKNLSMIVPQTLTFAWVNFFFSGFVAAKIPFPLTPRFRGMLQNGIDLSTVDVSYVSSRSWYFLNLFGLRGLFSLILGEENANDDAQKMMQMGGGFGGNPTMGLAAEKDNLDIIQHDWALPKMEHHAEEVLRKLLKK

SEQ ID NO: 107477 - protein, 84 aa, Oryza sativa
  Clone ID: PAT_MRT4530_11825C.1.pep
MERGGAAAAAGGGVVVSPSAAKDSWPELVGVSSEAAKTKIGEERPELDVQVVPADAFVTTDYNAGRVRVFVDSDDKVARPPKIG

SEQ ID NO: 107478 - protein, 73 aa, Oryza sativa
  Clone ID: PAT_MRT4530_11826C.1.pep
YSKTARGACFFSASLHVHGGKIVLVSNDGTGQQASAHLAVYVLRLSCCQSRVRLVHIGWSNWFRYCVHSARWR

SEQ ID NO: 107479 - protein, 36 aa, Oryza sativa
  Clone ID: PAT_MRT4530_11827C.1.pep
RTVHLSNPYTYAKSMSLESLQPSMRDLTSLQKLTAI

SEQ ID NO: 107480 - protein, 433 aa, Oryza sativa
  Clone ID: PAT_MRT4530_11828C.1.pep
MEDDKTTQESSAAAAPPLRSLADYAVGPIPTLLYVPGFISDAEQSQLLHHIYQAPAPKWKSLKNRRLQNWGGVVHEKGLLPQAWEDFTDPQNAHSGESQATTTESNGSHNLEGANETDPASSSLLLMPCSLLIFKDQAYTDYLHGIQDNELQNLDKVANMLQCPEFKHLNSGDGQGNTDESCSLEQSGVYRRTARRVSLTASKREGSERSKGDHQFEVKKPKTPNLYIITPTRIPSFPDRSIQPTMAAAGGCLLLLLLGVVATVAAGECNDDEELARRRKYTCAGPACETARCGKGHCVEEPGPLGLDAYRCDCDAGWSNMLKLIPASPLIKLNLGAMDLTSLAGTVDSACFNTSISLPNSPRAASRSLTLEKRYSLRSNKKYLEISIPHACVAVNCGPGGQRVKEEGFSYHCACSPGFVNMLNLTELPCIKN

SEQ ID NO: 107481 - protein, 59 aa, Oryza sativa
  Clone ID: PAT_MRT4530_11829C.1.pep
NINRVPKEICLVKHASNFWKILQMPHWCKLQMYRPPVRSCNRLYQRKTHQGAHTTNMTL

SEQ ID NO: 107482 - protein, 48 aa, Oryza sativa
  Clone ID: PAT_MRT4530_1182C.1.pep
MGAIHHQNITQGHKSFQCEMAGADKHSQGIHIHWGGAVGDPKVLYLIF

SEQ ID NO: 107483 - protein, 150 aa, Oryza sativa
  Clone ID: PAT_MRT4530_11830C.1.pep
MRALMRRKQVDSDRVRAAGGHQLAKELSVTQLVAIGVGSTIGAGVYVLVGTVAREHAGPALTLSFLIAGVAAALSAFCYAELASRCPSAGSAYHYSYICVGEGVAWLIGWALILEYTIGGSAVARGISRIPIAQAKGESSSSKRSTRGAS

SEQ ID NO: 107484 - protein, 108 aa, Oryza sativa
  Clone ID: PAT_MRT4530_11831C.1.pep
MWQFNVQIKNKFNSPFFPFLPFGLGPNSSPSFLLSSGRRPSAPPLPKSALRPCAPPPSPQADKWGRGTRLSDPSSTSSLPHPNRCAAIAAHVAHDSGLFRSRPRAQTA

SEQ ID NO: 107485 - protein, 83 aa, Oryza sativa
  Clone ID: PAT_MRT4530_11832C.1.pep
LPNKFWNKQLQIKKKEKHTIGINNYRLKKKREKHTNSTGKTAVSWLLALVAHIHVPGINKWYQTMHWFISLPSLFTLANSLVC

SEQ ID NO: 107486 - protein, 169 aa, Oryza sativa
  Clone ID: PAT_MRT4530_11833C.1.pep
MPFLLSHPVECISRAFNLGRVFIHFWSVNFKFVPEKFFVSKELAVALLVLHLTTLLVFAHYKWLKHEGGLFHFLHSRFKDATSIGQLIFAKPKLSTLNKEHIVTVMFVGNFIGIVCARSLHYQFYSWYFYSLPFLLWQTRFPTFVRVILFLAVELCWNIYPSTAYSSLL

SEQ ID NO: 107487 - protein, 121 aa, Oryza sativa
  Clone ID: PAT_MRT4530_11834C.1.pep
FFCSPFYHFPPSWTFSLAFHWCFHPPPCFFWSPVNDFFQVSLPFPFAPPLPIVAFPEGIPFSPVLKSVFPSPVAFFVPPSMGAPFLTVFFFLTASPTLFIFVLFLPPPPPRLFPIVDQQSN

SEQ ID NO: 107488 - protein, 229 aa, Oryza sativa
  Clone ID: PAT_MRT4530_11835C.1.pep
MAPGGGVLFAGTSVCSEEGQDEDEETIVESRAFEQRVNFWEQPNQRWGRLGRGTAEPGHGGPAQVLASSGRHVMMRCVGRDGDDGLRRSENVAAEIVEEEKPSPLNALNRLRLSSSFAPPLLSSSRADGGRGEAARPSRRHAPALSMGSSWTLDQNKVFELALATYGKDTPDRWENVARAVGGGKTADDAKRHYKKLENDIGRIDSTGASSSNSNGRSSSEGQRYLKPQ

SEQ ID NO: 107489 - protein, 80 aa, Oryza sativa
  Clone ID: PAT_MRT4530_11836C.1.pep
HITPSSTFQCLHCPPCLHNHLAPSPTARYYARRAHTVPLFAHIARVQEATSITPPLKASTDLHSADIENDPFTEPLRPIA

SEQ ID NO: 107490 - protein, 167 aa, Oryza sativa
  Clone ID: PAT_MRT4530_11837C.1.pep
MAAAARHVASYMGRFAPRCGYAGDTTCTAAAWTRPQLPHAPSGPLVILRRGIAMIPGDHSPGPADLSPDCFDPEAPDDPATCFAYDEKDLESEEAVWALYQRWCSFHDIERDRDDMVRRFVYFKDRAHKIIEFNKSGKSYTWGLNIFGDMTPQEQSELERPPLHRRI

SEQ ID NO: 107491 - protein, 101 aa, Oryza sativa
  Clone ID: PAT_MRT4530_11838C.1.pep
EKKDNKFQNPTDLTQNIVTSKKKSRSTKYTKKTPRIIRKPRTPKIKSIKKRSRQDPIGITKSPNTERKIKHHKTHFRRETDRKIGKPPKIKIRSAKPTTTA

SEQ ID NO: 107492 - protein, 118 aa, Oryza sativa
  unsure (1)..(118): unsure at all Xaa locations
  Clone ID: PAT_MRT4530_11839C.1.pep
TATHLCLTCPFAKSFWERXIGINPALSNVQNVCMLQPHPRLPXLPSKHHAIFYLLCFWALWNNRHDLVFRNRQPSLDTMIRRCRQESRLWAERLKIEDRSVTAQWEHVFSPPCNSENL

SEQ ID NO: 107493 - protein, 516 aa, Oryza sativa
  Clone ID: PAT_MRT4530_1183C.1.pep
MDNLYLILGAILAAAVVPFILFRGNGGKRGRRLPPGPPAVPLLGSVVLLTKALTDVEPELLLQRLIARYGPIVSLRMGTRVSVFVADRRLAHAALVEGGAALADRPGVPASRLLGENDNIITRAGYGPVWRLLRRNLVSETLHPSRARLFAPARYWVHRVIVDKLAASGQAPHDVVDTLQYAMFCLLVNMCFGERLDEATVRAVEDAQRDLLIYITSQMAVFAYFPAITKHLFRGRLEKIYALRRRQRELFMPLINARREYKKHGGETTKTTNKETTLEHSYVDTLLDIKLPEDGNRALTDDEIIKLCSEFLNAGTDTTSTALQWIMAELVKNPSIQSKLHDEIKSKTGDDQPEVTEEDVHGMPYLRAVVLEGLRKHPPGHFVLPHRAAEDVEVGGYLIPKGATVNFMVAEIGRDEREWAKPMEFIPERFLPGGDGEGVDVTGSKGIRMMPFGVGRRICAGLSFAMHHLEYFVANMVREFEWKEVAGDEVEFAEKREFTTVMAKPLRARLVPRRTT

SEQ ID NO: 107494 - protein, 51 aa, Oryza sativa
  Clone ID: PAT_MRT4530_11840C.1.pep
KATESITIKILYLVLSYIIILPYYCKVLLSDQSLTMHCQALQSHYLNSSKL

SEQ ID NO: 107495 - protein, 513 aa, Oryza sativa
  Clone ID: PAT_MRT4530_11841C.1.pep
MREESNKKSKLSWSKSLVRKWFNIKSKANDFHADYDASQDREMMKRSQTMTILFSFCCLAQFGLNLLGDPGRNGHGDRMPKKNADCIRRGRTESDVSRLTEVQDYRIFASTWNVGGKSPSKGLDLDEWLHSSPPADIYILGFQEIVPLNAGNVLGTEDNVPAKKWVSLIRRTLNRNPGASSYGGYHTPSPVPDPVVELDADFEGSSRRHDNLSFFHRRSFQNLSQSLRVEGNYMSSQPRLDRRFSVCDPVSLGGRPSDFDGNFPCAGSPDDEYIEEDGSNGTYFSPFPYGYGTSIAMEENDEQPNTSRYCLVASKQMVGIFLTVWVRSELRNDVKNLKVSCVGRGLMGYLGNKGSISISMSLHHTSFCFICCHLTSGEKEGDELRRNSDVMEILRKTRFPRVRGAGDIKSPETILEHDRIIWLGDLNYRISLSYCSAKALVEMHNWKQLLEKDQLSYVRGESRFSDHRPVYSIFMAEVEIIRQRRRNMGCFNSRVEVEELLPYSYSFGDIKFN

SEQ ID NO: 107496 - protein, 412 aa, Oryza sativa
  Clone ID: PAT_MRT4530_11842C.1.pep
MAEDPAGSRRWRCDAGDEHGCWLSSSAGGGGDDHFDRLPDPLLLVIFNRIGDVKALGRCSLVSRRFHDLVPLVDSVLVRVDCVIPDDPASSSSSSSSPSAAPSSPTASARARTVFSQIARIVLGGIVKPIQALGQILSPANSASVLAASVTSSPSSSSSSSSSSPPLPGDVSHHSPSEVLRSFKELRRLRIELPAGELSMEEGVLLKWKADFGSTLGSCVILGASSAGKDGGAGAAPAVDCGESDETGSIPESFYTNGGLKLRVVWTISSLIAASARHYLLQPIIADHTTLESLDLTDADGQGVLTMDKWQLQELRVKPVSASGGSHRTLMPALSMRLWYAPHIELPGGLVLNGATLVAIKPTEEATRDTVGSGIAGSAGGCWVSDAFEEPYRTAVGMLLKRRTYSLEMNSF

SEQ ID NO: 107497 - protein, 578 aa, Oryza sativa
  Clone ID: PAT_MRT4530_11843C.1.pep
MDLDKSTSNSASLKKMQEEGTLPGRGTMEREPGELFLDLFRFYYELRWMEPKKVSGCVGFRLRDGLKSRYIPFQCPSSRSKWWARWFYLQIEDSDPVFIVPEEQPDKIPSWTAKPALTPSLQSSIDIIDNLRVRGLSRYEVVADFIGRWIQPLQARAHLAFDYSGPEDATRVSPRDLNSATVEHRVAQVMINGPTMASNTPTPLCEKEAAEREAAINALPLIDIIGTLADHQAAASLMEGVAREASDTAIAAASATSSGGQVPKKGRKFSSVLSNRRKAPTRSASDASPPPPRRQRLVTLGDKAARAKAARDGSGGNSSTSPAVASTDVVVAPRSREGLKNRMSELENNPSEIRGSLRVTYTGLHQLAGECGVRTTIPANPDEFSLTSSLAELATVMEAIPSKHATRIGEETSNRIHIGACHVLACVRLAHPELDLQKILDQGAASDARKDVMEKSAIWGNPFSHFLKILESALADHDRRIQYWRMNFEVAELERTMLEVKRDRAVEALRGREVWFNSYLRSCCTTMAVVCRELRVPRGDPEESAAGYISWLNGACAQLEGIRKRIDAALKQECRRSS

SEQ ID NO: 107498 - protein, 159 aa, Oryza sativa
  Clone ID: PAT_MRT4530_11844C.1.pep
MDLDKSTSSRASLKKLQEEGALPGRGTMERETGGTEPEPVLGHMVVVEDYILCGFLPPPSEFFLLILNFYGLSLLHLNPNSIAFLSIFSHLCEAYIGVEPFLDLFRFYYELRWTEPKKIEDLDPVFIVPEEQPDKISSWTAKPALTPSLQSFIDIIDDL

SEQ ID NO: 107499 - protein, 792 aa, Oryza sativa
  Clone ID: PAT_MRT4530_11845C.1.pep
MQTLTRSPRFLLRRSPAAMDLDKSTSTSASLKKLQEEGALPSRGTMERELGGTEPEPVLGRMVAVEDYILCGFLPPPSEFFLLVLNFYGLSLLHLNPNSIAFLSIFSHLCEAYIGVEPFLDLFRFYYELHWMEPKKVSGYAGFRLRDGLKSRYIPFQCPSSHSKWRARWFYLQIEDSDPVFIVPEEQPDKIPSWTAKPALTPFLQSFIDIIDDLRVRGLSRYEVAADFIGRRIQPLQARAHPAFDYSGPEDATRVSPRGLNSATVEHRVGQVMVSGPTTASNVPTPLCEKGAAEREDAINALLLADIIGPLVDQAARAKATQDGSRGNSSASPAVASTDVVVVPRSREVTSSGPASDLVPARDPPAVVLTWEELQVKMGRILEAGARGISHEIAEARAAAASSANERADRLTRDLTEGLEHRMSELENNLSEIRGSLWVTYTGLHQLAGECGVTTTIPVNPDEFSLTTSLAELATVMEAIPSKHATKIREETSNGIYIGTCHVLACIRLAHLELDLQRILDQGTANDARKDVMEEVSDLGESILPLFEEDVDVEDVQQRGQPELPVIIPALALEPYVPQDDIDQNLPVETCMTTTPLDLESALADRDRHIQYWRTKFEVAELERTMLEVKKDRAVEALRGRKVWFNSYLRSCCTVMAVVCRELRVPRGDPEESAAGYISWLNGACAQLEGIGKRIDEALKQECRRSSRYAGGHVLVCIRDHRPQLYLEFLHEGFSHSRRTPAEIDNLAKLMAPLAEKVFQSMDWRWPSWYSFYICDKHLRKSVIYFGIFCRL

SEQ ID NO: 107500 - protein, 52 aa, Oryza sativa
  Clone ID: PAT_MRT4530_11846C.1.pep
LVYRLINVTLIMCTPRILCTTIFLKHSVRCTVKHSYRIIVNPHTDIHLLDRL

SEQ ID NO: 107501 - protein, 701 aa, Oryza sativa
  unsure (1)..(701): unsure at all Xaa locations
  Clone ID: PAT_MRT4530_11847C.1.pep
MEREPGGTEPEPVLGRMVAVEDYILCGFLPPPSEFFLLVLNFYGLSLLHLNPNSIAFLSIFSHLSEAYIRVEPFLDLFRFYYEFRWMEPKKVSGCVGFRFRDGLKSRYIPFQYLSSRSKWRARWFYLQIEDSDPVFIVLEEQPNKIPSWTAKPALTPSLQSFIDIIDDLQVMISGPTTASNVRTPLCEREAAEREAAINALPLTDIIRPLANHQAAASLKEGVAQEASDAAIAAAAAATTSGGKVTKKGRKFSSVLGNRRKTPTPSASDASSPPPRRQRLVTISEKAAWAKAAQDGSGGNSRASPAVASTEVVVVPRSREVTPSGPASDLAAGRGPPAAVLTWEELQVEMGRILEAGARGISREIAEARVAAASSANERADRLTRDLAEVREDLQKMRELVAGNERQRQGLEHRMSELEKNLSEIRGSLRVTYTGLHQLAGECGITTTIPANPDEFSLTTXAELATAMEAIPSKHVARIGEETSNGIYTGACHVLACXVDVEDVQQRGQPKLPVVILALALEPYVPQDDVFACRADLESALAYRDCRIQYWRMKFKVAELEGTMLEVKRDWAVEALRGREYYTVCPFDLSVTLRVRNRGEAYLDSQSNVVILEIGADELGAAIRYDAVRQSISAKYPLNEFDGFVGLDFPRGCCLDPFGEFVDCHEQEFVTALSSWEWTEYVEPPARERPSERDGLQCLRW

SEQ ID NO: 107502 - protein, 729 aa, Oryza sativa
  Clone ID: PAT_MRT4530_11848C.1.pep
MEFGGVLQLWNEWGVQMLVLASFALQVFLLIFGGIRRHSSSSVLMFFLWSAYLLADSTAIYTLGHLSVDGRSDEHELVAFWAPFLLLHLGGPDNITAYALEDNTLWLRHLQTLAVQVLGAVYVIYTYIVGSGTDLLMASVSMFIAGLLKYGERIWALKCGNISSIRSSISTRKFKTDPYELLALGTSEEELLLGAHSQFDICKGVFADIIMLPNPSLLSRSKRRSVISYLGMDLYKLVEMELSLMYDFLYTKAAVIHTWYGFCIHFVSLFGTATTFLLFQLIISSSRGDGYSREDVVISYVLLVGALVLEIISVCRAVLSTWTCSLMHRRGRAWEWPLHIITSFSRRVHPASRRLWSGSIGQYNLFHLCARNTNEIGSRLATRLGLQDWWNMMHFSGTFSNTGSFSIQDLKKLVLQALEEKERALQYKDTDLNSRGSFILKSMKAYDDFARWSVNIDFDESILVWHIATELYIRRSKARHAKELVEATEVLSNYMMFLLVVKPNMLPGAARHNIHLPSCEQIEGHCRMGFGGEKDNPVAASPISWNPYCMLKELLHHDGPSCSSIPRREKLAEIVWSFCQFALGSVKAPNPHGESIRDSANMYSVLLANELLGIESRWCEQRDTLELILGVWVEMLLYAANHCSQESHARQLSNGCEFITIVSLLAHHFKYYSGASRGADELYESNPSMRTVAGYECYVGGRGFGNLEDRRPVVTIDVLRKEEMRKQRM

SEQ ID NO: 107503 - protein, 799 aa, Oryza sativa
  unsure (1)..(799): unsure at all Xaa locations
  Clone ID: PAT_MRT4530_11849C.1.pep
CASSSASLKKLQEEGALLGRRTMEREPGGTEPEPVLGRMVAVEDYILCGFLPPPSEFFLLVLNFYGLSLLHLNPNSIAFLSIFSHLCEAYIGVEPFLDLFRFYYELRWMEPKKVSGCVGFXLRDGLKSRYIPFQCPSSRSKWRARWFYLQIEDSDPVFIVPEEQPDMIPSWTTKPALTPSLQSFIDIIDDLRVRGLSGYEVAADFIGRRIQPLQAXAYPAFDYSGPEDATRVSPRGLNSAIVERRVAXVMISDPTMVSNAPTPLCEKEAAEREATINVADSLKEGVAQEASDAAIAVAAATSSGGKVPRKGRKFSSVLGNRRKAPTPSASDASPPPPXTXRLVTLGEKAARAKVAQKGSGGNSSASPAVASSDVVVVPRSREVMPSGPASDLAPGRGLPTAVLTWEVLQVETRRLLEAGARGISREIAEARAAAASSTNERDDKLARDLAEVCEDLQKMRELVAGNERQRQGLENRMSELENNLSEIRGSLRVTYTGLHQLARECGAKTTIPANPDEFSLTSSLAELATAMEAIPSKHAARIGEETSNGINTGACHVLACVRLAHPELDLQKILDQGAASDARKDVMEEVGDLGEDVDVEDIQQRGQPELPVIAPVLALEPYAPQDVLSEKESSLTWLFACRADLESSLVDHDRRIQYXRTKFEVAKLERAMLEVKKDRAVEALRGXRVCRELRVPRGNPEESSAGYISWLNGACAQLEGIGKHIDEALKQECRRSSWFAEGHVLACIRDHRPQLHLEFFHEGFSRSRRTPAEVDNLAKSMAPLAEKVFQSMDWRWPSW

SEQ ID NO: 107504 - protein, 61 aa, Oryza sativa
  unsure (1)..(61): unsure at all Xaa locations
  Clone ID: PAT_MRT4530_1184C.1.pep
LIKHXKAXPQTFXRTYIYIYIYIYIYIYIYISSSSHTLLVLFTEPSESVVPAPIYRXRRLG

SEQ ID NO: 107505 - protein, 321 aa, Oryza sativa
  Clone ID: PAT_MRT4530_11850C.1.pep
MDLDKSTSSRASLKKLQEESALPGRGTMERATGGTEPEPVLGHMIVIEDYILCGFLPPPSEFFLLILNFYGLSLLHLNPNSIALLSIFSHLCEADIGVELFLDLFRFYYELHWMEPKKVSGCVGFRLRDGLKSRYIPFQCPSSCSKWRGRWFYLQIEDSDPVFIVPEEQPDKISSWTAKPALIPSLQSFIDIIVDLRVRGLSGYEVAVDFIGRRIQPLQAGAHPAFDYSGLEDASRISSRGLSGATVEHRVAQALPLTDVIGPLVDHQTVALLKEDVAREASDAAVATAAATTSGGKVPKTGRKFSSVLGNHRKMPTPSDL

SEQ ID NO: 107506 - protein, 693 aa, Oryza sativa
  unsure (1)..(693): unsure at all Xaa locations
  Clone ID: PAT_MRT4530_11851C.1.pep
MNLDKSTSTSASLKKLQEEGALPGRGTMEREPGANGGRGGSEEQPDKIPSWTAKPALTLSLQSFIDIIDDLRVRGLLEYEVAADFIGRRIQLLQARAHPAFDYSGPEDTTRVSPQGLNSATVERRVAQVMISGPTTVSNAPIPLCEKEAAEREAAINALPMTDIIGPLADHQTAASLKEGIAQEASDAAIAATAATTSGGKSENVALISYSVYXASDASPPPPRRQRLVTLGEKAARAKAAQDGSXGNSSVSPAVASTDVVVVPRSREVTPSGPASDLAPGRGPPAAVLTWGELQVEMGRILEAGARGISCEIAEARAAAAASANERADKLARDLAEVREDLQKMRELVAGNERQWQGLENCMSELENNPSEIRGLLRVTYTGLHQLARECSVKITIPANPDEFSLTSSLAELAAAMEVIPSKHAAGIGEETSNGIYTGACHVLACVRLAHPELDLQKILDQGAASDARNDVMEEVGDLGESVLPLFEEDVDVEDIQQRGQPELPVIAPVLALEPYAPQDDVDQDMAMTPLDLESALADHDRRVQYWRTKFGVAELERTMLEVKRDRGMETLRGREVWFNSYLRSFCTAMVVVCRELRIPRGDPKESAAGYISWLNGACAQLEGIGKRINEALKQECRRSSRYAGGHVLACIRDHRPQLHLEFLHEGFSRSRRTPAEIDNLAKSMAPLAEKIF

SEQ ID NO: 107507 - protein, 64 aa, Oryza sativa
  unsure (1)..(64): unsure at all Xaa locations
  Clone ID: PAT_MRT4530_11852C.1.pep
MSISEDACTLADLMLHDDGIPITSEEIDTLVKADIIKVEAYXPDLFAKLIEHRNVDDLILYGGS

SEQ ID NO: 107508 - protein, 134 aa, Oryza sativa
  Clone ID: PAT_MRT4530_11853C.1.pep
MAAMCCTRARARVRACMRAQRAGRRTAREPARGSFCRGGRGREREGRGPIGPGPHGVVATGKRSRGPRAFGVGFARASGRGRRTSERAVRGVPALVGEVAGLGARRCVVWCDAVCGTVWVWPPVRVRWPRGFIR

SEQ ID NO: 107509 - protein, 247 aa, Oryza sativa
  Clone ID: PAT_MRT4530_11854C.1.pep
MDLDKSTSTSASLKKLQEEGALPGRGTMEREPGGIEPEPVLGRMVAVEDYILCGFLPPPSEFFLLVLNFYGLSLLHLNPNSMAFLSIFSHLCEVYIGVELFLDLFRFYYELRWMERKNVSGCVSFRLRDGLKSRYIPFKCPSSRSKWRARWFYLQIENLDPIFVVPEEQLDKIPFWTAKPALTPSLHEWWAFIGERGDKGGEGSEGGDATVARRRGARGGDGTRARRRNGDSDGAAAAARGARRRWN

SEQ ID NO: 107510 - protein, 1676 aa, Oryza sativa
  Clone ID: PAT_MRT4530_11855C.1.pep
MVWLNRVIRVLQTTSKKIKVMALKEYRASALKKFKVMVLIKVALRHNYSLTTSRISPAIADSANTTEAAGCADDSANTTETTDVMKEQFGLRPKDAGNLYRQPYPKWFERVPLPNRFKVPDFSKFSGQDSTSTYEHISRFLAQCGEAPAVDALRVRLFRLSLSGSSFTWFSSLPYGSINSGADLEKHFHSYFYSGVHEMKLSDLTAIKERHDEPVHEYIQRFREMRNKCYSLSLTDAQLADLAFQGMIAPIREKFSSEDFDSLSHLTQKVTLHEQRFAEARKNSRKVNHVCPYIYGSDGEDEDDSEIAAAEWVRSKKVVPCQWVKSSGKEERYDFDITKANKIFDLLLREKQIQLSAGHTIPSAEELGKRRYCKWHNSGSHSTNDCKVFRQQIQVAIEGGKIKFDDSKRLMKVDGNPFPVNMKKYDKQQERRYEEDDGGLILIAAASSLDSAGMRNQKRRVQRLRNMERFQEVEQEINHRQKKTKPKQEWRVKNQVPTADVAAADEAKRLAKRKSVVTASVNMVFMLPAEFGVKRADVDEVEEESARLILSPEQAVFEKPEGTENRHLKPLYVNGYVNGKPMSKMMVDDGAAVNLMPYATFRKLGRNAEDLIKTNMVLKDFGGNPSETKGVLNVELTVGSKTIPTTFFVIDGKGSYSLLLGRDWIHANCCIPSTMHQCLIQWQGDKIEIVPADSQLKMESPNCYFEGVVEGSGVYAKDTMDDLDDKQGQGFMLPDDLEEIDIGPGDRPRPTYISKNLSPEFRTKLIELLKEYRDCFAWEYYEMPGLSQSNVEHRLPIKLGVRPHQQPPRRCKADMLEPVKAEIKHLYDAGFIRPCRYAEWVSSIVPVINKNGKIRVCIDFRDLNKATPKEEFLMPVADQLVDAASGHKILSFMDGNTGYNQIFMAEEDIHKTSFRCPGAIGLFDWVVMTFGLKSAGATYQRAMNYIYHDLIGWLVEVYIDDVVVKSKEIDDHIADLRKVFERTRKYGLKMNPTKCAFGVSAGQFLGFLVHERGIEITQRSVNAIQKIRPPGNKIELQEMIGKINFVRRFISNLSGRLRHYLLSNECTVICKADVVKYMLSAPILKGRVGKWIFSLTKFDLPYESLKAVKGQALADFIVDHRDDSIGSVEIVPWTLFFDGSVCTHGCGIGLVIISPRGASFEFAYTIKPYATNNQAEYEAVLKGLQLLKEVEADAIEIMGDSLLVISQLAGEYECKNDTLVIYNEKCQELMKEFWLVTLKHISREQNIEANDLAQGASGYKPMMKDVKVEVAAITADDWRYDVHQYLQNPSQSASRKLRYKALRYTLLDDELYYRTIDGVLLKCLSTDQAKVVIGEVQEGICGTHQSAHKMKWLLRRAGYFWPTMLEDCFKYYKGCQDCQKFGAIQRAPASAMNPIIKPLPFRGWGIDMIGMINPPSSKGHKFILVATDYFTKWVEAIPLKKVDSGDAIQFVQEHIIYRFVIPQTITTDQGSIFVSDEFVQFADSMGIKLLNCSPYYAQANGKISDYPRQWHTRLAEALWSYRMACHGSIQVPPYKLVFGHEAVLPWEVRIGSRRTDLQNDLTADEYYNLMDDEREDFVQSRLRALAKVIKDKERVARHYNKKVVPKSFSEGELVWKLILPIGARDSKFGNWSPNWEGPFQIYKVVSKIAYMLLGLDREVYGRALNGKYLKKYYPSV

SEQ ID NO: 107511 - protein, 141 aa, Oryza sativa
  unsure (1)..(141): unsure at all Xaa locations
  Clone ID: PAT_MRT4530_11856C.1.pep
FFFFFFFLAQNAIHFLFQFDYKHLFSVLKRTDTSKKGFFHTGKRHLPHEREGLQKSPFSHAAGPTACMRLLIPAACENKFSKQKKIKIQNIPNPSPPPHGAGFIAXAARRRRIRRHAARRRRRHRIHHSRRPPSSPALDPS

SEQ ID NO: 107512 - protein, 810 aa, Oryza sativa
  Clone ID: PAT_MRT4530_11857C.1.pep
MDLDKSTSTSASLKKLQEEGALPGRGTMEREPGGTEPEPILGRMVAVEDYILCGFLPPPSELFLLVLNFYGLSLLHLNPNSIAFLSIFSHLCEAYIGVEPFPDLFRFYYELRWMEPKKVSGCVGFRLRDGLKSRYIPFQCPSSRSKWRARWFYLQIENSDPVFIVPEEQPDKILSWTAKPALTPSLQSFIDIIDDLRVRGLSGYDVAADFIGLNSETVERCVGQVMALPLTDVIEPLVDHQAAASLKEGVALEASDVAIAAVAATTSGGNVPRKGRKFSSVLGNRQKTPTPSVSLFGYRLRSQKMSPSHRTRFTSASNASPPPPRRQRLVTLGEKAARAKAAQDGSRGNSSASPAVASTDDVVVPRSREVTPSGPASDLVPARGPPADVLTWEELQVEMGRILEAGAHGISREIAEARAAAASSANERADKLARDLAEVREDLQKMRELVAGNERQRQGLENRMSELENNLSEIRGSLRVNYTGLHQLAKECGVTTTIPANPDEFSLTSSLAELVMAMEAIPSKHAARIGEETSNGIHIGACHVLTCVRLVHPKLDLQKILDQGAANDARKDVMEEVGDLGESVLPLFKEDVDVEDVQQRGQPELPVIAPALALELYVPQDGVDQDLPVETGMATTSLDLESALADRDRHIQYWRTKFEVAELERTMLEVKRDRAVEALRGREVWFNSYLRSCCTAMAGVCKELRVPCEDPEESVAGYISWLNGANAQLEGIDKRINEVLKQECRRSSRYAGGHVLACIRDHHPQLRLEFLHEGFARSWRTDAEIDQLAKSMAPLAEKVFQSMDWRWPSW

SEQ ID NO: 107513 - protein, 1534 aa, Oryza sativa
  unsure (1)..(1534): unsure at all Xaa locations
  Clone ID: PAT_MRT4530_11858C.1.pep
MVWLNRVIRVLQTTSKKIKVMALKEYRASALKKFKVMVLIKVALRHNYSLTTSRISPAIADSANTTEAAGCADDSANTTETTDVMKEQFGLRPKDAGNLYRQPYPKWFERVPLPNRFKVPDFSKFSGXYGVHEMKLSDLTAIKERHDEPVHEYIQRFREMRNKCYSLSLTDAQLADLAFQGMIAPIREKFSSEDFDSLSHLTQKVTLHEQRFAEARKNSRKVNHVCPYIYGSDGEDEDDSEIAAAEWVRSKKVVPCQWVKSSGKEERYDFDITKXLTRSLICYFGRNRFNFLLVIQFXSAEELGKRRFCWNEGMRLPSIEDCLGCGNIAESPSRSHNKGDRPRQTRVPVHQRLGPVNRDYNQEDNEDRKIQWCPSGIFTKNQKRRVQRLRNMERFQEVEQEINHRQKKTKPKQEWRVKNQVPTADVAAADEAKRLAKRKSVVTASVNMVFMLPAEFGVKRADVDEVEEESARLILSPEQAVFEKPEGTENRHLKPLYVNGYVNGKPMSKMMVDDGAAVNLMPYATFRKLGRNAEDLIKTNMVLKDFGGNPSETKGVLNVELTVGSKTIPTTFFVIDGKGSYSLLLGRDWIHANCCIPSTMHQCLIQWQGDKIEIVPADSQLKMESPNCYFEGVVEGSGVYAKDTMDDLDDKQGQGFMLPDDLEEIDIGPGDRPRPTYISKNLSPEFRTKLIELLKEYRDCFAWEYYEMPGLSQSNVEHRLPIKLGVRPHQQPPRRCKADMLEPVKAEIKHLYDAGFIRPCRYAEWVSSIVPVINKNGKIRVCIDFRDLNKATPKEEFLMPVADQLVDAASGHKILSFMDGNTGYNQIFMAEEDIHKTSFRCPGAIGLFDWVVMTFGLKSAGATYQRAMNYIYHDLIGWLVEVYIDDVVVKSKEIDDHIADLRKVFERTRKYGLKMNPTKCAFGVSAGQFLGFLVHERGIEITQRSVNAIQKIRPPGNKIELQEMIGKINFVRRFISNLSGRLRHYLLSNECTVICKADVVKYMLSAPILKGRVGKWIFSLTKFDLPYESLKAVKGQALADFIVDHRDDSIGSVEIVPWTLFFDGSVCTHGCGIGLVIISPRGASFEFAYTIKPYATNNQAEYEAVLKGLQLLKEVEADAIEIMGDSLLVISQLAGEYECKNDTLVIYNEKCQELMKEFWLVTLKHISREQNIEANDLAQGASGYKPMMKDVKVEVAAITADDWRYDVHQYLQNPSQSASRKLRYKALRYTLLDDELYYRTIDGVLLKCLSTDQAKVVIGEVQEGICGTHQSAHKMKWLLRRAGYFWPTMLEDCFKYYKGCQDCQKFGAIQRAPASAMNPIIKPLPFRGSIFVSDEFVQFADSMGIKLLNCSPYYAQANGKISDYPRQWHTRLAEALWSYRMACHGSIQVPPYKLVFGHEAVLPWEVRIGSRRTDLQNDLTADEYYNLMDDEREDFVQSRLRALAKVIKDKERVARHYNKKVVPKSFSEGELVWKLILPIGARDSKFGNWSPNWEGPFQIYKVVSKIAYMLLGLDREVYGRALNGKYLKKYYPSV

SEQ ID NO: 107514 - protein, 274 aa, Oryza sativa
  Clone ID: PAT_MRT4530_11859C.1.pep
MMQLRHYLLSNECIVICKADVVKYMLSAPILKGRIGKWIFSLTEFDLRYESPKAVKGQAIADFIVEHRDDSIGSVEIVSWTLFFDGSVYTHGCGIGLVIISPRGASFEFAYTIKPYATNNQAEYEVVLKGLQLLMEVEADAIEIVGDSLLVISQLAGEYEYKNDTLMVYNEKCQELMKNLWLVTLKHVSREQNIEANDLAQGASGYKLMIKDVKVEVAAITTDDWRYDVHQYLQNPSQPASRKLRYKALKYTLLDDELYYRTIDAVLLKCFSAN

SEQ ID NO: 107515 - protein, 58 aa, Oryza sativa
  unsure (1)..(58): unsure at all Xaa locations
  Clone ID: PAT_MRT4530_1185C.1.pep
YHLKFTHVNIQMIPEAYILHFTNYNIVKITVQXHQPRAGRCYXGATGTRGGDPGNWRS

SEQ ID NO: 107516 - protein, 58 aa, Oryza sativa
  Clone ID: PAT_MRT4530_11860C.1.pep
MDKTKIGLNGFVRMGRLLPRGVLQSEDGQLPAVKDTFITTEHMTYMYKHDTSHCQWKL

SEQ ID NO: 107517 - protein, 82 aa, Oryza sativa
  unsure (1)..(82): unsure at all Xaa locations
  Clone ID: PAT_MRT4530_11861C.1.pep
VPSAQLAPMATSXSPRLLSSFXGDRLLSASARXLXRGAXXGRRRAXYQATRTXXNLVDIXFXRGXXXKPEDNPRXLXSXKVS

SEQ ID NO: 107518 - protein, 49 aa, Oryza sativa
  unsure (1)..(49): unsure at all Xaa locations
  Clone ID: PAT_MRT4530_11862C.1.pep
VRAREXDDGPSTETARVGVCMRMRWNGGGDGREGGRGKQMVVVLTSPTT

SEQ ID NO: 107519 - protein, 121 aa, Oryza sativa
  Clone ID: PAT_MRT4530_11863C.1.pep
KSLGLEAVEKKDYLSAAGFYSEAMDLDPDDATLLSNRSLCWLYLGEGGKALVDAHECRKMRPDWPKACYRQGAALMLLKDYVSACEALFDGFKLDPEDVEIENALREALEFLKVSQSTSAN

SEQ ID NO: 107520 - protein, 233 aa, Oryza sativa
  Clone ID: PAT_MRT4530_11864C.1.pep
MVAGALGYMARAADGGRAAELVTRDFLGGCVAADDARDAAAAAAATARHDSVSGKLSLQKQTCPATPTDLNLFPVPGAAASAAKPCPSSTAAAASGAGGTTTTTTTYHSVCTIEKVKTALERFERGKHQHHQHQQHSAGASPSSSSVTTSSVKRRGGGGVGDGAVEQGDGCDSPSAAGGGGMVAAACPRCFLYVLISRSDPRCPRCESHVPPPPSPAPKKKPRIDLNVGFLGT

SEQ ID NO: 107521 - protein, 470 aa, Oryza sativa
  Clone ID: PAT_MRT4530_11865C.1.pep
MAEPPATKVYHDGCPGCAMERRKEEHKGIPYREFLFVAITTLASSLPISSLFPFLYFMIRDLHVARTEEDIGFYAGFLGASYMIGRGFASILWGMVADRIGRKPVIIFSIFAVIVLNTLFGLSVKYWMAVTTRFLLGALNGLLAPIKAYSIEVCRAEHQPLGLSIVSTAWGIGLVVGPATGGYLAQPVKQYPHIFHEKSIFGRFPYLLPCLCISLFALLVLLSCIWLPETLHKHKGLEVGVETAEASTTQESAESHQKSLFRNWPLMSSIVTYCVFSLHDTAYSEIFSLWTVSDRKYGGLSFSSKDVGQVLAVAGASLLVYQLFIYGWVDKILGPIHSTRISAALSIPIIAAYPFMTHLSGIRLGVALYSAAMIKSVLAITIITGTSLLQNKAVPQGQRGAANGIATTAMSLFKAIAPAGAGVIFSWAQKRQHVAFFPGDQMVFLLLNLTEVIGLMLTFKPFLAVPQQYK

SEQ ID NO: 107522 - protein, 401 aa, Oryza sativa
  Clone ID: PAT_MRT4530_11866C.1.pep
MVGRSFAAIFWGVVADRIGRKPVIVFSILSVVIFNTLFGLSTKYWMALTTRFVLGALNGLLAPIKAYSIEVCQTEHQALGLSIVNTAWGLGLVVGPALGGYLAQPVEKYPHVFSKESVFGRFPYLLPCLGVSLFAAIVLISCIWLPETLHKHKGLEVGVETAEASTTQESAESHQKSLFRNWPLMSSIVTYCVFSLHDTAYSEIFSLWTVSDRKYGGLSFSSKDVGQVLAVAGASLLVYQLFIYGWVDKILGPIHSTRISAALSVPIIAAYPFMTHLSGIRLGVALYSAAMIKSVLAITIITGTSLLQNKAVPQGQRGAANGIATTAMSLFKAIAPAGAGVIFSWAQKRQHVAFFPGDQMVFLLLNLTEVIGLMLTFKPFYGRRMTKHGRFQFCQLVWQTP

SEQ ID NO: 107523 - protein, 130 aa, Oryza sativa
  Clone ID: PAT_MRT4530_11867C.1.pep
SDSLASRILKVLNQQFCCNGPFVQVPGLGQVMQLQGDRRKIDSRFGVQMGLLKKLHPWIHGLSATARLLGKTMVSGAVCLVVHKLACSIVHTYPSSRVTLMGMLGKGVLKFVRGLFVIYCGLGTALFDVE

SEQ ID NO: 107524 - protein, 933 aa, Oryza sativa
  unsure (1)..(933): unsure at all Xaa locations
  Clone ID: PAT_MRT4530_11868C.1.pep
MHLLCCFSSLLPHRACWPVSHDYSRIVQPDAQARDGAQRGSGLQSWGDRHIGSVRLHLQMAKELVFRLDVTQENRSLSPLATXLWRDLKLKRLGLASLERTIACQRSFLIWLKEGDANTKFFHYHARAXRRKNFITHLXDGDQLIVSHDESFXELVSTHFGSILGTCVELDLALDLHSLGLSPMQLGGLDDPFSEEEVWAVIKSLPSDKAPGLDGFTGRLYKTCWSVIKSEFLAALNSLFLTKGRGFASLNDALISLLPKKDVVVDVKDFXPISLIHSFGKLFSKILASRLSLHLDGLMAANQSAFVKGRSLHDNFRYDQLAARALHARRTLRLLLKVDIAKAFDTVSWPFLLQVLAHLGFSXRWRDWISLILSASSSRVLINGVPGPRFPHRMGLRQGDPLSPILFILVMDVLNVMLCKASDSGGFLQLNDRALRPHASLYADDLVLFLSPVRQDLGFIQCILSVFGAAFGLRTNFAKCSITSIRCSAEDLELVXSCFPCTISDFACTYLDIPLSVRKLPKVALQPLVDKVSHRLPXWKGRLTTLAGRSVLVQSVLSSIPVHVSMAIGLPVWVIKAINKKRRAFLWTGTDSAHGGQCRVSWTNVCRPKAFGGLGIPDLRMAGFALRVCWLRLQRSGHPYXDGLKAPVERTVSDMFEASTFFVLGDGESMLFWSDRWIGGXLAPDLLFVVPQRLRSSHTVASGLVNNSWVSDIGGALIVLVISQFLLAWDAVLHNRLSPGVEDRLVWCWTSNQCCTVRSAYQAFFYGQHSFACADLLWHVKGPAKCKLFLWFAFXQRCWTADLLXKRGIDSNSACPFCAQELETAKHILLDCVFARQVWLCVLXLLVGLPFLLPVETGSXDWWPSSRACLPTHLRADFDSQVLLVSWQLWKKHNSRVFDSALSSVLVVLESILSEGRLWSLAGVASFGDFLRV

SEQ ID NO: 107525 - protein, 65 aa, Oryza sativa
  Clone ID: PAT_MRT4530_11869C.1.pep
MEEQSVEPPRALRQNTRPIDAGANSKLQGVVARLRECPVSQAGESPAVSGWIQGNPLISDSSHAY

SEQ ID NO: 107526 - protein, 374 aa, Oryza sativa
  Clone ID: PAT_MRT4530_1186C.1.pep
MYSITAAPATVSHLVRIDGYSRTKNLRRGRFIEAMNFTVGGHRWFIRFYPNGHGPRDVGVVSVYVGIAGAYRRGGGDAKPVIADARFSLVDRDGRPAPPSFVQGMPAVDFSGNDFGMNIKRAELETSGFLKDDGFLVRCELGFVNSAGDGDGRRGVQIKEGIKVPPPNLHRHLADLLWKNQSSGDVFIEVQGKTFTAHRWMLAARSPVMAAELSSSDSDDAAYTDADATKNTMMTLRVDDDMDAETFRALLHFIYTDALPPPPQPRARDTKEKEDEAAAAEAARRLHAAAARYGMERLQLMCEDALCRSLSVLTVASTLVFAEKHGCRVLKAACLDFLSCKRKLRQVTRLDDDFRLLTTTCPSVIKELFAQVLK

SEQ ID NO: 107527 - protein, 217 aa, Oryza sativa
  Clone ID: PAT_MRT4530_11870C.1.pep
MAKVRGKAGAGAGAAAAAATRTKWRSGAQERIYGRRLLDALRATRDGAAGGGGGAPPQPRAVKAAADSALALTARGQSRWSRAILLAGAASSRRRVLVKAGGKIRRGGGGNSCRRPQARAAAAAAAKAAAAASSAGEPPMLKERKVKERLRVLGRLVPGCRKLPAPALLEETADYVAALEMQVKAMRALADALAAAQLSSSTPQQAEAAADETEMER

SEQ ID NO: 107528 - protein, 114 aa, Oryza sativa
  Clone ID: PAT_MRT4530_11871C.1.pep
MALEVVAVGWAIRTIGWIVSPMTTKAVNKGIDLLNCDQEAQLRNLVACLEPQLRRQMEHMTSMPYLDKWVQSLRSAFYDAEDIVDIHDYLNLALHMQLCRFGCKPNQVTFFSPF

SEQ ID NO: 107529 - protein, 109 aa, Oryza sativa
  unsure (1)..(109): unsure at all Xaa locations
  Clone ID: PAT_MRT4530_11872C.1.pep
LKVAQSRQKSYADNRRRNQLELPASLGNVHDVFHVSQLEKCLRVPSEXADSEQIEVREDLTYVERPVKILDTMERRTRNRVIRFCKVQWRNHAEEEATWEREDELKAAH

SEQ ID NO: 107530 - protein, 297 aa, Oryza sativa
  Clone ID: PAT_MRT4530_11873C.1.pep
MGDVRRRDSAGGVRAASTGLACGGAGGTSVMPTESGIRGYPTRWARAWAHSFVREHAQPVIRELSGHNRASYFTRGGLRVVGAAHWRGLRIAGATNGRERRRRRTCAREGASGGARRQARPLCVSVLVACSSYARSEIDIMWYLVDTHQACPYPSGMGFCSKDLAAWVGRGRVGLGGRGRRGRPQRQRSERTGDGGRGGGVDPKVLRSLPVTVYSRNTVAAAAKEEEDDGVECAVCLAELEEGDEREHDIVAVRRALEPALALRRGELRVHLQRHPRHFRPRAAAACSTSVAAAAAA

SEQ ID NO: 107531 - protein, 231 aa, Oryza sativa
  unsure (1)..(231): unsure at all Xaa locations
  Clone ID: PAT_MRT4530_11874C.1.pep
PLXSPXGXKKRAPXSRXKKFFPQPXXKRXGKXXRGXXGGLIPXGGGEKKXPXTPFXGAKPKGGERGFXKGRFYFFXSPPKLGKKXXGGGPGXIXXXFFFFXXKXKXPRPKKGQGQPGGXNXGGXQIFSKKXRFFFSKPIXXGGGKGQVXXXGNXXFFXFXGGGXXGIAPXQXISGGPKVFFKGFXPQKIFLFGGQXGXESPSCFPPXXGGRNGKRFPANRXFFGGXRGRGC

SEQ ID NO: 107532 - protein, 84 aa, Oryza sativa
  unsure (1)..(84): unsure at all Xaa locations
  Clone ID: PAT_MRT4530_11875C.1.pep
SLVAFLGSRVSLTSAASSLVITSHLRSPDLPKDHDYGLEPTIPTVGRANLLRPHMXLLSGTSAATTLSRILQISITLAAARACI

SEQ ID NO: 107533 - protein, 30 aa, Oryza sativa
  Clone ID: PAT_MRT4530_11876C.1.pep
GFDLHILVHLLLIHIHISQDQADRASRHWS

SEQ ID NO: 107534 - protein, 764 aa, Oryza sativa
  Clone ID: PAT_MRT4530_11877C.1.pep
MAAVANQQARELGPIDQWRGAGGGGGKACFGGVVEGRQGMMVSSTQQQQLQLQRKGKAVAEKGGAAGAAAAEKVVVAVRAATREISKTALMWALTHVVQPGGSILLLVVVPSHSSGRKFWGFPLFAGDCASGNKTMLDQKDISELSSQMMDKLKNVYDPNKINVKTKVVSGSPPGVVAAESKRAQASWVVIDKELKHEEKHCVEELQCNIVVMKRSQPKVVRLNLVGSPDKDSKVSCSLPPMLDSSVGKTTTDVKEPRTSIRGPAVTPNSSPDLETTFESTEAGTSSVSSSDPGTSPYSASDTNGSMKKEAPATKDRVQHLDINISDSDSETLSPPASFSLQPWMVDILQGSASSRTHGKGPRKARTATADALLENISKLDLLNEISSMRSRSDLNFRGNVRDAVSLARSAPPGPPPLCSICQHKAPVFGKPPRWFTYAELELATGGFSQANFLAEGGFGSVHRGVLHDGQAIAVKQHKLASSQGDVEFCSEVEVLSCAQHRNVVMLIGLCVEDRRRLLVYEYICNGSLDSHLYGRNKETLQWSARQKIAVGAARGLRYLHEECRVGCIIHRDMRPNNILVTHDYEPLVGDFGLARWQPDGDMGVDTRVIGTFGYLAPEYAQSGQITEKADVYSFGVVLVELVTGRKAVDINRPKGQQFLTEWARPFLEEYAIDELIDPRLGDRYCENEVLRILEGDMVVDSGSVSAPSSDSGSRSWRMLNEQQNCRDWSPARQDSHRVVEGKNSYDALRAAWDRNKQSVSHRY

SEQ ID NO: 107535 - protein, 86 aa, Oryza sativa
  unsure (1)..(86): unsure at all Xaa locations
  Clone ID: PAT_MRT4530_11878C.1.pep
IYVVCLMLRRPPPLPNPCRGWPPPPDPGARGPVEVAPRRRARSPPPRLVDXRKSREERSESRERRGEEVREIEGRKVKIKRKRDEV

SEQ ID NO: 107536 - protein, 123 aa, Oryza sativa
  Clone ID: PAT_MRT4530_11879C.1.pep
MDPLNDGSKFPTPITPSLLKNDGSKFPESRNPKQCNIIQDRAVAGSAPASGCVEIERSAGSSPSSSRHSTPRHMVGFRNSLFGILSSSQVNGMANLQNTTFGVPNIQFFSYNFIGHDAVLVSA

SEQ ID NO: 107537 - protein, 672 aa, Oryza sativa
  Clone ID: PAT_MRT4530_1187C.1.pep
MDAKLLLLPFPSPPATLHHHPPPPKSLFLGASLPLLHPPPPLRLLRPGAPRRLAVVAQAAVKRRKEIPFDNVIQRDKKLKLVLKLRNILVSNPDRVMSLRDLGRFRRDLGLTRKRRLIALLKRFPGVFEVVEEGVYSLRFRLTPAAERLYLDELHLKNESEGLAVTKLRKLLMMSQDKRILIEKIAHLKNDLGLPPEFRDTICLRYPQYFRVVQMDRGPGLELTHWDPELAVSAAEVAEEENRAREEQERNLIIDRPLKFNRVKLPQGLKLSRGEARRVAQFKEMPYISPYSDFSHLRSGSAEKEKHACGVVHEILSLTLEKRTLVDHLTHFREEFRFSQSLRGMLIRHPDMFYVSLKGDRDSVFLREAYKNSQLVEKSKLVLLKEKMRALVAVPRFPRRGVPATSEEADRTNGAAQMLSEGSDVEDDEDEGLSDMEDLISEISGGKSDTDYHWGDGWVGENDDSPPDFEDDDGSSLKEVKVTMKKTANSANGKAHVPVFPDGRPRERCYFIISRKSQNPQSFESQEGSGWNTRFIDYYFVVDDDDDEILSSVILHGLMAYFRSFVDFAGSHTDSTKLTVVKAPRRIKRELYCLGTCTSLHIARPEWAHQGSLLEWIKSAHANLALPQRSNSAILQLTTRVVSATRGIMLGRKLIHAELFDGDDAGPGAAYR

SEQ ID NO: 107538 - protein, 373 aa, Oryza sativa
  Clone ID: PAT_MRT4530_11880C.1.pep
LTQPKPNTSRTRRSAPSLSVARDAAKPRAPPPPPPPPPEMDGSGSWDAIDWNQIKEPRPPRSSSRGMEDFLLEDEEVYAQGHGVVLLNTDEAGILSVTNFRLLFVSQATKGVIELGTIPLTAIEKINDDVKLQPLPRQHDKKQPRELLQVIGKDMRVIVFDFLPKTKQKNEVFDALRRYSKPTHLWDLYAFSCDPSTVYQKSDPKMRLLKEYHRLFRKWFPHSGSEFEKDLRNEWWRSYAPYILERLMTVGEWSGAVLARSSQPLVGLMMNFRNNTDEKLVFALCTQIIDATGSLRKLYIVDARPRANALANGAKGGGSESASNYPRSEVLFLGIQNIHTMRDSLFRLRDYVDTHGSVSSNGTSSAVSLVGDR

SEQ ID NO: 107539 - protein, 57 aa, Oryza sativa
  Clone ID: PAT_MRT4530_11881C.1.pep
FFFFFFFFFFFFFFFFFFFFFPTQAKNAFCPGGQKGKHVFYAGTSQIKQGLQNGGGE

SEQ ID NO: 107540 - protein, 59 aa, Oryza sativa
  unsure (1)..(59): unsure at all Xaa locations
  Clone ID: PAT_MRT4530_11882C.1.pep
KLTFDPKKKLEGGPGPNSPYSESYYNSLAAFYNVXDWXNPGVTQLNRLASXSPFSSWRN

SEQ ID NO: 107541 - protein, 58 aa, Oryza sativa
  Clone ID: PAT_MRT4530_11883C.1.pep
MDQDGAREFTLASPCPVGGGQSLASPSPPSLQSSSSLGKAVVGFAKPSPTSSAPPSSL

SEQ ID NO: 107542 - protein, 104 aa, Oryza sativa
  Clone ID: PAT_MRT4530_11884C.1.pep
MERVAKLSTEKAVVIFTASNCPMCHTVVSLFSDLGVGAAVHELDRDPLHGRDMERDLARRLGRSPPVPAVFIAGKLVGSTDRVMSLHLAGKLVPMLKAAGAIWL

SEQ ID NO: 107543 - protein, 97 aa, Oryza sativa
  unsure (1)..(97): unsure at all Xaa locations
  Clone ID: PAT_MRT4530_11885C.1.pep
LAKLLLRLAKCSQPPLLAKGRSHHHSHPHPSSFSXPSRLTHEPSPPSPLRXGEPPPPLPXAHEPSPPSPRRWIDAATREKRKGKRKRKRRKKKGMEI

SEQ ID NO: 107544 - protein, 233 aa, Oryza sativa
  Clone ID: PAT_MRT4530_11886C.1.pep
MATQMCRDFKSTCPGTPATSGLATGGRSMLDRHRFALGRVVALPPSWVAAAPLKAAPSLHHEAGPPHASGSPSRHAVAQPQRRAATPFEAALSLHHEVGPPRRRYTLGTSRRRSTLGCARGRAAAAPPLAVISMWPLPRPRVRLGVSAMVETGEGQRGGLPSPTSPLDQMALRATSLLHGGVTGGVGLGILAAGRARGAEGGGGAEAGGVRRRRPLPPHGAAPRGRSSSPTES

SEQ ID NO: 107545 - protein, 74 aa, Oryza sativa
  Clone ID: PAT_MRT4530_11887C.1.pep
LGAPSSTCTSGFRVPSRIRGCGMKSVNLKLAITTLEYPALFSSPYMPSLRRICCGVYGLGLVKGRNGNPFAFAQ

SEQ ID NO: 107546 - protein, 100 aa, Oryza sativa
  Clone ID: PAT_MRT4530_11888C.1.pep
RVRTARWPTRKWTFSHLQNTVSLEYTNIKAAQLAGLPFSHFLLIPKSFCLFFVVIRRKCPWGQWQVHLFSFFLSFVLCCRRRWSSAARWSSSLLTRASTC

SEQ ID NO: 107547 - protein, 146 aa, Oryza sativa
  Clone ID: PAT_MRT4530_11889C.1.pep
LGTRRDNQKRERTKASQLRLRRRDVARRRPPRLLLARGKTTATQHVAARRLDNTFEKLASAHLQLVVAAPLVDALRGSPTEPLALPDHAHHLPLRLHRRGAFPLSLMLITPAAELLAVTTSPAAAAAGSSEAVGRRQQGELHLECH

SEQ ID NO: 107548 - protein, 110 aa, Oryza sativa
  unsure (1)..(110): unsure at all Xaa locations
  Clone ID: PAT_MRT4530_1188C.1.pep
VGTGESTNRCVHSRARLVACSAHSDRYWVXARCCELWSEPSIMLLIVQLLSEQSTSVSTSDWYINXHMIRQILPESAAPAAAAAVAKCERTSDQAAAETTKEEKNEDLVD

SEQ ID NO: 107549 - protein, 199 aa, Oryza sativa
  Clone ID: PAT_MRT4530_11890C.1.pep
MSCATPQRREIFRSAPCRAVREACVPLPATAYDAPNTDGVFVACSLIDYTSSSSIAIDVATQHVAARRLDNTFEKLASAHLQLVVAAPLVDALRGSPTEPLALPDHAHHLPLRLHRRGAFPLSLMLITPAAELLAVTTSPAAAAAGSSEAVGRRQQGELHLECHLIWGRGVNHNSGADTITAAHTGDGEAWHGEEQRRS

SEQ ID NO: 107550 - protein, 227 aa, Oryza sativa
  Clone ID: PAT_MRT4530_11891C.1.pep
MASTNGKEEVYVKEGSKLYSRMMSKEAAAAAAPLAVPSFRVYYGVASAGSVPFLWESQPGTPKSSPSTAVLPPLTPPPSYYASAGKKGGGGGASSGSRRSGWSAGGARGVLGAMFRRPWRRTSPCSTSSSSSWSYSSPSSVSMSPVFTVHQASPMAVARSHHTRACSAGAAYDDAAAARCFGMERECERGLVKGCGVAVAVRNALSSVVGHKSGGHGGAPAAAAAAY

SEQ ID NO: 107551 - protein, 87 aa, Oryza sativa
  Clone ID: PAT_MRT4530_11892C.1.pep
NNFNQKNKQVNINYKKTLKVKSLLTTCCNTKIISGGQNQPLQKFKDGRKRDPIHKKGQSRQSKTQVSAGRFKLQMEDPLARKRQPET

SEQ ID NO: 107552 - protein, 115 aa, Oryza sativa
  unsure (1)..(115): unsure at all Xaa locations
  Clone ID: PAT_MRT4530_11893C.1.pep
LLTWESFDGKCCCVPTKRDKNQAIVVQVPINXQVVFFFPYPMEGIGAVAASKKDQKSACSSTWMHWIIQLHKLSPVGLVDYTRNRRPDGENQSANSPLLHHEHEASHDPVADSFA

SEQ ID NO: 107553 - protein, 284 aa, Oryza sativa
  Clone ID: PAT_MRT4530_11894C.1.pep
MVRLTADLIWKSPHFFNAVKDRELDIRGNKIPIIENLGATEDQFDTIDLSDNEIVKLENFPYLNRLGTLLVNNNRITRINPNLGEFLPKLHTLVLTNNRLTNLAEIDPLASLPKLQFLSLLDNTVTKQPDYRLYVIHKLKHLRLLDFKKVKQQERIAAAQKFHSKEAEEEAKKVPAKTFTPGQVVDAQDTTMEEQGPKVVAPTPEQITAIKAAIVNSQTLEEVARLEKALSTGQIPAEFAIPKPDANMADASEETEKMETDGQNQENGADEKKQNEESTPIEED

SEQ ID NO: 107554 - protein, 161 aa, Oryza sativa
  Clone ID: PAT_MRT4530_11895C.1.pep
MGRGKRYGRRGCLERKGCEDSSRWDATATPRKPPLPLAIFRPRRAANGEKSVGVAGESIASGFEGEIMIQERCIVWYTSDQSKTIRIGVPVVMDYSIPLTGVHRRSGEQVSGTSAFDVLHREKAAIRGFLPLVVGFPFGTGKKVGIPAFSRSAERSLEGSN

SEQ ID NO: 107555 - protein, 196 aa, Oryza sativa
  Clone ID: PAT_MRT4530_11896C.1.pep
MREVSRQGYGTGVDPGIRLQFFSFSGGFVYCWLHRTGYCRRKRERESARNAAGNGSRATRGRRPRAVARRIGWRGRGAEICHIEFLIRAGRGRGPRGHVTMPADAASRSGVGHCGRARASPRPEATIIRPPTRAVASAADRGLDRLGAERSDVVACGIVAASVPHADVIAHWGCGVLVVEQTFRKDCVFLCRARAG

SEQ ID NO: 107556 - protein, 69 aa, Oryza sativa
  Clone ID: PAT_MRT4530_11897C.1.pep
PELVGPVRMPTVGSRNAHEDSGNRVPAPDKAVLLTGASKLRGGCSRRRYPVAESFQPHAFKPRFLSPSS

SEQ ID NO: 107557 - protein, 159 aa, Oryza sativa
  Clone ID: PAT_MRT4530_11898C.1.pep
SRMPNAKQPIRVVCDSHLRTPLACQLVQTARQYPTIIATASTDSTKIAQLKAFGVQIIQCKVANKQVDLVDLLAKLGAMQIDSVLLEGGSTLNFSALKAGVVNRIHCYIAPKLLGGSTAKSPIGGAGILQLAEAVNLTLKSTQYIGDDILLDYDVSSSQ

SEQ ID NO: 107558 - protein, 40 aa, Oryza sativa
  Clone ID: PAT_MRT4530_11899C.1.pep
VSINMNELEIIELWVQCWDHSSSDLDYISIGHGSSVLNDV

SEQ ID NO: 107559 - protein, 111 aa, Oryza sativa
  unsure (1)..(111): unsure at all Xaa locations
  Clone ID: PAT_MRT4530_1189C.1.pep
MVNNMKMVEKQNENGEKCEENGGKPAXISDDQAVXGXXGSADXKDQEXETEKDXEKEKEDKEXETEKDNEKXKEDXEXETKKDXEKDXEXETXKDXEKXKEDXEXETKKDX

SEQ ID NO: 107560 - protein, 484 aa, Oryza sativa
  Clone ID: PAT_MRT4530_118C.1.pep
MASYDKAIESYKKAITTAASVAASVMLVRSVVNELVPYEVRDVLFSGLGYLRSQISSQHTIIIEETEGWSHNHVYNAVRAYLATRINNNMQRLRVSSMDESSEKMVVTMEEGEELVDMHEGTEFKWCLISRSISADPNNGNGSGQREVRSYELSFHRKHKEKALKSYLPFIIATAKAIKDQERILQIYMNEYSDSWSPIDLHHPSTFDTLAMDQKLKQSIIDDLDRFIKRKDYYKRIGKAWKRGYLLYGPPGTGKSSLIAAMANHLKFDIYDLELTGVHSNSELRRLLVGMTSRSILVVEDIDCSIELKQREAGEERTKSNSTEEDKGEDKVTLSGLLNFVDGLWSTSGEERIIVFTTNYKERLDQALMRPGRMDMHIHMGYCTPEAFRILASNYHSIDYHVTYPEIEELIKEVMVTPAEVAEALMRNDDIDVALLGLLELLKSKIKDASETKAESKDANKQTEENKDSKAMENKNDSSTDECT

SEQ ID NO: 107561 - protein, 87 aa, Oryza sativa
  Clone ID: PAT_MRT4530_11900C.1.pep
MAVQAQYGGGMAAGMCLPDHEVEAQMRELGAMFSAAGGGCYNGGGGGGGYDCAAVVSGAAQSELTCNNGGVCGDMMQRRQKQKRGGQ

SEQ ID NO: 107562 - protein, 65 aa, Oryza sativa
  Clone ID: PAT_MRT4530_11901C.1.pep
WAGVGAQSSRAVLTEPPPPRRCCCRRCTAGSRRGLHHRHRRPVIWIDVHVWELINLIIDYVILQP

SEQ ID NO: 107563 - protein, 102 aa, Oryza sativa
  unsure (1)..(102): unsure at all Xaa locations
  Clone ID: PAT_MRT4530_11902C.1.pep
PRRLLSQSTWRWXSSRRGSPXGCTFDRLPAFEPILSVRSQAGTSEFFDVSDEXLQCPGVSVVRPVIEPRGLLLPHYTSGASIGYIIRGRGITGPTFPGCPET

SEQ ID NO: 107564 - protein, 212 aa, Oryza sativa
  Clone ID: PAT_MRT4530_11903C.1.pep
MAEGAELVGESAHQDMPRVVAALAGILERVAGRNDAAATPAELAAAPASPFRATAKPGISVRAYAARIARFAGCSPACYVVAYIYLDRLLRRGRRCLALALAVDSYSVHRLLITAVLSAVKFMDDICYNNAYFAKVGGISLAEMNYLEVDFLFGVGFDLNVTPETFADYCAVLQSEMLCAAPPTRLHYCCLSEDDAGSSSSSSLREAAMEAS

SEQ ID NO: 107565 - protein, 151 aa, Oryza sativa
  Clone ID: PAT_MRT4530_11904C.1.pep
CRRSSSRRTRRRRSSRRRRSPATSASPTPLAGTADGPTSSSRVSALSAAGTTSPTWCTTRKNSAAARRRRWCTASPEAATCSSSASPPAAAAASEGRRRSSHCSTRRAPCSTRRPRSRHRTARATSTWWSAMTAISTRSGWTKRSPMAVAP

SEQ ID NO: 107566 - protein, 203 aa, Oryza sativa
  unsure (1)..(203): unsure at all Xaa locations
  Clone ID: PAT_MRT4530_11905C.1.pep
LPSSVKKTEKKTGSKKKKTKLVRSKNRVKKPKKKRKTKCKKNXQKKKNKQNLSDQKTRRKNKKESNSRQNKINXRKYIKKKSTPSQKKKKGENKGIKVHKKKKEKLQKKKKKGKKKKNNNNKILFPLSGKKNRRSDSFKNGKIKFDSCTGEKKSEKTSKKEKKSKKXTLKNKQKTREKKKAKKREKYENRKAKKREKYGFRRQ

SEQ ID NO: 107567 - protein, 123 aa, Oryza sativa
  Clone ID: PAT_MRT4530_11906C.1.pep
MSSAAKDPEAGLGGGVHGMASAAGRHNHLVLLVASVLRCYSLQIKATVVELSAGTEVDDESGDMKEEGTTGSHFSHRDELCFLRLPSQVVRATTQRSHILHNVPHAFSPDNPRHQPLKGLKNG

SEQ ID NO: 107568 - protein, 223 aa, Oryza sativa
  Clone ID: PAT_MRT4530_11907C.1.pep
MKQTLDVHRSLRPPMPMAQQQMDESWRDRQKEIEMTKDFSEHMIPMARLKKIVSSQKGNMMMTFDMPAFLSKMCELFVQELAARAWACAQSHNRCIILDMDIAEAVASTESYDFLVDILHNHSVKQKSTPCSSTKRCRLVDQPSTSHIPHRHLLPQFAPTYTLAIPITPSLMPLISQCTPSSFPSLPQEKFPLMAPTPIVNRSMLFINNIARGLGLQGNNINA

SEQ ID NO: 107569 - protein, 54 aa, Oryza sativa
  Clone ID: PAT_MRT4530_11908C.1.pep
KLFFFGKNGTIILIHFTLIMRLYVNWRMTTTSRFRLFKVKQDQLRNSYVAHVVQ

SEQ ID NO: 107570 - protein, 123 aa, Oryza sativa
  Clone ID: PAT_MRT4530_11909C.1.pep
MELPTLSRHATQATARGAGARPIAASLDSGAGDADAPLGRNWRCATAAARLCPPPVRQAGGRPSLPGCLACFLAAGVLPACPAVSSSPQRRRRTPRPPPAPQRTPPPAPQALKAQPAVRLSQN

SEQ ID NO: 107571 - protein, 182 aa, Oryza sativa
  Clone ID: PAT_MRT4530_1190C.1.pep
MLLEELLRCQIQEWYPAFRRHTVPTVILPLPAAFLRYLAGRPAYPDTGGEHPEGRDDDAEPLPFFLPVMTSGRSAFPSAHAHHPDPVSLLDRDNSDLFFDSADDDDRDADSPLRPAFPELEAAVDSAIAELGGAALPKLNWSAPKDAAFMSADGTIRCTCFAEVAMLLRSFDCVAHDLACAR

SEQ ID NO: 107572 - protein, 81 aa, Oryza sativa
  Clone ID: PAT_MRT4530_11910C.1.pep
MAAVAGSAAVEPARGSSSSAAPVRTRLVVPVRESGVSVVVAASVVEPVAAAAAELRIRFHACFKEDKVLSKVEQGLSFTPT

SEQ ID NO: 107573 - protein, 372 aa, Oryza sativa
  Clone ID: PAT_MRT4530_11911C.1.pep
YQLRFTMEPDASPTSTTSCSKQSKLPLALLTLECNSNKCFLFDPSTKQTRGATDMAAFFLDAATLAFENRGWLLMVQNYRHSPRREKTLRTVFLSTPATAGGWTCRCSAPSPVASSSSTSTPMGSHWWWPASRRPPIIPPSCPGDVYWTTYKNTNTSPPQQARHGRRRAAFTFIVDAALRGKQVVCADYRGRISVFDMTETAWRTPVPSPGWNWQEDHFLVTASGEGGGEEEEEEEVILVSCRRHDDQFCEFKFFKLDIAMAPSPLDAGDLDGFSWFLCRGRSSRLREEKGGRKVYTFCPDRLWGESRTIDLGNGKKRKMAPFNPRGLIEKSITNVYAHNLVDGVVEELLPASIVTEARHWVHSAVFSEPFA

SEQ ID NO: 107574 - protein, 471 aa, Oryza sativa
  Clone ID: PAT_MRT4530_11912C.1.pep
MSSSSSTSPRFGSMISAKLASPPPSLLLPPSPRLQGRRLTPPSCTPGTPAALPSPGPDKEPEREAAGSGSGSATTPRSPAQLGSSQLHRWSRARAHRSGRRLEWPTIRDRGSGGASSPPTPTRPHPSSDEAASAAAKVAVEEEDGYGVVGRDEAAKSIYMVSDGTGWTAEHSVNAALGQFEHCLVDRGCAVNTHLFNGIDDMDRLIEIVKQAAKEGALVLYTLADPSMAEATKKACELWGVPSNDILRPTIEAIASHIGVAPSGIPRSSPSRKGQLTEDYFRRIEAIDFTIKQDDGAQPQNLNRAHIVLVGVSRTGKTPLSIYLAQKGYKVANVPIVMGVNLPKSLFEIDQDKIFGLTINPVVLQAIRKARAKTLGFHGQKSNYAEMEHVRGELDHANQIFAQHPIWPVIEVTGKAIEETAAVVVRIFHDRKQKCAMPRISKRVAPIRIYDYLSEMVNTHVEYQKIFARDF

SEQ ID NO: 107575 - protein, 1066 aa, Oryza sativa
  unsure (1)..(1066): unsure at all Xaa locations
  Clone ID: PAT_MRT4530_11913C.1.pep
MAGTHGFRRVGVVEMEAATAAEVAGAGSGTDGDLQIKGSKENGQTAEQPAASEALEMPSTPLPLPRDIDWSEHFSFFNSVGGFGGSMDGARGLTSVGLSNSESRPDSVTQIQSCLNNADERVEELTLKNCISSDAQHEVSAGGSTSSGEKPTVMRGLWGNFTRMSWRASDVANREKLAANRGDVANLRVGDMPIRENLAVSFGNNMISRNDASNKEMGMSHGDHANNEFNLPFGNQQPFLSPRPNQNEQRVERENALIVSSFSARILDQMRSKNVTPSSGVQSFPFKSVLKGKGVVYQGAREEIQVQGNARTSSPMEELRQTNSSGLSTDACSIGTIFGSGGNVLEPQCEGTSLRELIKPARQTMSKFEKMHFFKQILDLVDKSHAQGFSLQHLRPSYFTISASNQVKYIGSYGTQDLSAPSKLDIATDDIFNTKRYLDPKVESQDSNGDNASITKYQKVGEQGSIAVRRPVHTFWANHRGGNQSEGVDPGALWQGNSSCTVRERFKAAEPFYGGSMPYAQRPSSSGNQQSVFELRMLEESWYRSPEEISQLKGILPSNIYSLGVLLFXDLRHRILPPNFLSESPKEAGFCLWLLHPDPCSRPKARXKTPVAVNEEDTESGLLLGFLSQLKEEKEMHAAKLSADLASLETDIAEVEKRHSMRMGFSLEDMDVLAGSNDLSGASACALGGASLSGLPPSLCRSSIYEERVMRNLEQLENAYYSMRSTIDTSEANIIKRVDNDALRVRQNFHELHSDANAIDEQADPLGWFFDGLCKYARYSRFEVRGILKNADILNSPNVICSLSFDRDEEYFAAAGVSKKIKIFEFDALLNDRVDIHYPLIEMPSKSKLSCVCWNSYIKNYLASTDYDGTVQLWDASSGQGFTQFTEHRKRAWSFSPYSSRMLAFGSADYKIYCYDLRNTRIPWCTISGHGKAVSYVRFLDPETLISASTDNTLKIWDLNQTNSSGLSTDACSMTLSGHTNEKNFVGLSVHDGYITCGSENNEVFSYYKTFPMPITSHKFGSIDPITGQETNDDNQQFVSSVCWRGRSNMVVAANSTGSIKVLELV

SEQ ID NO: 107576 - protein, 306 aa, Oryza sativa
  Clone ID: PAT_MRT4530_11914C.1.pep
MANPSKDHIFPNQRSLISQSSSPHNSLPKKEEIPLLSLLPSIHDHNKIHGCYKQEKEEEVMEDVDISLQIGLPSPDPNSSVIDFAKSNPLGATATTSQELDGDDDDDHKVEVEREEEEEAASDDLCLDYFSMGKLTKGKYWIPTPTQILIGPTHFACPVCCKTFSRYNNLQMHMWGHGSQYRRGPESLRGTQPAAMLRLPCFCCAAGCRNNVDHPRARPLKDFRTLQTHYKRKHCAKPFACRKCGKPLAVRGDWRTHEKNCGRRWHCACGSDFKHKRSLKDHIRAFGRDHRERPPPPPPHPLLPLP

SEQ ID NO: 107577 - protein, 263 aa, Oryza sativa
  unsure (1)..(263): unsure at all Xaa locations
  Clone ID: PAT_MRT4530_11915C.1.pep
PRVRCFITQCEGTSLRELIKPARQTMSKFEKMHFFKQILDLVDKSHAQGFSLQHLRPSYFTISASNQVKYIXSYGTQDLSAPSKLDIATDDIFNTKRYLDPKVESQDSNGDNASITKYQKVVKVGDPGALWQGNSSCTVRERFKAAEPFYGGSMPYAQRPSSSGNQQSVFELRMLEESWYRSPEEISQLKGILPSNIYSLGVLLFELFCCCETWEVHCAAMSDLRHRILPPNFLSESPKEAGFCLWLLHPDPCSRPRQEIFRV

SEQ ID NO: 107578 - protein, 96 aa, Oryza sativa
  unsure (1)..(96): unsure at all Xaa locations
  Clone ID: PAT_MRT4530_11917C.1.pep
IRLFGLHDLGLGWPPPSCWPSLASAHCCCLFAPPSASSSASNLACNDRHDSWLPLGQPVRSERCKLVLLACPFCPPLLXGWPXPRLSXXKKKKKGR

SEQ ID NO: 107579 - protein, 327 aa, Oryza sativa
  unsure (1)..(327): unsure at all Xaa locations
  Clone ID: PAT_MRT4530_11918C.1.pep
MASGRRRMRRRPRVRSGGGDSVADWGNGAKAGMRRGAAELVVAAARAAVACGRSSAEGGRDGGVDQWGLEGQPEEQGRGEAVFREMVVKVSYWELSDGEMAVALLAVVGKRRWAGSTQRETGVNQQWRMQWGTWGTSRVEDRRRVLLWKRIRWSVHRCLFFKHVRSTLTTARCTDTTSSMPLYALRPSLRLSLLVPFDTSAILKLVDNLARTVLAAPLCASSRVVPRLGKPGVIPCSPVSPSLSSAHHFTPWSLEPSCXTHDHSTMPLVRPVARLPRHQXTDFSYIDRSYSMHGFIDHGYVLPFTLATSITTQKAIICVEHSPRIFL

SEQ ID NO: 107580 - protein, 154 aa, Oryza sativa
  Clone ID: PAT_MRT4530_11919C.1.pep
MSPARGQTSRDRMHNLSERSIDDEYRRRCPSMPRGEPRQGYHLIAPPKGEERLDNTPKKENGARSTGTRSDRVGTGSGPKDAGSGYRHPTPEALPLVLVAPKPPQLREEGREPCLHYPYTRPALLASLKWWQGGEKGKRVVTVLAWSPPVPPRD

SEQ ID NO: 107581 - protein, 101 aa, Oryza sativa
  unsure (1)..(101): unsure at all Xaa locations
  Clone ID: PAT_MRT4530_1191C.1.pep
GGNHLVLAKDVGVGIMSGGISGMAFWTATLPLDVAKTIIQTDPDPHLSRXPFQILKMVYRRAGMGGCYXGLGPTLXRAFPANXAAIVAWEYSAKILSIRRD

SEQ ID NO: 107582 - protein, 62 aa, Oryza sativa
  Clone ID: PAT_MRT4530_11920C.1.pep
SPSLLALVSNPKIIRSTIISRVEVIPDDFYLLTASLLKVAISEDYLGIAQATTAEGYFILAS

SEQ ID NO: 107583 - protein, 97 aa, Oryza sativa
  unsure (1)..(97): unsure at all Xaa locations
  Clone ID: PAT_MRT4530_11921C.1.pep
KDLVSRSNEDHFRLCSPCYCCMQPHXCAVLMSTGQSHRKYHXEVXLXLLQQQXLSXYNERVRXQHGILASPLXTSCLQLRNNQVGAHCAHAAQQLHY

SEQ ID NO: 107584 - protein, 257 aa, Oryza sativa
  Clone ID: PAT_MRT4530_11922C.1.pep
YLRVFDFAKEQLIFGGKSYFGALLCCSWRTWKVIFDYALHISARMVSAVAFDSYWSPPKPYERKQNSMHRFASPKSDEAEEDPIYSFASPKSDETKENTNIMYRFASIGQDAQLLLWDLTKDELNVSLTHASSCSESSSSGSCSASSSSGSSSTEDRDKEFPLGFLHPSPRLQEVPKLSPEVAHLVGVEPLFTLEFTSESVITVCRRGRITTRPREEIDNETETDQQHPGSSKLVINGTGNYSNPSRGCSLVCSKTI

SEQ ID NO: 107585 - protein, 86 aa, Oryza sativa
  unsure (1)..(86): unsure at all Xaa locations
  Clone ID: PAT_MRT4530_11923C.1.pep
ARGKQDPRLEDEYESVCEEPPVNDNRHIEVLSRASKKGSIXGKETLGYIDISLADVIXSNKRINEKYHLIDSKNGQIQIEMQWRTS

SEQ ID NO: 107586 - protein, 126 aa, Oryza sativa
  unsure (1)..(126): unsure at all Xaa locations
  Clone ID: PAT_MRT4530_11924C.1.pep
VPTRAPTRARRGAPTRTATRSYYSTLYKGHWLLFYYTGGPADVIHADASAYTACDATNAICYYRTGRTYSFELTETDTYYCICKYRYXFCGMRLQMKTEKIPPPSHSAAGADKSYTAFTASCASLF

SEQ ID NO: 107587 - protein, 45 aa, Oryza sativa
  unsure (1)..(45): unsure at all Xaa locations
  Clone ID: PAT_MRT4530_11925C.1.pep
MPLDIVYAHTQHNTHPVSLHYQLHLNLISELSHLIXYADFVIPNS

SEQ ID NO: 107588 - protein, 236 aa, Oryza sativa
  Clone ID: PAT_MRT4530_11926C.1.pep
MLPSNTTSFPPDAYKYQEPPASPRGCMYDNDPAMLPMVFSSHENCTLPLPPAALKNLQLPLPKPCPTDGGMTYLYCCLRASQTSRLQKPSSACDLAKPKRRRHSWLSMILHDDYGCKPSTMSWTRRKLREKWLSSMAGADTAAENDRACEQEREGGADILLKGTNETRIQDAEGDNIYNSQTSPPAAAEPCTAGEKVRIPNSTDRTEKVGRKFRSLDLELLDPASGEIFLSVGRKF

SEQ ID NO: 107589 - protein, 269 aa, Oryza sativa
  Clone ID: PAT_MRT4530_11927C.1.pep
MKFDMPTRPPASSVSAPSARASQTSRLQKPSSACDLAKPKRRRHSWLSMILHDDYGCKPSTMSWTRRKLREKWLSSMAVTSDGGGVEGMEAVEESSISGNDAVPLLARGGDTMRETVEAMLRRARRAAENDRACEQEREGGADILLKGTNETRIQDAEGDNIYNSQTSPPAAAEPCTAGEKVRIPNSTGELPLPLYSSSSQRLQDDPTLLSSPSMVASCCWIHHLRLPMPAHHPPSSLQRRWYRYLRRRPPESTAYHGSSRAHGNPSKP

SEQ ID NO: 107590 - protein, 52 aa, Oryza sativa
  Clone ID: PAT_MRT4530_11928C.1.pep
NPGEGQEALGPQKKAGGPRLSLLFTPSFHLLISSGFRGVHLSLKKACQVMHN

SEQ ID NO: 107591 - protein, 51 aa, Oryza sativa
  Clone ID: PAT_MRT4530_11929C.1.pep
LPFLEKGKKKKKKKKKKKKKKKKKKKKKKKKKKKKKKKKKKKKKKKKGGPF

SEQ ID NO: 107592 - protein, 85 aa, Oryza sativa
  unsure (1)..(85): unsure at all Xaa locations
  Clone ID: PAT_MRT4530_1192C.1.pep
XRAPATXFNSLCMPRFWXVGFSLALLMRRMLLSXENILLQCQVPGYIVMHXXLRMTSRAQSFMLHLYDIQVTCCTDRFVYLIPCS

SEQ ID NO: 107593 - protein, 117 aa, Oryza sativa
  Clone ID: PAT_MRT4530_11930C.1.pep
PLPPPTTPATATSPTRSGQGGPDPPSGEADLPPTWFAAGMRSPESPCSAPTLAPPSPSSASAALPVASRLRSGGGGRGGDGDVPTTSSACHGRRTGAMRRTGRGNGHRRGLAVDAIA

SEQ ID NO: 107594 - protein, 132 aa, Oryza sativa
  unsure (1)..(132): unsure at all Xaa locations
  Clone ID: PAT_MRT4530_11931C.1.pep
LGSFXRPXFFFFFFFFXAXXFFXFFFXXFFXXXXXLFXRXXPFXTLXGAXFLKERDLGVXFFXLXXVXXIXALXIFXXXCDVLXXFFPGWSXRAXFXFXKFCPAXQRXSFCXXTWXSXSTVGLXXXAXSLPF

SEQ ID NO: 107595 - protein, 138 aa, Oryza sativa
  Clone ID: PAT_MRT4530_11932C.1.pep
MAEETPVEAPPAPVLGEPMDLMTALQLVMKKSSAHDGLVKGLREAAKAIEKHAAQLCVLAEDCDQPDYVKLVKALCAEHNVHLVTVPSAKTLGEWAGLCKIDSEGKARKVVGCSCVVVKDFGEESEGLNIVQDYVKSH

SEQ ID NO: 107596 - protein, 232 aa, Oryza sativa
  Clone ID: PAT_MRT4530_11933C.1.pep
MVSPSGNRNNCASTGQVGEQGAEAAAGPSHDKPPYPVDEITRRTPCDMHIPFRNLSIKVASGMAIPVDQNGTFHCRSTPPWYSKVEVELVEEGFEDLELDIPEGDRETKLGDTAPHHYTIVQKMAYDCTPEETDKIIRTEVKAHFKPGSLKKKTPIDPSAKKFFQKMSAPITHTLLSDYDRSITKSFKKTRGKSKDVPQLGKQPKQAVEPLLPPDEKEIRLFMAEMGLKREQ

SEQ ID NO: 107597 - protein, 307 aa, Oryza sativa
  Clone ID: PAT_MRT4530_11934C.1.pep
MAPSAQLEEGKPPSSSPQPSPRRPPPTIGSVTTAIRHHHRPRPLHLVSCSHLPSSAEPCARATAASTLVGLLYRPSSTAKSRCLRLPSSLLERLAPVRSARRGTRSTHGGTGSGRGGVGYDASTLRRQPLLCAPARLPRAETGVPPRFGLTRRHPGWPLGSPAIPPVVVAVGPSGLSSAGDMAEETPVEAPPAPVLGEPMDLMTALQLVMKKSSAHDGLVKGLREAAKAIEKHAAQLCVLAEDCDQPDYVKLVKALCAEHNVHLVTVPSAKTLGEWAGLCKIDSEGKARKVDRRAPGRPGSPSSRKP

SEQ ID NO: 107598 - protein, 104 aa, Oryza sativa
  unsure (1)..(104): unsure at all Xaa locations
  Clone ID: PAT_MRT4530_11935C.1.pep
RATGARKRDLIGFLKDSLRAAGQNNSVCIXRWDKSSYHPKGDHAYLNVVIPPASKSTERKSILXEVNFRSQFEVARPTKACRTVIXRLPSVFVGKEVRLRLISE

SEQ ID NO: 107599 - protein, 50 aa, Oryza sativa
  Clone ID: PAT_MRT4530_11936C.1.pep
MASGATLLSCCYGDGRAGLDPVRARALKLKFAEGGVVVAAIGGDLFSPLY

SEQ ID NO: 107600 - protein, 508 aa, Oryza sativa
  Clone ID: PAT_MRT4530_11937C.1.pep
MAPAFHPAIFGDFFINNVQPSPKESDEWMEERVDQLVEEVGRMLEVCKDDVVKQMNLVDVLQRLGIDHHFEEQIDTILKNIHRAEFNSSDLYEVALRFRLLRKQGYWVSPDEFNKFKAEDGSFSSDDITNDPKGLLSLYNAAHLLTHNEKALEEAILFARHHLQLLRGNLAYPLDEQVTRALEIPLPRTMKRVEVLNYIFEYSAEEKMFNPSILELAVLDFNILQKVHQNELKEICQWWENLSSDIRLDYVRERVVECYFCAYAAYYEKEHARARMIFAKRCMLFSLLDDTYDVRATLEEARKFNDALQRWDKSDVSLLPEDLKRFFLSIISNFREFEDELEPHEKYRNSYNIKATGGAIELPVSLIVGMGDIATKEVLDWALANPDAGRAFAEVARFMDDLAASHSGRDKMDVASTVECYMNEHGVTREVAEAKIAGMAEDGWKSMNQIRFKHRAFLPFVQRIANLCMSATLLYHGKKNGFSNSLELKDMFESHFVNPIPLNHIDYD

SEQ ID NO: 107601 - protein, 58 aa, Oryza sativa
  Clone ID: PAT_MRT4530_11938C.1.pep
MWMDSDHIGGHNFLLDGWPVVRCWRGGCASKVKTMAWIPWTGCGGTFSVVSFLKEHFL

SEQ ID NO: 107602 - protein, 288 aa, Oryza sativa
  Clone ID: PAT_MRT4530_11939C.1.pep
MGDLILDPYMEDAIMDHPCLAELLADQTALPVFHPYSGGATPQMVDTDTFLRAIGALPPLAPPPAAPLAPAPPDSPRTPHTYGSLLPVYEGSDHPVSPKKTIEVASLLQERADQPVVTSNSATTTRPQLCAPYDDDIEATLRAMETNPVERPSPYFLETTQGGRMTALLRLVAATTVFLAAKYEDQYTLRKIDASMVAARCGYTSETRHKMVSCMETEILAALDYNLSGPTASTFVQHFTRYYGDGKEEELLKEAAHRFTDGSLLTYGFHRYLPSVVAASAIFLARLH

SEQ ID NO: 107603 - protein, 227 aa, Oryza sativa
  unsure (1)..(227): unsure at all Xaa locations
  Clone ID: PAT_MRT4530_1193C.1.pep
ARQRRDAGVGDYTLHVLLFYHAWNNGVALTEGVEDTITWRWTANEKYSAKSFYIAQFNGRISSAAVKLIWKQWAPSKCKHFTWLLLQNRVWTIDRLQIRQWPNNYFCQLCYRNLETAQHLFKDCAFVCHIWERVLSILNCNDIEHQYDENEVLLEWWXEGGKSKAKALKSIHMLVVWEVWCERNRRVFQNQEKTMPQLLAKIQDEIKLWSMCGAKKTSREYPLRSPF

SEQ ID NO: 107604 - protein, 432 aa, Oryza sativa
  Clone ID: PAT_MRT4530_11940C.1.pep
MGDLILDPYMEDAILDHSCLAELLADQTALPLFHPYSGGATPQMVDTDTFLRAIGALPPLAPPPAAPLAPAPPDSPRTPHTYGSLLPVYGDLPPLSGAVLQEPLPLPEGSDHPVSPKKTIEVASLLQERADQPVVTSNSATTTRPQLCAPYDDDIEATLRAMETNPVERPSPYFLETTQGGRMTALLRLVAATTVFLAAKYEDQYTLRKIDASMVAARCGYTSETRHKMVSCMETEILAALDYNLGGPTAYTFVEHFTRYYGKGKEEKLMREAAHWFADGSLLTYGFHRYLPSMVAASAIFLARLHVRGHEPWRKDLAELTGFWYSDVSTYGPTADTFVEHFTRYKCTTAGERKSYGCMQRLERDVADQSLMNYVRLPGATIPAVHGGGGRRASISVARCSLNRHDALVWSTELQELTGYSFEDLVSCIFAM

SEQ ID NO: 107605 - protein, 47 aa, Oryza sativa
  Clone ID: PAT_MRT4530_11941C.1.pep
YKHVTLSQEKKLVCSSLISKFRTKPGLSQDHDHLFCQSLDNWKQGRI

SEQ ID NO: 107606 - protein, 400 aa, Oryza sativa
  Clone ID: PAT_MRT4530_11942C.1.pep
MGDLILDPYMEDAIMDHPCLAELLADQTSLPMFHPFSGGGTPQMVDTDTFLRAIGALPPLAPPPAAPLAPAPPPDSPRTPHTYGSFLPIYGDLPPLSVTVVQETLPLPEGGDHPVPPKKTIDVAPLLPEHADQPVVTNNSATTRPQLCAPYDDDIEATLRAMETNPAERPSPYFLETTQGGRMTALVRASMIAFMDEFSRFYELADGTLQRAAYFLDRYLSVTPESDDVLQLRLVGATAVFLAAKYEDQYTLRKIDASMVAARCGYTSETRHKMVSCMETEILAALDYNLSGPTASTFVQHFTRYYGDGKEEELLKEAAHRFTDGSLLTYGFHRYLPSVVAASAIFLARLHVLGHEPWSRDLAELTGYEAIDLMGCVCDMYSQIACPRFAPFQEYFFQDP

SEQ ID NO: 107607 - protein, 400 aa, Oryza sativa
  Clone ID: PAT_MRT4530_11943C.1.pep
MGDLILDPYMEDAILDHPCLAELLADQTALPLFHPFSGGATPQMVDTDTFLRAIGALPPLAPPPAAPLAPAPPDSPRTPHTYGSLLPVYGDHPLLTGAVVQEPLPLPEGGDHPVPPKKKIKVAPLLPERADQPVVTSNSATTTRPQLCAPYDDEIEATLRAMETNPAERPSPYFLETTQGGRMTALVRASMIAFMDEFSQFHELADGTLQRAAYFLDRYLSVTPESDDALQLRLVGATAVFLAAKYEDQYTLRKIDASMVAARCGYTSETRHKMVSIMETEMLAALGFNLGGPTAYTFVEHFTRYYGDGEEEELLKEAAHRFADGSLLTYGFHRYLPSIVAASSIFLARLDVLGHEPWSQDLAELTGYKAIDLMGCVCDMYSQIACPRFALFQEYFFENP

SEQ ID NO: 107608 - protein, 65 aa, Oryza sativa
  unsure (1)..(65): unsure at all Xaa locations
  Clone ID: PAT_MRT4530_11944C.1.pep
WPRRLRSCSGREHDYYRKHGGFVKDQKRTRLLVKGRWPCYKQPNSTNLWGYXVCEMLRVRGRYIT

SEQ ID NO: 107609 - protein, 974 aa, Oryza sativa
  Clone ID: PAT_MRT4530_11945C.1.pep
MAAARLPSPAPVAHPPALRARPLAPHLYAALPRAPYPAWQWRGARAASPARREAVVRGAAVAEDEGVELADDDDGERGVGGGDGGSESFRTPARHPPAVAFAIGVGSHGIMVICWIGGGANEHPQPHGDLRFVSLSIFPFIDVTYLYNVVFTLVFFRKASLAMGASASSSVTSKLTNDGENQRVKYASSTMQGYCPTMQDALAVELDLDALRNTSFFGVYDGDGGAEVAMYCAKRFHAMLCEDENYLNNLPNAITSVCSRLDDDLQRSNEWKESLYPRGNGECFQFLKTGVCANLWHSEELGFMLPQQAYRAPLYEGSTACVVIIRGNQITVGNVGDSRCVVSHNGQAIDLSIDHKPTVGSERERILRAGGRVLVKRIPVMGSDGRLMRGWGYFELKKNQNIPASQQMVTCDPEFTIVDITADTEFLVIATDGIWGHMSSQDVVDFIRKELHSGEENLRAICEKLLDHCLTSRDNVTVILVRFKPGAAVIPILSDIDEEPVLSDVEEEPHEPQHNPGDGGGGGGGQQDIGGESEELPLAHFPQEYLLPVYGDHPLLTGAVVQEPLPLPEGGDHPVPPKKKIKVAPLLPERADQPVVTSNSATTTRPQLCAPYDDEIEATLRAMETNPAERPSPYFLETTQGGRMTALVRASMIAFMDEFSRFHELADGTLQRAAYFLDRYLSVTPESDDALQLRLVGATAVFLAAKYEDQYTLRKIDASMVAARRGYTSETRHKMVSIMETEMLAALGFNLGGPTAYTFVEHFTRYYGDGEEEELLKEAAHRFADGSLLTYGFHRYLPSIVAASSIFLARLDVLGHEPWSQDLAELTGYKAIDLMGCGYYRSLSVSNSPSPCANPGNYIALVTLRVAEEMRPPLPPPARAERHGTGTVRVTRVKLLKPRDTLLLGQAYRLITVDEVTRVLQAKKEEKSRRAAAQHHLESKPAGAAGVGINSSGDDHTRPIRPAHLYIVSCRCSW

SEQ ID NO: 107610 - protein, 316 aa, Oryza sativa
  Clone ID: PAT_MRT4530_11946C.1.pep
MAAASAAFLLLLPAVSPAAPTHPRLLFSCPPYRSRPRHRARLAASRSSSDGEGDGGIVTGPAGGGGGVFLSPRALSQRDELAAFRYAHSFPHGRLTVRALTPAGDDDESDALVRLLASSFAENVRWAPAQRYEQLLAFVIRRYLFERRGLAPHAAVLVGYYRPAATGDGDEEEGEGNEDDDDYGEMACTAEVSLDAVGAPGAPPTPTPPLDFPYICNMTVKTSLRRRGIGPPGPKARGDLIIKMDAKRHVYLHCRIIDQVPFNMYRKAGYNIVQTDSILVWLSLQKRKHLMSKELLQTSVSSRSTAKDFDDNKLTS

SEQ ID NO: 107611 - protein, 135 aa, Oryza sativa
  unsure (1)..(135): unsure at all Xaa locations
  Clone ID: PAT_MRT4530_11947C.1.pep
CKIKDVFDYYSVMNNWHLTLLVLIFGDYWRSGFXGDNWICKXEQELLLSFGPVRLGCGCWLEXMHMVGADSIWHTMEVLCAYGMWSRIXKESKFVMIGXVKFVSCTRRFPRWIRTSSMSLIHGFRLPTSCITREG

SEQ ID NO: 107612 - protein, 98 aa, Oryza sativa
  Clone ID: PAT_MRT4530_11948C.1.pep
MVSQIRTAFGLVHMLFNRASSRHQVSPFHHTKLRLRNVPSLVWERPMPSNYPSARALSVVHPYTNTVEHPNVSGRPDPPPTHLRIRRRASSPTGCTAA

SEQ ID NO: 107613 - protein, 76 aa, Oryza sativa
  Clone ID: PAT_MRT4530_11949C.1.pep
MTKSLDYKASFRGSQPLHGFLWNSDRIGSSIGILDLNFVRSYVMFSFLCFCNLIFLDFVSYKCLVKFSRVVHSSGF

SEQ ID NO: 107614 - protein, 217 aa, Oryza sativa
  unsure (1)..(217): unsure at all Xaa locations
  Clone ID: PAT_MRT4530_1194C.1.pep
MRKPTKAEIQPILDRLAKKIAGWKPRLLSPDGWLCLIKSTLMALPVHLMSVLQLPKWAIKDIEHECRGFLWKGQEDVSGGHCLVAWKNVCMPVQNGGLGIKNLDYFGQALRLKWHAIKLEQKNRPWTMVDYQLGKEVDTLFQSAAEFIVGNGKNTRFWTANWLGGGSIAWRWPILATYVGRSHLTVAQALSNHRWXVRDLQGSLSNEAMAQYFQLWD

SEQ ID NO: 107615 - protein, 132 aa, Oryza sativa
  Clone ID: PAT_MRT4530_11950C.1.pep
ERKPPEIFGSKGQGITGDVAQLHGPPPVHQHIITSKSARTPNRCALRSLLLLPPRRRRQRVAVRSSGVFAGVVHGVGPASSVCGGDRVIRFGQDRRSAIVKSIRFFFFGFFFLLVCAFVSRRKEMYKINPTD

SEQ ID NO: 107616 - protein, 98 aa, Oryza sativa
  Clone ID: PAT_MRT4530_11951C.1.pep
MAGDEIGSGDGVLINDGDGVLLTDANPMEATATEGDDGRRRTARLEIKPWQQPTGSRRRQPSGGIRPRETAALGKNTASRRLAGALRRTVSRGRPNRL

SEQ ID NO: 107617 - protein, 260 aa, Oryza sativa
  Clone ID: PAT_MRT4530_11952C.1.pep
MAPSFLARRHAKLPTKETVTSSSTSHRPCRRQQPHRPAPLRQPLAASGHCGGGRGARRVSRSRSSAAHPRGRLHAACRPRRAGIRVRSTSSLPQVATCKNNWLAVTSEKWLANVGDIDSVHNQAMRDCDALLKKEQHIDVSLNSQSNAEKIAYYTRLNGSIDVTRLLLKQGTNALVVGLTMHPSRFMTASRVGVTIAKLHNSRSPHKYHGYRIKPCGNRDQTMKLQNLEFKYLLMKFTRFSAVTLCDNPPPNGKGNPAHH

SEQ ID NO: 107618 - protein, 389 aa, Oryza sativa
  unsure (1)..(389): unsure at all Xaa locations
  Clone ID: PAT_MRT4530_11953C.1.pep
TRTRKFSSIKWPQISPAAPGRTKKGXPHSSLVEELTLRHLARQVGGAFVIFEVLSSAGVVSATPPVWGKAQPPQECHATLGRGLGPPHPHRVRLAARPLWRVFGMFXWPPKFRPGLTEKYDGCVNPSESLQIYTTIIEAAGGDDQVMASFFPMALRGQARDWLMNLLPASYPRLKLSLGCRRSPGPPCAGSSXRLALVPSAGYGARPXAQLWTGSAGSRVFRLSHSCESNRPCRRKRDXNKATERKERTXCVAWGRRLKISSQPKVRAGESPSSWGEKGAWALMLAKNGEETGPTLXTRRVASTLATRGRFWSGLTLGATVGDMGPGISRASDRSVTGXMTDGTATVRNTVAVVKPKSAAAFSSSPTSSGHLIAPWFAGEHARPSRRRW

SEQ ID NO: 107619 - protein, 123 aa, Oryza sativa
  Clone ID: PAT_MRT4530_11954C.1.pep
TPRASGEVAGRVAAAGSRLPSHACRCACACAGGAAPPAAAGGGARRRRSGRRDRRRARRATTGTRRGRAPQRRRPGVAAGRRAAGPFGAAGRTDRGRRRRRRRRSRSRPPRRRWWRRRRGRAP

SEQ ID NO: 107620 - protein, 166 aa, Oryza sativa
  unsure (1)..(166): unsure at all Xaa locations
  Clone ID: PAT_MRT4530_11955C.1.pep
MKGGCLQRPLVSKLCLGFAALLTALIVIMSLEEAPVLTIFSSTPEKLKVLSQGFLQQQEQEHLEDSTARQNENCNYAKGPWXVADKKRPLYSGNECKQWLSKMWACRMMQRADFSYEXXRWQPHWIVRCPEXYGGLTFWKRVRHXTLAFWWXILFGRQQFSVHEXV

SEQ ID NO: 107621 - protein, 90 aa, Oryza sativa
  unsure (1)..(90): unsure at all Xaa locations
  Clone ID: PAT_MRT4530_11956C.1.pep
QDQRPQNRKAQXQQGDTIRKQQTQETKALAENGPTAAPPVSGLNSLKSKDSPPGSVGRRTPRGRAREAWAARPRPGCCAAGVVXPTRGDG

SEQ ID NO: 107622 - protein, 40 aa, Oryza sativa
  Clone ID: PAT_MRT4530_11957C.1.pep
MTKVKSSGANREKGSATANNRNGVTITNDGGEEYGPAKVV

SEQ ID NO: 107623 - protein, 195 aa, Oryza sativa
  Clone ID: PAT_MRT4530_11958C.1.pep
GPQTTSNYSSPADTRTDYPSSDSYNPQSNDKPDIPTYPHTYHQPPYTIEPQHTSQNYYSTETPAAPYNYSNFQSYPSFQDSSVPSVPTHQSSFYPVSDGTSAVSYSPSGSNHPAPTQYHPSADTTTHQVTPPAIAPPASQYKYDSSYQPEVEKIAEAHKAARFAVGALAFDDVSVAVDHLKRALDLLTNPSAETH

SEQ ID NO: 107624 - protein, 118 aa, Oryza sativa
  unsure (1)..(118): unsure at all Xaa locations
  Clone ID: PAT_MRT4530_11959C.1.pep
QAEFKKMFDLIEQYNLNXHIRWISAQMNRVRNGELXRYICXTKGAFVQPAFYEXIRSTVVESCLWLPHSNRYGGQLKIIVTSAGXHIXPYQGDKAXALLVEFFESAGAQHWPSLEGGL

SEQ ID NO: 107625 - protein, 133 aa, Oryza sativa
  unsure (1)..(133): unsure at all Xaa locations
  Clone ID: PAT_MRT4530_1195C.1.pep
RSDLFNSVTNALMLTVKFTCFLTANKGFIGVSANEVSRRCIGLQGLHPIGFYLIILLFYYISISRAIASILLFTSXVRIYIGCIADSSKPYRYRLDQTDWHARTSPRFGPALELSRSPRPVCIFRINSSLTRN

SEQ ID NO: 107626 - protein, 162 aa, Oryza sativa
  unsure (1)..(162): unsure at all Xaa locations
  Clone ID: PAT_MRT4530_11960C.1.pep
GAGQKTAPAQTRGPGXTDPEGRRNGXAAGNGQANPRAVHPGGLNDEGARGNRPEGPRGDIQQPAPPPAQAAGAARARPPGGKGDQPGAAQAAGAAARGKGGAAQGRAPVQSGKRGARTADAGGXRAPRPGTPARQGGVGPGICHSQARSTREADRDRPAENV

SEQ ID NO: 107627 - protein, 285 aa, Oryza sativa
  Clone ID: PAT_MRT4530_11961C.1.pep
MEMVLQRTSHHPVPGEQQEAAAELSSAELRRGPWTVDEDLTLINYISDHGEGRWNALARAAGLKRTGKSCRLRWLNYLRPDVKRGNFTAEEQLLILDLHSRWGNRWSKIAQHLPGRTDNEIKNYWRTRVQKHAKQLNCDVNSKRFKDAMKYLWMPRLAERIHARAGAVDDSGDYSNNDLSCVSGVTMATVANCFDGSPSMVTSSSSDSFTSESQDLKKINLHVHGDDEKMNSEDWMQEVDHEFWSTEIQPNNEQFQDQQLNGWVQGFSEGLSETLWSLEDIWKMQ

SEQ ID NO: 107628 - protein, 571 aa, Oryza sativa
  unsure (1)..(571): unsure at all Xaa locations
  Clone ID: PAT_MRT4530_11962C.1.pep
IHIAFRKYHIQFVKNHPSIQTPPKLDDQLPIMIIENYGIETRNIVTVYQKPYPDYFYTIPYPPSFPEFVKFNDEDNRNVXEYIDQFLAQCGEASNADVFKLXCFSLSLSDNAFIWFISLPANSIYTWTQLEQXNFYDYFYTGEIELTLSDLTMIRQRYNEFVIVLFKGFRDTKNRCFNLSITKRDLADLAFNGLIAPVKXLDGXQLLDVGQVLQMALSXESCAREIRNLLYLLTNXPSVNIFEHFDXNSDEEEPDVYKAKWSWTNKNKPFVCSNXNRTHYKDQQTKIKCTFDVSMXNKIFDYILQEXIILPKGHIPLPRSXLKHCAHCKWYGSYSHAINDCNVFHQXFQSSIDKGQLXFIDGPKMKFDHEXDPFLVNTIEFVNAKVLIWSSYVEFTNGKSMIVGEPXPKMIKPKGREXYEKSDNDRVXRPTDAKRLRSPPRGXFVQAPKQLEQRFPYGPQIMAWNPCPTLLPSCHFPYFMLWGCQHRCIFLIYHPCQYNFIKEWKPTNSVHDCFSATTKSQFQTKESVDELEGEKKGEKRSKVETKTMEVIIIKVGFNDVPIPIGGMMKAT

SEQ ID NO: 107629 - protein, 216 aa, Oryza sativa
  Clone ID: PAT_MRT4530_11963C.1.pep
MADPSFFVGIVGNVISILVFASPIATFRRIVRSKSTEEFRWLPYVTTLLSTSLWTFYGLHKPGGLLIVTVNGSGAALEAIYVTLYLAYAPRETKRTVVKTRSVEYMPFSLSFFLFLNGGVWSVYSLLVKDYFIGIPNAIGFALGTAQLALYMAYRRTKKPAGKGGDDDEDDEEAQGVARLMGHQVGDGAAAEGPAAAQGAEPEPAQAGGAASRGAR

SEQ ID NO: 107630 - protein, 328 aa, Oryza sativa
  Clone ID: PAT_MRT4530_11964C.1.pep
MADPSFFVGIVGNVISILVFASPIATFRRIVRSKSTEEFRWLPYVTTLLSTSLWTFYGLHKPGGLLIVTVNGSGAALEAIYVTLYLAYAPRETKAKMVKVVLAVNVGALAAVVAVALVALHGGVRLFVVGVLCAALTIGMYAAPMAAMRTVVKTRSVEYMPFSLSFFLFLNGGVWSVYSLLVKDYFIGIPNAIGFALGTAQLALYMAYRRTKKPAGKGGDDDEDDEEAQGVARLMGHQVEMAQQRRDQQLRKGLSLSLPKPAAPLHGGLDRIIKSFSTTPIELHSILHQHHGGHHHHHRFDTVPDDDDEAVAAGGTTPATTAGPGDRH

SEQ ID NO: 107631 - protein, 71 aa, Oryza sativa
  Clone ID: PAT_MRT4530_11965C.1.pep
VNSTPQKKGKDLKEPLQDIFGKNKTIFIEPKIYFSIMEGLVIQFGQKVFYMSIKIRAKQMGNVLWANPLYI

SEQ ID NO: 107632 - protein, 1699 aa, Oryza sativa
  Clone ID: PAT_MRT4530_11966C.1.pep
MSWHRAGVLLLGAQSCLPVPGVPAVGGIGSVLLSMARMGWRLCHVFCPYTVVMAGSINRGGLDLTGFVLELRGMCVVLGYPHGVDYQGKQLSEQEGDDAEPHAAWEVTAVILTGSPERTSLAVTAGGDSFSAACQNAALLTIGTLHQRYPDELQHSPYRYHPRRGGARDYATFRDASSEDDATIMHLARMVEAYDAARIDFHQMVRRGLVENNMKILELRQENLQLKKDLDAVEAQLRQLKIAQGEVCRPKRRRVCRSQKITAHKSTSRPELVRQSLAWTCFVETPRAEPAPVVPQEDGASGVGSTDAHLPSWPIAAVDKQLVGLRMVTTRKNAATGDGSHPEGSNHNHQGNPPSPPPPPPPPPPDTNAILTQILAQQANMMAAFLHHIQNPPQHNAPPPPPQHSKLAEFLRIRPPTFSSSNNPVDALDWLHAVGKKLDTVQCSDEEKVIFAAHQLQGPASLWWDHFKATQPEGQPITWARFTAAFRRTHVPAGVMALKKREFRELKQSNRSVMEYLHEFNNLARYAPEDVREDEEKQEKFLAGMDPELSVRLVSGDYPDFQRLVDKSIRLEAKHKELESHKRRLASFRNQQGANQRVRYTNPYPGGSSSQQQQQQQQPRSAPRPQFVVRVPQPQQQQSQQGTRAPRPPTPAVQPGQGRRDVQGPQCLCFNCFEPGHFADKCPKPRRQQGQAPPRSNNGGKDVIRGRVNHVTAEDVLTTPDVIVGTFLIHSIPATILFDSGASHSFISMPFVGRNQLGVERLRNPLLITTPGGVMTAKYYSPAVPIEIQGIPFPSDLILLDTKNLDVILGMNWLAQFQGVVDCARRTVTLYRGPEQPVVFFAPPTSVRSSELHQIGLSEIPIVREFGDVFPEELPGMPPKREIEFRIDLAPGTTPLYKRPYRMAANELAEVKKQLEELKEKGYIRPSTSPWGAPVIFVEKKDKTKRMCVDYRALNEVTIKNKYPLPRIDDLFDQLKGATVFSKIDLRSGYHQLRIREEDIPKTAFTTRYGLYEFTEDHQHHLRLVLGKLREHQLYAKLSKCEFWLSEVKILGHVISAKGVAVDPETVTAVTDWKQPKTVTQIRSFLGLAGYYWRFIENFSKIARPMTQLLKKEEKFDGHVVAYASRQLRPHEGNYPTHDLELAAVVHALKIWRHYLIGNRCEIYTDHKSLKYIFTQSDLNLRQRRWLELIKDYDVGIHYHPGKANVVADALSRKSHCNTLNVRGIPPELSQQMEALNLSIVGRGFLAALEAKPTLLDQIREAQKNDPDMHGLLKNMKQDKAAGFTEDEHGTLWNGKRVCVPDNRELKQLILQRVKAEHQRPAGLLQPLQVPEWKWDEIGMDFITGLPKTQGGYDSIWVVVDRLTKVARFIPVKTTYGGNKLAELYFARIVSLHGVPKKIVSDRGSQFTSHFWKKLQEELGTRLNFSTTYHLQTDGQTESLNQILKDMLRACVLDFGKTWDKSLPYAEFSYNNSYQASIQMAPYEALYGRKCRTPLLWDQVGESQVFGTDILREAEAKVRIIRDNLKVAQSRQKSYADNQRRNQEFAVDDFVYLRVMPLRGVHRFQTKGKLAPRFVGPFRIIARRGEVAYQLELAASLGNVHDVFHVSQLKKCLRVPSEQADSEQIEVREDLTYVERPVKILDTMERRTRNRIIRFCKVQWSNHAEEEATWEREDELKAAHPNLFASSSESRGRDSVYGG

SEQ ID NO: 107633 - protein, 2050 aa, Oryza sativa
  unsure (1)..(2050): unsure at all Xaa locations
  Clone ID: PAT_MRT4530_11967C.1.pep
RPGPTWQPRGAPEGGLAGTADGRRRARAPMVAGGGHRHGGAAAERGEGRGKRNGRSMAHPGSMATTGTATGAERGGGAARVDGDGGVPAVGDRNGEVDEVGEDAAKPKEAVPKREMVRGNDGGEPELGGDGGERGRRRELDSDGERERRVAETVERGTGSVYIEPGARGMNLSGRDTHGVDYQGKPVPEQEGDDAEPVAAWEVTAVILSGSPERTSLAVTAGGDSFSAACQNAALLAIGTLHQRYPDELQHSPYRYHPRRGGARDYATFRDASSEDDATIMHLARMVEAYDAARIDFHQMVRRGMVDNNMKILELRQENLQLKKDLDVLEAQLCQLKVAQGEVCRPKRRRVCRSQKITARKSTSRPELVCQSLAWTCFVETPRAEPAPVVPQEGEASGVGSTEDALLLTFRPGPSQRRSANTGDGHQPEGSNLNNHGSPPPPPPPPPPPPPDTNAILTQILAQQANMMAAFLHHIQNPPQHNAPPPPPPPQHSKLAEFLRIRPPTFSSSNNPVDALDWLHAVGKKLDTVQCNDEEKVIFATHQLQGPASLWWDHFXATQPEGQPITWARFTAAFRRTHVPAGVMALKKRAFRELKQGNRSVMEYLHEFNNLARYAPEDVREDEEKQEKFLAGMDPELSVRLISGDYPDFQRLVDKSIRLEAKHKELESHKRRLANFRNQQGANQRVRYTNPYPGGSSSQQQQQQPPSAPRPQFVVRVPQPQQPQGQQGTRAPRPPAPAVQPGQGHRDVQGQQSLCFNCFEPGHFADKCPKPRRQQGQAPPRSNNGGKDVIRGRVNHVTAEDVLTTPDVIVGTFLIHSTPATILFDSGASHSFISVPFVGRNQLGVERLRNPMLITTPGGVMTAKYYSPAVPIEIQGIPFPSDLILLDTKNLDVILGMNWLAQFQGVVDCARRTVTLHRGPEQPVVLFAPPTSVSSSELHQIGLLEIPIVREFGDVFPEELPGMPPKREIEFRIDLAPGTTPLYKRPYRMAANELAEIKKQLEELKEKGYIRPSTSPWGAPVIFVEKKDKTKRMCVDYRALNEVTIKNKYPLPRIDDLFDQLKGATVFSKIDLRSGYHQLRIREEDIPKTAFTTRYGLYEFTVMSFGLTNAPAFFMNLMNKVFMEYLDKFVVVFIDDILVYSQSEEDHQQHLRLVLGKLREHQLYAKLSKCEFWLSEVKFLGHVISAKGVAVDPETVTAVTDWKQPKTVTQIRSFLGLAGYYRRFIENFSKIARPMTQLLKKEEKFVWSPQCEKAFKTLKEKLVSSPVLILPDTRKDFLVYCDASRQGLGCVLMQEGHVVAYASRQLRPHEGNYPTHDLELAAVVHALKIWRHYLIGNRCEIYTDHKSLKYIFTQSDLNLRQRRWLELIKDYDVGIHYHPGKANVVADALSRKSRCNTLGVRGIPLELNQQLEALNLSIVSHGFLATLEAKPTLLDQIREAQKNDLDMHGILKNMKQGKAAGFTEDEHGTLWNGNRRVKAEHQRPAGLLQPLQVPEWKWDEIGMDFITGLPKTQGGYDSIWVVVDRLTKVARFIPVKTTYGGNKLAELYFARIVSLHGVPKKIVSDRGSQFISHFWKKLQEELGTRLNFSTAYHPQTDGQTERLNQILEDMLRACVLDFGKTWDNSLPYAEFSYNNSYQASIQMAPYEALYGRKCRTPLLWDQVGESQVFGTDILREAEAKVRTIWENLKVAQSRQKSYADNRRRDLEFAVDDFVYLRVTPLRGVHRFQTKGKLAPRFVGPFRITARRGEVAYQLELPASLGNVHDVFHVSQLKKCLRVPSEQADSEQIEVREDLTYVERPVKILDTMERRTRNRVIRFCKVQWSNHAEEEATWEREDEHPRAPLHRFRHSPPFLPVGIEPAPSHSLSAVAAELRSAAVVAPDHLPPRRRLLRLRRILADLVHPSASLADRRNAVDPVDPSRAATFLRSGCRFRRRRRLRVSRGPPFRFPLSLPSLGRCSAMPVVAGGDHRGEGAASRRPRRRGCLRAHRAAAAWGPAVSRPRPRVRLTRGARGAGRSEPRAPGPPWTVRLPRGPHSRGPGPRAPPFGSAI

SEQ ID NO: 107634 - protein, 1529 aa, Oryza sativa
  unsure (1)..(1529): unsure at all Xaa locations
  Clone ID: PAT_MRT4530_11968C.1.pep
WHRAGVLLLGAQSCLPVPGXPAVGGIGSVLLSMARMGWKLCHVFRLFTVVMAGSINRRGLDLTGFVLELRGMCVVLGYPHGVDYQCRQLPEQEGDDAERHAAWEVTAVILTGSPERTSLAVTAGGDSFSAACQNAALLAIGTLHQRYPDELQHSPYRYHPRRGGARDYAIFRDASSEDDATIMHLARMVEAYDAARIDFHQMVRRGMVKNNMKILELRQENLQLKKDLDAVEAQLHQLKIAQGEMVTTRRSANTGDGNQPKGSNHNNHGSPPPPPPPPPPPPPDTNAILTQILAQQANMMAAFLHHIQNPPQHNAPPPPPQHSKLAEFLRIRPPTFSSSNNPVDALDWLHAVGKKLDTVQCSDEEKVIFAAHQLQGPASLWWDHFQATQPEGQPITWARFTAAFRRTHVPAGVMALKKREFRELKQGNRFVMEYLHEFNNLAQYAPEDVREDEEKQEKFLAGMDPELSVRLVSGDYQDFQRLVDKSIRLEAKHKELESHKRRLASFRNQQGANQRVRYTNPYPGGSSSQQQQQQQQPRSAPRPQFVVRVPQPQQQQSQQGTRAPRPPTPAVQPGQGRRDAPGPQRLCFNYFEPGHFADKCPKPRRQQGQAPPRPNNGGKDVNRGRVNHVTAEDVLTTPDVIVGTFLIHSIPATILFDSGASHSFISVPFVGRNQLGVERLRNPLIITTPGGVMTAKYYSPAVPIEIQGIPFPSDLILLDTKNLDVILGMNWLAQFQGVVDCARRTVTLYRGPEQPVVFFAPPTSVGSSELHQIGLSEIPIVREFGDVFPEELPGMPPKREIEFRIDLAPGTTPQYKRPYRMAANELAEVKKQLEELKEKGYIRPSTSPWGAPVIFVEKKDKTKRMCVDYRALNEVTIKNKYPLPRIDDMFDQLKAATVFSKIDLRSGYHQLRIREEDIPKTAFTTRYGLYEFTVMSFGLTNAPAFFMNLMNKVFMEYLDKFVVVFIDDILVYSQSEEEHQHHLSLVLGKLREHQLYAKLSKCEFWLSEVKFLGHVISAKGVAVDPETVTAVTDWKQPKTVTQIRSFLGLVGYYRRFIENFSKIARPMTQLLKKEEKFVWSPQCEKAFQTLKEKLVSSQVLILPDTRKDFMVYCDASRQGLGCVLMQEGHVVAYASRQLRPHEGNYPTHDLELAAVVHALKIWRHYLIGNRCEIYTDHKSLKYIFTQSDLNLRQRRWLELIKDYDVGIHYNPGKANVVADALSRKSHCNTLDVRGIPPELNQQMEALILSIVGRGFLATLEAKPTLLDQIREAQKNDPDMRGLLKNMKQGKAAGFTEDEHGTLWNGNRVCVPDDKELKQLILQEAHESPYSIHPGSTKMYLDLKEKYWWVSMKREIAELVALCDVCQRVKAEHQRPAGLLQPLQVPEWKWDEIGMDFITGLPKTQGGYDSIWVVVDRLTKVARFIHVKTTYGGNKLAELYFARIKCLRVPPEQADSEQIEVREDLTYVERPVRILDTMERRTRNRVIRFCKVQWSNHAEEEATWEREDELKAAHPNLFGSSSESRGRDSV

SEQ ID NO: 107635 - protein, 176 aa, Oryza sativa
  Clone ID: PAT_MRT4530_11969C.1.pep
MEEQQHLHPGGGGGKKSNKITEIVRLQQMLKKWRKLSVAPKDAAATAGNGGGGESKAKKFLKRTLSFTDGGASPGGTPPPRGHRPRRRGPAAQRFVIPTDYLKHRAFAALLREAEEEFGFQQEGVLRIPCEVPAFEAILKAVEKNKKDNAAAFCYCSYEYAADEVALGAPNNPLCR

SEQ ID NO: 107636 - protein, 218 aa, Oryza sativa
  Clone ID: PAT_MRT4530_1196C.1.pep
MNSHIRGWGWLISTTHGESNGPKLITIGDGGGGDGAPFTIPVPRGDPHPSMHACRRRPSLRRPLPPAIVTPTGASGRRRHILAASDRRRCALAASGRHRADRRLRPSSPRARRLRPWSRHPPPPASTPSAAMDSSAVRRRRYDQQFVERAVHGAISTRTSWDLSNNPRSTGRAVELPPFDRQGCRTAPVRQAAVELPLFDRISVELAQFDRVVFSIYL

SEQ ID NO: 107637 - protein, 1806 aa, Oryza sativa
  Clone ID: PAT_MRT4530_11970C.1.pep
MSWHRAGVLLLGAQSCLPVPGVTAVGGIGSVLLSIARMGWKLCHVFRLYTVVMAGSVSRRGLDMTGFVLELRGMCVVLGYPHGVDYQARPLPEQEGDDAEPHAAWEVTAVILTGSPERTSLAVTAGGDSFPAACQSAALLAIGTLHQRYPDELQHSPYRYHPRRGGARDYATFRDASSEDDATIVHLACMVEAYDAARIDFHQMVRRGMVENNMKILELRQENLQLKKDLDAVEAQLHQLKIAQGEVCRPKRRRVCRSQKITARKSTSRPELVRQSLAWTCFMETPRAEPAPMVPQEGEASGVGSTEDALLLTFRPGPSQRRSVNTGDGNQPEGSNHNNHGSPPPPPPPPPPPPPDTNAILTQILAQQANMMTAFLHHLQNPLQQNAPPPPPQHSKLAEFLRIRPPTFSSSNNPVDALDWLHAVGKKLDTVQCSDEEKVIFAAHQLQGPASLWWYHFQATQPEGQPITWARFTAAFRRTHVPAGVVALKKREFRELKQGNLSVMEMCGKMRRSKRSSGMDPELSVRLVSGDYPDFQRLVDKSIRLEAKHKELESHKRRLANFRNQQGANQRVRYTNPYPGGSSSQQQQQQQPRSAPRPQFVVRVPQPQQQQSQQGTRAPRPSTPTVQPGQGRRDAQGPQRLCFNCFEPGHFADKCPKPRRQQGQAPPRSNNGGKDVIRGRVNHVTAEDVLTTPDVIVGTFLIHSIPATILFDSGASHSFISVPFVGRNQLGVERLRNPLLITTPGGVMTAKYYSPAVPIEIQGIPFPSDLILLDTKNLDVILGMNWLAQFQGVVDCARRTVTLYRGPEQPVVFFAPPTSVSSSELHQIGLSEIPIVREFGDVFPEELPGMPPKREIEFRIDLAPGTTPLYKRPYRMAANELAEVKKQLEELKEKGYIRPSTSPWGAPVIFVEKKDKTKRMCVDYRALNEVTIKNKYPLPRIDDLFDQLKGATVFSKIDLRSGYHQLRIREEDIPKTAFTTRYGLYEFTVMSFGLTNAPAFFMNLMNKVFMEYLDKFVVVFIDDILVYSQTEEDHQHHLRLVLGKLREHQLYAKLSKCEFWLSEVKFLGHVISAKGVAVDPETVTAVTDWRQPKTVTQIRSFLGLAGYYRRFIENFSKIARPMTQLLKKEEKFVWSPQCEKAFQTLKEKLVSSPVLILPDTRKDFMVYCDAARQGLGCVLMQDGHVVAYASRQLRPHEGNYPTHDLELAAVVHALKIWRHYLIGNCCEIYTDHKSLKYIFTQSDLNLRQRRWLELIKDYDVGIHYHPGKANVVADALSRKSHCNTLNVRGIPLELNQQMEALNLSIVGRGFLAALEAKPTLLDQIREAQKNDPDMRGLLKNMKQGKATGFTEDEHGTLWNGNRVCVPDNRELKQLILQEAHESPYSIHPGSTKMYLDLKKKYWWVSMKREIAEFVALCDVCQRVKAEHQRPAGLLQPLQVPEWKWDEIGMDFITGLPKTQGGYDSIWVVVDRLTKVARFIPVKTTYGGNKLAELYFARIVSLHGVPKKIVSDRGSQFTSHFWKKLQEELGTRLNFSTAYHPQTDGQTERLNQILEDMLRACVLDFGKTWDKSLPYAEFSYNNSYQASIQMAPYEALFQTKGKLAPRFVGPFRIIARRGEVAYQLELPASLGNVHDVFHVSQLKKCLRVPSEQADSEQIEVREDLTYVERPVKILDTMERRTRNRVIRFCKVQWSNHAEEEATWEREDERRAPVRRRRRPGPSPASASPPSASPHPRRPRPPLRFGRRPPERRRPRRPVPHRRLSPLRSPFPSSPSTRGEPWTAVSFPPSLPSLGRRSAVPMAAAGDH

SEQ ID NO: 107638 - protein, 1917 aa, Oryza sativa
  Clone ID: PAT_MRT4530_11971C.1.pep
MGKPSNKRSSLEMKALVSSSCLPSSACGRRPSLPLFPMAGSVTRRGLDMTGFVLELRGMCVALGYPHGVDYQARPLPEQEGDDAEPHAGWEVTAVILAGSPERTSLTVTAGGDSFPAACQSAALLAIGTLHQRYPDELQHSPYRYHPRHGGARDYATFRDASSEDDATIVHLARMVEAYDAARIDFHQMVRRGMVENNMKILELRQENLQLKKDLDAVEAQLHQLKIAQGEVCRPKRRRVCRSQKITARKSTSRPELVRQSLAWTCFVETPRAEPAPVVPQEGEASGVGSTEALSLFAGSVWGFQMVTTRRNANTGDGNQPESSNHNHQGNPPPPPPPPPPPPPDTNAILTQILAQQANMMTAFLHHLQNPPQHNAPPPPPQHSKLAEFLRIRPPTFSSSNNPVDALDWLHAVGKKLDTVQCSDEEKVIFAAHQLQGPASLWWDHFQATQPEGQPITWARFTAAFRRTHVPAGVVALKKREFRELKQGNRSVMEYLHEFNNLARYAPEDVREDEEKQEKFLAGMDPELSVRLVSGDYPDFQRLVDKSIRLEAKHKELESHKRRLANFRNQQGANQRVRYTNPYPGGSSSQQQQQQQQPRSAPRPQFVVRVPQPQQQQNQQGTRAPHPPTPTVQSGQGRRDAQGQQRLCFNCFEPGHFADKCPKPRRQQGQAPPRSKNGGKDVIRGRVNHVTAEDVLTTPDVIVGTFLVHSIPATILFDSGASHSFIFVPFVGRNQLGVERLRNPLLITTPGGVMTAKYYSPAVPIEIQGIPFPSDLILLDTKNLDVILGMNWLAQFQGVVDCARRTVTLYRGPAQPVVFFAPSTSIRSSELHQIGLSEIPIVREFGDVFPEELPGMPPKREIEFRIDLAPGTTPLHKRPYRMAANELAEVKKQLEELKEKGYIRPSTSPWGAPVIFVEKKDKTKRMCVDYRALNEVTIKNKYPLPRIDDLFDQLKGATVFSKIDLRSGYHQLRIREEDIPKTAFTTRYGLYEFTVMSFGLTNAPAFFMNLMNKVFMEYLDKFVVVFIDDILIYSHSEEDHQHHLRLVLGKLREHQLYAKLSKCEFWLSEVKFLGHVISAKGVAVDPETVTAVTDWKQPKTVTQVRSFLGLAGYYRRFIENFSKIARPMTQLLKKEEKFVWSPQCEKAFQTLKEKLVSSPVLILPDTRKDFMVYCDASRQGLGCVLMQDGHVVAYASRQLRPHEGNYPTHDLELAAVVHALKIWRHYLIGNRCEIYTDHKSLKYIFTQSDLNLRQRRWLELIKDYDVGIHYHPGKANVVADALSRKSHCNTLNVRGIPPELSQQMEALNLSIVSRGFLAALEAKPTLLDQIREAQKNDPDMHGLLKNMKQGKAAGFTEDEHGTLWNGKRVCVPDNRELKQLILQEAHESPYSIHPGSTKMYLDLKEKYWWVSMKREIAEFVALCDVCQRVKAEHQRPAGLLQPLQVPEWKWDEIGMDFITGLPKTQGGYDSIWVVVDRLTKVARFIPVKTTYGGNKLAELYFARIVSLHGVPKKFVSDRGSQFTSHFWKKLQEDLGTRLNFSTAYHPQTDGQTECLNQILEDMLRACVLDFGKTWDKSLPYAEFSYNNSYQASIQMAPYEALYGRKCRTPLLWDQVGESQVFGTDILREAEAKVRTIRDNLKVAQSRQKSYADNRRCDLEFAVDDFVYLRVTPLRGVHRFQTKGKLAPRYVGPFRIVARRGEVAYQLELPASLGNVHDVFHVSQLKKCLRVPSEQADSEQIEVREDLTYVERPVKILDTMERRTRNRVIRFCKVQWSNHAEEEATWEREDELLRPFPPLAALPPRRIRARDVALSLRRRRRAPVRRCRRPGPPPTSAPPHSGSPHPRQPRPPLRVGRRPPERRRPRRPEPRRCLPPLRPPPPSPPSPRGEPWTVASFPPSLPSLGHLSAAPVVAGGDH

SEQ ID NO: 107639 - protein, 187 aa, Oryza sativa
  unsure (1)..(187): unsure at all Xaa locations
  Clone ID: PAT_MRT4530_11972C.1.pep
SPGGFWSEKNFXGKPPGIFFKIGTKGGGKENNPFKKKIXFFSPGMVFVPVGEPFGAKIFSMGKIXGGNPFGAGPFSPKGLRWPPENEFEHPFPQGKFFSGISKKLKGAALDFHWGNSIGGGGGPTPKIVRDFIKVQTKPKKRQKGGFFFWGVFQRKGGFPWKFLFPEGKKNFFLRFGQRVVIWRKIW

SEQ ID NO: 107640 - protein, 651 aa, Oryza sativa
  Clone ID: PAT_MRT4530_11973C.1.pep
MMNAFLHHLQNPPQQNAPPPPPQHSKLAEFLRIRPPTFSSSNNPVDALDWLHAVGKKLDTVQCSDEEKVVFAAHQLQGPASLWWDHFQATQPEGQPITWARFTAAFRRTHVPAGVVALKKREFRELKQGNRSVMEYLHEFNNLARYAPEDVREDEEKQEKFLAGMDPELSVRLVSGDYPDFQRLVDKSIRLEAKHKELESHKRRLANFRNQQGANQRVRYTNPYPGGSSSQQQQQQQQPRSAPRPQFVSGQGRRDASGPQRLCFNCFEPGHFADKCPKPRRQQGQAPPRSNNGGKDVIRGRVNHVTAEDVLTTPDVIVGTFLVHSIPATILFDSGASHSFISVPFVGRNQLGVERLRNPLLITTPGGVMTANTAYHPQTDGQTERLNQILEDMLRACVLDFGKTWDKSLPYAEFSYNNSYQASIQMAPYEALYGRKWRTPLLWDQVGESQVFGTDILREAEAKVRIIRDNLKVAQSRQKSYADNRRRDLEFAVDDFVYLRVTPLRGVHRFQTKGKLAPRYVGPFRIVARRGEVAYQLELPASLGNVHDVFHVSQLKKCLRVPSEQADSEQIEVREDLTYVERPVKILDTMERRTRNRVIRFCKVQWSNHAEEEATWEREDELKAAHPVVTANQGHSVADDYEMLLGEYWQT

SEQ ID NO: 107641 - protein, 987 aa, Oryza sativa
  unsure (1)..(987): unsure at all Xaa locations
  Clone ID: PAT_MRT4530_11974C.1.pep
SGPQRLCFNCFEPGHFADKCPKPRRQQGQAPPRSNNGGKDVIRGRVNHVTAEDVLTTPDVIVGTFLVHSXPLYRGPEHPVVFFAPPTSGMPPKREIEFRIDLAPGTTPLHKRPYRMAANELAEVKKQLEELKEKGYIRLSTFPWGAPVIFVEKKDKTKRMCVDYRALNEVTIKNKYPLPRIDDLFDQLKGATVFSKIDLRSGYHQLRICEEDIPKTAFTTRYGLYEFTVMSFGLTNAPAFFMNLMNKVFMEYLDKFVVVFIDDILIYSQSEEDHQHHLRLVLGKLREHQLYAKLSKCEFWLPEVKFLGHVISAKGVAVDPETVTAVTDWKQPKTVTQVRSFLGLAGYYRRFIENFSKIARPMTQLLKKEEKFVWSPQCEKAFQTLKEKLVSSPVLILPDTRKDFMVYCDASRQGFGCVLMQDGHVVAYASRQLRPHEGNYPTHDLELAAVVHALKIWRHYLIGNRCEIYTDHKSLKYIFTQSDLNLRQRRWLELIKDYDVGIHYHPGKANVVADALSRKSHCNTLNVRDIPPELNQQMEALNLSIVGRGFLAALEAKPTLLDQIREAQKNDPDMHGLLKNMKQGKAAGFTEDEHGTLWNGKRVCVPDNRELKQLILQEAHESPYSIHPGSTKMYLDLKEKYWQSTSDRPDFSNLSKYQNGNGMKLGWISSPDFQKPKVDMILYGTAYHPQTDGQTERLNQILEDMLRACVLDFGKTWDKSLPYAEFSYNNSYQASIQMAPYEALYGRKCRTPLLWDQVGESQVFGTDILREAEAKVRIFRDNLKVAQSRQKSYADNRRRDLEFAVGDFVYLRVTPLRGVHRFQTKGKLAPRYVGPFRILARRGEVTYQLELPASLGNVHDVFHVSQLKKCLRVPSEQADSEQIEVREDLTYVERPVKILDTMERWTRNRVIRFCKVQWSNHAEEEATWEREDELKAAHPDLFANAAASEDTLFVEVEADVWESEQGNLAQFFPSPEEELLEDEGFGV

SEQ ID NO: 107642 - protein, 694 aa, Oryza sativa
  Clone ID: PAT_MRT4530_11975C.1.pep
MPPKREIEFRIDLAPGTTPLYKRPYRMAANELAEVKKQLEELKEKGYIRPSTSPWGAPVIFVEKKDKTKRMCVDYRALNEVTIKNKYPLPRIDDLFDQLKGYYRRFIEDFSKIARPMTQLLKKEEKFVWSPQCEKVFKTLKEKLVASPVLILPDTRKDFMVYCDASRQGLGCVLKQDGHVVAYASRQLRPHEGNYPTHDLELAAVVHALKIWRHYLIGNRCEIYTDHKSLKYIFTQSDLNLRQRRWLELIKDYDVGIHYHPGKANMVADALSRKSHCNTLNVRGIPPELSQQMEALNLSIVGRGFLAALEAKPTLLDQICEAQKNDPDMHGLLKNMKQGKAAGFTEDEHGTLWNGNRVCVPDNRELKQLILQEAHESPYSIHPGSTKMYLDLMEKYWWVSMKREIAEFVALCDVCQRVKAEHQRPAGLLQPLQVPEWKWDEIGMDFITGLPKTQGGYDSIWVVVDRLTKVARFIPVKTSYGGNKLAELYFARIVSLHGVPKKIVSDRGSQFTSHFWKKLQEELGTRLNFSTAYHPQTDGQTERLNQILEDMLRACVLDFGKTWDKSLPYAEFSYNNSYQASIQMAPYEALYGRKCRTPLLWDQVGESQVFGTDILREAEAKADSEQIEVREDLTYVERPVKILDTMERRTRNRIIRFCKVQWSNHAEEEATWEREDELKAAHPDLFASSSESRG

SEQ ID NO: 107643 - protein, 785 aa, Oryza sativa
  Clone ID: PAT_MRT4530_11976C.1.pep
MAGSVTRRGLHMTGFVLELRGMCVVLGPLPEQEGEDAEPHAGWEVTAVILSGSPERTSLAVTAGGDSFPAACQNAALLAIGTLHPRYPDELQHSPYRYHPRRGGARDYATFRDASSEDDATVVHLARMVEAYDAARIDFHQMVRRGMVENNLKILELRQENLQLKKDLDALEAQLHQLKIAQGEDSRPKRRRVCRSQKITARKSTSRPELVRQSLAWTCFVETPRAEPAPVVPQEGEASGVGSSEVVWGMVTPMVTTRRNVNTGEGNQPEGSNHNHQGNPPPPPPPPPPPPPDTNAILTQILAQQANMMTAFLHHLQNPPQQNAPPPPPQHSKLAEFLRIRPPTFSSSNNPVDALDWLHAVGKKLDTVQCSDEEKVVFAAHQLQGPASLWWDHFQATQPEGQPITWARFTAAFRRTHVPAGVVALKKREFRELKQGNRSVMEYLHEFNNLARYAPEDVREDEEKQEKFLAGLDPELSVRLVSGDYPDFQRLVDKSIRLEAKHKELESHKRRLANFRNQQGANQRVRYTNPYPGGSSSQQQQQQQQQQPRSAPRPQFVVRIPQPQQQQGQQGTRAPRPPTPAVQPVQGRRDAQGQQRLCFNCFEPGHFADKCPQPRRQQGQAPPRSNNGGKDVIRGRVNHVTAEDVLTTPDVIVEKKDKTKRMCVDYRALNEVTIKNKYPLPRIDDLFDQLKGATVFSKIDLRSGYHQLRIREEDIPKTAFTTRYGLYEFTSLWLYVMCASVSRQNTNDRPDFSNLSKCQNGSGMKLGWISSPAFQKPKVDMILYG

SEQ ID NO: 107644 - protein, 159 aa, Oryza sativa
  Clone ID: PAT_MRT4530_11977C.1.pep
WPPAGSRRCTWAAATWRRPGRGRRRTAARAPPRAPAPASPRRTGASPARRQPPRRRPRRRRTPWRTRPWPCPPWRRRRGRGGSCRRRSPRSWRAPTRPPPPRRGTTRTAARRSRRPRAGRPSPPPRTCSRSSPPPPARARSTPRRRAPRRRRRPTRKPS

SEQ ID NO: 107645 - protein, 1436 aa, Oryza sativa
  Clone ID: PAT_MRT4530_11978C.1.pep
MEMEEVGGRWTSVPGVPAVGGIGSVLLSMARMDWKLCHVFRLYTVVMAGSVTRRGLDMTGFVLELRGMCVVLGYPHGVDYQARPLPEQEGDDAEPHAGWEVTAVILSGSPERTSLAVTAGGDSFPAACQNAALLAIGTLHQRYPDELQHSPYRYHPRRGGARDYATFRDASSEDDATIVHLARMVEAYDAARIDFHQMVRRGMVENNLKILELRQENLQLKKDLDAVEAQLHQLKIAQGEDCRPKRRCVCRSQKITARKSTSRPELVRQSLAWTCFVETPRAEPAPVVPQEGEASGVGSTEDALLLTFRPGPSQRRNANTGDGNQPEGSNHNHQGNPPPPPPPPPPPPPDTNAILTQILAQQANMMTAFLHHLQNPPQHNAPPPPPQHSKLAEFLRIRPPTFSSSNNPVDALDWLHAVGKKLDTVRCSDEEKVVFAAHQLQGPASLWWDHFQATQPEGQPITWARFTAAFRRTHVPAGVVALKKREFRELKQGNRSVMEYLHEFNNLARYAPEDVREDEEKQEKFLAGMDPELSVRLVSGDYPDFQRLVDKSIRLEAKHKELESHKRRLANFRNQQGANQRVRYTNPYPGGTSSQQQQQQQPRPAPRPQFVVRVPQPQQQQNQQGTRAPRPPTPTVQPVQGRRDAQGPQRLCFNCFEPGHFADKCPKPRRQQGQAPPRSNNGGKDVIRGRVNHVTAEDVLTTPDVIVGTFLVHSIPATILFDSGASHSFISVPFVGRNQLGVERLRNPLLITTPGGVMTAKYYSPAVPIEIQGIPFPSDLILLDTKNLDVILGMNWLAQFQGVVDCARRTVTLYRGPEQPVVFFAPPTSVRSSELHQIGLSEIPIVREFGDVFPEELPGMPPKREIEFRIDLAPGTTPLYKRPYRMAANELAEVKKQLEELKEKGYIRPSTSPWGAPVIFVEKKDKTKRMCVDYRALNEVTIKNKYPLPRIDDLFDQLKGATVFSKIDLRSGYHQLRIREEDIPKTAFTTRYGLYEFTVMSFGLTNAPAFFMNLMNKVFMEYLDKFVVPRRAAVAAAVVSRRRHHRVRKVAAVPVHRFAAAEDRRSTVAAVDPIFSAAFSSTPPPSVGLPPTFWSSVSSPRRDLRLGALRLCRRAAVRRRACAVRAVRAAEPPPVLTSSLTPFPRYRGGTEAHGDMMWGCVLWVQWYTSGQRYYRRFIENFSKIARPMTQLLKKEEKFVWSPQCEKAFQTLKEKLVSSPVLILPDTRKDFMVYCDASRQGLGLSVHGGPGARGWRRPAPWVPRVSRTRGRGRLTAGPHLAAAGRARRRPRRHGRRENGAPAPRWSPPATNGAAEWHPRERREGGSERSGPRLTPVDGDDGNGGRKRRKAAARFGTTRTTAFRRSASEAEGRTRSTTTRRSRRRRRREGRKSGATAAANRSSAATAERRCDGASTIPTGRASGERRKRRRRARGTFK

SEQ ID NO: 107646 - protein, 261 aa, Oryza sativa
  unsure (1)..(261): unsure at all Xaa locations
  Clone ID: PAT_MRT4530_11979C.1.pep
MACVVCAGDDRRFCQFGELTWPHARIQLTITAILFWNDTWAINPTLYQKFEALFSHATDQDVIVKSVFQGGDEQHLHTYSLRQDCLSCITKSFFLELGIKASAAAAPCPPPSTLHTEPEPRRWQPHPXPVHGPLSSTVHIEARRRRPRPPSGAHHRRPRPSSTPQPVAASSTPELITSAVTITTQDPPLSTPHAGARRQRRLYHHAGSSAVHATMSHARARRRPRPPRRSSSSALLPSPRCDILLHRTSKLWKRGASCWRD

SEQ ID NO: 107647 - protein, 89 aa, Oryza sativa
  unsure (1)..(89): unsure at all Xaa locations
  Clone ID: PAT_MRT4530_1197C.1.pep
PIXFYLIILLFYYIXISRAIASILLFTSXVRIYIGCIADSSKPYRYRLDYFIGLSDQTDWHARTSPRFGPALELSRSPRPVCIFRIISS

SEQ ID NO: 107648 - protein, 101 aa, Oryza sativa
  Clone ID: PAT_MRT4530_11980C.1.pep
MKLSMKRPPYNRTSRMECMRMKSSWSGYCQCEVIEKLCRDASHVLRQGSCVGQSRSVGKVYIHCRVTSPFQVTRLTERGAPHRETARAPLCRFGQGRWVRF

SEQ ID NO: 107649 - protein, 843 aa, Oryza sativa
  Clone ID: PAT_MRT4530_11981C.1.pep
MASPYDHQSPHAQHPSGLPRPPGAGAGAAAGGFARGLMKQPSRLASGVRQFASRVSMKVPEGVGGMRPGGGRMTRMQSSAQVGLRGLRFLDKTSGGKEGWKSVERRFDEMNRNGRLPKESFGKCIGMGDSKEFAGELFVALARRRNLEPEDGITKEQLKEFWEEMTDQNFDSRLRIFFDMCDKNGDGMLTEDEVKEVIILSASANKLAKLKGHAATYASLIMEELDPDDRGYIEIWQLETLLRGMVSAQAAPEKMKRTTSSLARTMIPSRYRSPLKRHVSRTVDFVHENWKRIWLVALWLAVNVGLFAYKFEQYERRAAFQVMGHCVCVAKGAAEVLKLNMALILLPVCRNTLTTLRSTALSHVIPFDDNINFHKVIAATIAAATAVHTLAHVTCDFPRLINCPSDKFMATLGPNFGCRQPTYADLLESAPGVTGILMIIIMSFSFTLATHSFRRSVVKLPSPLHHLAGFNAFWYAHHLLVLAYVLLVVHSYFIFLTREWYKKTTWMYLIVPVLFYACERTIRKVRENNYRVSIVKAAIYPGNVLSLHMKKPPGFKYKSGMYLFVKCPDVSPFEWHPFSITSAPGDDYLSVHIRTLGDWTTELRNLFGKACEAQVTSKKATLSRLETTVVADAQTEDTRFPKVLIDGPYGAPAQNYKKYDILLLIGLGIGATPFISILKDLLNNIKSNEEVESIHGSEIGSFKNNGPGRAYFYWVTREQGSFEWFKGVMNDVAESDHNNIIEMHNYLTSVYEEGDARSALIAMVQSLQHAKNGVDIVSGSRIRTHFARPNWRKVFSDLANAHKNSRIGVFYCGSPTLTKQLKDLSKEFSQTTTTRFHFHKENF

SEQ ID NO: 107650 - protein, 40 aa, Oryza sativa
  unsure (1)..(40): unsure at all Xaa locations
  Clone ID: PAT_MRT4530_11982C.1.pep
DTGIGIDFQNCSRAFTAHCCSFHYXDRLSMHREKADEAYV

SEQ ID NO: 107651 - protein, 446 aa, Oryza sativa
  Clone ID: PAT_MRT4530_11983C.1.pep
MKAICSSCLSVKGGEGGCRIFVGRYSIVEIAYTSDGFKIKDKQDNECDNEVKRFLQKFLQWGGGGGKEHEGLPAALTSRRLRLSGDGGHRAPASRRRRASLNGHHLCGRSHRTAWLLPDPGRQDLPPALLVGGLGFVRPGDGEREPSEFREHSSPQGERKPEVMEEIHGMQESKTASVIKVAREPAVIINGVPDLPPDVASESQPEPRNAAEPPVDHRFGEFLEGRKVRKPFGDKHFVGKVDKYDSESNWYSVVYQDGDQEDLEWKEVEEIMLPLDITIPLKTLISDKFALQNTAPVFKPKVGRPRKVYAITDGNTNNAMEDQMMTGAANEHQSNNLLALVPASTSNDAYVNASSQPRKRGRPRKDATMYPRKDATIPANTQPKRRGRPPKNRNLSGNAQSAECTPQNSVLIRNAQTVRAEKLAKAERLKRENMHAQGAPPGTQFF

SEQ ID NO: 107652 - protein, 94 aa, Oryza sativa
  Clone ID: PAT_MRT4530_11984C.1.pep
RVELVHGVEVQGRLLLALPSGQEFDEKKKHNLINCREGRRSMSISLHGQCNRECPYDAKHYKNVMLLLQHQRQIYISPRLIKRIISFPLRGQVV

SEQ ID NO: 107653 - protein, 213 aa, Oryza sativa
  Clone ID: PAT_MRT4530_11985C.1.pep
GRVGPAALTSRRLRLSGDGGHRAPASRRRRASLNGHHLCGRSHRTAWLLPDPGRQDLPPALLVGGLGFVRPGDGEREPSEFREHSSPQGERKPEAVMEEIHGMQESKTASVIKVAREPAVIINGVPDLPPDVASESQPEPRNAAEPPVDHRFGEFLEGRKVRKPFGDKHFVGKVDKYDSESNWYSVVYQDGDQEDLEWKEVEEIMLPLDILSR

SEQ ID NO: 107654 - protein, 90 aa, Oryza sativa
  Clone ID: PAT_MRT4530_11986C.1.pep
MARVIGRYCSGEGDQPRVVVAGGKRRWRKAVPEGKIKENFVTAPWKRKRRRRLCAPIGCRRRRAHTSAARELGGGEGGTRHSIDATWRRR

SEQ ID NO: 107655 - protein, 56 aa, Oryza sativa
  Clone ID: PAT_MRT4530_11987C.1.pep
LRLTCKSILALYTNVMTRRGPGRRNISAASNLTDIRSLLTRTIYMLGSWLGSRPCR

SEQ ID NO: 107656 - protein, 46 aa, Oryza sativa
  Clone ID: PAT_MRT4530_11988C.1.pep
SALKLIDDICAAVHSACGANVSCADITMLATRDAIVASGVCPTSTL

SEQ ID NO: 107657 - protein, 312 aa, Oryza sativa
  Clone ID: PAT_MRT4530_11989C.1.pep
MWWPGEGLRVARPEGLRGVTWHPEDGNNNKEEIVESRKEKKGIREQEVLAIDPRQPTKQWHMFLFGVLILGVRRRKSSHAASPPLRTFLSRREQLRAAPSSPSPVEEGEQDASEAPPRVSDDEDGGSRRRFTAVSGNDADEVDRTPLFFRESRPTAFPFFPDLRSWLLAAVSSGKLGSTAANFTYTLRADLTCHHPLYHRDAPDEKAAIEEVRPTLDREKEVSPSWPIEHLRRTTRADRRMGHRPLLYEVVELDLLIGLPYGLSFSAVDHHLHRSEEAEDVAVRSGTTLPIFLPAARKALGQETGGVPLIFD

SEQ ID NO: 107658 - protein, 152 aa, Oryza sativa
  unsure (1)..(152): unsure at all Xaa locations
  Clone ID: PAT_MRT4530_1198C.1.pep
RSLQXVPIVSIEXRXXXRWEAXXXFSKTQDIQIVADDLTVTNPLRIKKAIDQKAANALLLKVNQIGTLTESIQAAKDSFADGWGVMVSHRSGETEDVTIADIAVGLRAGQIKTGAPARSERLAKLNQILRIEEELGSNAVFAGESFRKAINM

SEQ ID NO: 107659 - protein, 79 aa, Oryza sativa
  unsure (1)..(79): unsure at all Xaa locations
  Clone ID: PAT_MRT4530_11990C.1.pep
MRGNHYEAHQPKPTTYAVSYCRIRLNRLTPSDSNSADLSRSRFGLQPIFTLFPGRFPSRLXSRFLLHLRSLDYQIWSLT

SEQ ID NO: 107660 - protein, 95 aa, Oryza sativa
  Clone ID: PAT_MRT4530_11991C.1.pep
TTYTFINNYEDLPPLINRSPITKEMVRGTSFHRIIGAFYACMPPLGNGGNNRSNREKEKKLMPGENGKKKNWADLFFEQLVGTIGHAPPRPGGGG

SEQ ID NO: 107661 - protein, 155 aa, Oryza sativa
  Clone ID: PAT_MRT4530_11992C.1.pep
MGMLSLKRLMARQRQREWRRRRQKAQKPRADGSIASERKGNNYQCGKRLRYSWPNFPEDIEYHVLDSSTYYAPMSYPTGLDVEELDCLVESPQGEGRVAPEAGSRGDGAGAVLGEATKRGAPRHATPPEGKTTTRTGGGGGGGGNKCRSASALGQ

SEQ ID NO: 107662 - protein, 444 aa, Oryza sativa
  Clone ID: PAT_MRT4530_11993C.1.pep
MQGQQKQNAGGGGGDNASPCIVLDGPIIVGAGPSGLAVAATLRQHGAPFTVVERSGGVADLWTNRTYDRLRLHLPKVFCELPHVAFPPDFPTYPTKHDFLRYLHSYAARFAIAPLLRRTVTRAWYDHPASLWRVTTTTTSSSATSVITEYASPWLVVASGENAEVVVPKVKGRERFAGEALHSSEYRSGERFRGMRVLVVGCGNSGMEMCLDLCEHGAMPFMSVRSGVHVLPREMFGASTFGIAMKLLRWLPIKMVDRFLLLVARMVLGDTEKYGLKRPKLGPLEIKNITGKSPVLDEGAWSLIKSGNIKKERMYDNSGYASGQRSFFLKWVEIVPEVESFSGNGARFVDGNEMAFDAVIFATGYRSNVPSWLQEDGELFTEEGKLRSSGSSSEWRWRGPNGLYCVGFSGRGLLGAGADALRAAADIAGRWQETQQAAANISSV

SEQ ID NO: 107663 - protein, 478 aa, Oryza sativa
  Clone ID: PAT_MRT4530_11994C.1.pep
MKKTMVLYPGLSVSHFLPMMKLADELVEHGYAVTVALIDDPLQKQIAFTATVDRVISSKPSICFHRLPRVDHLPAVTTNDGEFYLPGYLDLVRRHNEPLHGFLSSHFRGGIQALVVDMMSVEALDIAERLKVPGYLFHPSNASLFAFFLQIPSICAESKRSFSELGDTPLEIPGLPPMPASHFIDNRPEEPPESEVYKAVMDLVRRYTNKCSNGFLVNTVDSLEARVVNTLRHARRQGGRALPPFYCVGPLVNKAGERGERPERHECLAWLDRQPDRTVVFLCFGSTGIGNHSTEQLREIAVGLEKSGHRFLWVVRAPVVSDDPDRPDLDALLPAGFLERTSGQGAVVKQWAPQVDVLHHRATGAFVTHCGWNSVLEGITAGVPMLCWPLHSEQKMNKVLMVEEMGIAVEMVGWQQGLVTAEEVEAKVRLVMESEAGVELRARVTAHKEAAAVAWTDVGSSRAAFTEFLSNADSRQTS

SEQ ID NO: 107664 - protein, 55 aa, Oryza sativa
  Clone ID: PAT_MRT4530_11995C.1.pep
MAYGDDGGGATASARRGSEAREGENGYGGTMTHLRLVLVSLCCYGQVIGGRRYAG

SEQ ID NO: 107665 - protein, 95 aa, Oryza sativa
  unsure (1)..(95): unsure at all Xaa locations
  Clone ID: PAT_MRT4530_11996C.1.pep
DTILDAGTNNVTTTQGHDDPGXKCAKHYKAGARYNKRRDVLKIGPNQPDKLAIDLNAQGLAXCYAIICHENGMVPIGEPDILDHGPHDIDRSAYK

SEQ ID NO: 107666 - protein, 614 aa, Oryza sativa
  Clone ID: PAT_MRT4530_11997C.1.pep
MVKIVTYNVNGLRPRVAQHGSLRRLLDALDADIICFQETKLSRQDLSGDVIMAEGYEAFISCNRSSKGRGAYSGVATFCRVTSAFSSQEVALPVAAEEGFTGLQETAKNSETIGDFVLVTPVEEEGLGEVTKEELLKVDNEGRCVITDHGHFVLFNIYGPAVEEDDIERVRFKLLFYKILQIGVMPNLDSRSKQYSNMKPLGNDKLLHYPFPNSRFRKWLRSMLREHGGPFFDAFRSKHPERVGAYTCFNQKVGAEVYNYGSRIDHILISGACFHHCGSVDDHSIFPCHVEECEIMDHFRRGNSENMSMWKGGRSSKLEGSDHIPVYIVLNEIPELPVHNTPSSAARYLPEIRGRQQSIVSFLRKGMIYEHKDAMSMDRADESCCGGGLERKAIYKEEPPTDIAKFSKGNDLHSVIKRKIRDQLLNEGSSGNSHNSTAALLATQSRKASFSCSKAVSNKKNKHNLSSQPTIKSFFQQPKSKPGDSSTNSIVTPPDTLHGMDELHDPKNDCLPESIQCTTPATEDQGNSDVPCSLSTDKCNEATLEWQRIQQRMKMTLPLCKGHHEPCIPRSVKKGSNIGRLFYVCARAQGPASNQEANCGHFQWATVKSKEKRR

SEQ ID NO: 107667 - protein, 96 aa, Oryza sativa
  Clone ID: PAT_MRT4530_11998C.1.pep
HLDYRAAARVAFICLALLAFTNVGFNLHEERIFRCCSVLSARRDRLPPRRGLLRLCRTAVDPVHPLVELADRRSAVVPVHPSRAVVFIRSGCLFRH

SEQ ID NO: 107668 - protein, 536 aa, Oryza sativa
  Clone ID: PAT_MRT4530_11999C.1.pep
MKPSPAANLDVRVERPRPPPVHPHRPGSLRARPYYRRWTPWIVAAIALSCVVVFLVSMYVNDCPRRNSGDCAAGFLGRFAFQPLKENPLLGPSSATLLKMGALDVTKVVHGHQGWRLITCIWLHAGVVHLLINMLCLLFIGIRLEQEFGFVRIGLVYLISGLGGSLMSALFIRSSISVGASGALFGLIGSMLSELITNWSLYANKVAALLTLVFVIVVNLALGILPRVDNFAHIGGLISGFLLGFVMFIRPQFAWINQRRVAPGQQPAPVKRKHKTYQYILWLAAAIMLIVGFTVAIVLLLRGYNANDHCSWCHYLSCVPTKRWKCNSSPTYCTILKMAMKDISLDSSWYDQIVPLCRHRRAMRSRSPSKRRRHGSRGRSPPSSRHGCAKDKEGAAVSLFVSNLPRSCRPEDVQVPFQKFGPVRDVYLPKDYNTGEPRGFAFVEFAHSSDASKARYHMNRKMLSGREISVAFAVQTRKRPEEMRRIIGARHNSPQRKEECRTNSPGQPKGHDEKRKRRSYTPKYKGSGGLLGFGRR

SEQ ID NO: 107669 - protein, 51 aa, Oryza sativa
  Clone ID: PAT_MRT4530_1199C.1.pep
MDLLRRGSLLLAPVAHPSGCRASWRSSATVARMEAHTVAARLLRLCQQEEL

SEQ ID NO: 107670 - protein, 136 aa, Oryza sativa
  Clone ID: PAT_MRT4530_119C.1.pep
MGCWGGLSVNCGERHNHLLCQYAGTNTEAWTVCTTPEMDLMGVRNQGLLALCQPGRLQGFTFLQVNGGGKSELGGFGYRKRMTMIRPATPLSETKSTRGVNPLANPVPVQLEGTVWPVVSDHSLAKHSTGQMHPVR

SEQ ID NO: 107671 - protein, 260 aa, Oryza sativa
  unsure (1)..(260): unsure at all Xaa locations
  Clone ID: PAT_MRT4530_11C.1.pep
GISVVRKKNRAKKPSEKNRAKKSPTKKRSEKKNGRKKMSDKKTELKKRQKKKQFCPTKKIGTGRKKRAKKPXRKNSLIQKKSKRKREKKISDQKKTGQKKAEKNETVSKKRAKKFKKFSDSKEKGIIYDTVKKIDRAKKSREKKLGEKKSDKKTGRKKNKYVRPKKXKKKEEKSKRKKIDRAKKKASKKTGRKNEKKSDKKNGAKQKTIMSDPKKRQKREEKSKRIRLRRRGKKRAKKIKKKSDYKEKHHRGWAITFKMF

SEQ ID NO: 107672 - protein, 96 aa, Oryza sativa
  Clone ID: PAT_MRT4530_12000C.1.pep
EDSGRIINVWGSSGYGMGVHMRTELISSGMLEPLEPLLCGDAIMPLGSTPSIGEQHGQHGHSFRARGVTIELGLGLECPGQATILSTMGPSFTTRA

SEQ ID NO: 107673 - protein, 56 aa, Oryza sativa
  Clone ID: PAT_MRT4530_12001C.1.pep
TALLFFFKLKRPQGIRILKHKHRERLPTKIQTQHSTFPRQKQKVMTKHRFYNTSLG

SEQ ID NO: 107674 - protein, 115 aa, Oryza sativa
  Clone ID: PAT_MRT4530_12002C.1.pep
MRPPPPPLSADLASSVDLGTAASASSDVEEARGNNGVGGRWEGGELERHCDQGIKTRVYGRLMAYDTRWVQELPSVLWAIRTTLTSSNKEIVMVTDKAYCHAQKSGNLNLKQIVY

SEQ ID NO: 107675 - protein, 894 aa, Oryza sativa
  Clone ID: PAT_MRT4530_12003C.1.pep
MAGSVSRRGLDMTGFVLELRGMCVVLGYPHGVDYQARPLPDQEGDDAEPHAAWEHSPYRYHPRRGGARDYATFRDASSEDDATIVHLARMVEAYDAARIDFHQMVRRGMVENNLKILELHQENLQLKKDLDAVEAQLHQLKIAQGEVCRPKRHRVYRSQKITARKSTSRPELVRQSLAWTCFVETPRAEPAPVVPQEGEASGVGSTEDALLLTFRPGPSQRRSANTGDGNQPEGSNHNHQGSPPPPPPPPPPPPPDTNAILTQILAQQANMMTAFLHHLQNPPQQNAPPPPPQHSKLAEFLRIRPPTFSSSNNPVDALDWLHAVGKKLDTVQCSDEEKVIFAAHQLQGPASLWWDHFQATQPEGQPITWARFTAAFRRTHVPAGVMALKKREFRELKQGNRSVMEYLHEFNNLARYAPEDVREDEEKQEKFLAGMDPELSVRLVSGDYPDFQRLVDKSIRLEAKHKELESHKRRLANFRNQQDANQRVRYTNPYPGGSSSQQQQQQQQPRSAPRPQFVVRVPQPQQQQNQQGTRAPRPPTPTVQPGQGRRDAQGPQRLCFNCFEPGHFADKCPKPRRQQGQAPPRSNNGGKDVIRGRVNHVTAEDVLTTPDVIVGHVISAKEVAVDPETVTAVTDWKQPKTVTQIRSFLGLAGYYRSVSRQSTNDRPDFSNLSKYQNGNGMKLGWISSPDFQKPKVARFIPVKTTYGGNKLAELYFARILRSAAVVTPDRLPPRGRLLRLRRILADLVHLSVSVADRRSAAAPVYPSRAATFLRSGRRSRRRRRPGVSRGPPFHFPLPSPLSGAAPPRRWSPAATIRARVRRLPSAVPAWPPSGAPRGCHVGPGRQPPAPSGAADAWDPRRRPAQAACTRSTVDREAAAWAPLPWTRSARPSLG

SEQ ID NO: 107676 - protein, 1614 aa, Oryza sativa
  unsure (1)..(1614): unsure at all Xaa locations
  Clone ID: PAT_MRT4530_12004C.1.pep
MTWHRAGVLLLGAQSCLLVPGVPAVGGVGSVLFSMARMGWKLCHVFRPYTVVMAGSINRRGLDLTGFVLKLRSMCAVLGYPHGVDYQGKTSLAVTAGGDSFSAACQNAALLAIGTLHQRYPDELQHLPYRYHPRRGGARDYATFRDASSEDDATIMHLARMLKKDLDAVEAQRCQVKISQGEMVTTRRSANTGDGNQPEGSNHNNHGSPPPPPPPPPPLPPDTNAILTQILAQQANMMAAFLHHIQNPPQHNAPPLPPQHSKLAEFLRICPPTFSSSNNPVDALDWLHAVGKKLDTVKCNDEEKVIFAAHQLQGPTSLWWDHFQATQSEGQHITWARFTAAFRRTHVPAGVMALKKREFQELKQGNRSVMEYLHEFNNLARYAPEDVREDEKKQEKFLAGMDPELSVRLVSRDYPDFQRLVDKSIRLEAKHKELESHKRRLANFRNQQGANQRXVQPGQGHRDIQGQQRLCFNCFXEPGHFADKCPKPRRQQGQAPPRPNNGGKDVIRGRVNHVTAENMLTTPDVIVGTFLIHSIPATILFDSGASHSFIYVPFVGRNRLGVERLRNPLLITTPGGVMTAKYYSPAVPIEIQGIPFPSDLILLDTKNLDVILGINWLAQFQGVVDCARRTVTLYRGPEQPVVFFAPPTSVGSSELHQIGLSEIPIVREFGDVFPEELPGMPPKREIEFRIDLAPGTTPLYKRPYRMAANELAEVKKQLEELKEKGYIRPSTSPWGAPVIFVEKKDKTKRMCVDYRALNEVTIKNKYPLPRIDDLFDQLKGATVFSKIDLRSGYHQLRIREEDIPKTAFTTRYGLYEFTVMSFGLTNAPAFFMNLMNKVFMEYLDKFVVVFIDDILVYSQLEEDHQQHLRLVLGKLREHQLYAKLSKCEFWLSKVKFLGHVISAKGVAVDPETVTAVTDWKQPKTVTQIRSVLGLAGYYRRFIENFSKIARPMAQLLKKEEKFVWSPQCEKAFQTLKEKLVSSPVLILPDTRKDFMVYCDASRQGLGCVLMQEGHVVAYASRQLRPHEGNYPTHDLELAAVVHALKIWRHYLIGNRCEIYTDHKSLKYIFTQSDLNLRQRRWLELIKDYDVGIHYHPGKANVVANALSRKSHCNTLGVRGIPPELNQQMEALNLSIVSRGFLATLEAKPTLLDQIREAQKNDPDVRGLLKNMKQGKAAGFTEDEHGTLWNGNRVCVPDDRELKQLILQEAHESPYSIHPGSTKMYLDLKEKYWWVSMKREIAEFVALCDVCQRVKAEYQRPAGLLQPLQVPEWKWGEIGMDFITGLPKTQGGYDSIWVVVDRLTKVARFIPVKTTYGGNKLAELYFARIVSLHGVPKKIVSDRGSQFTSHFWKKLQEELGTRLNFSTAYHPQTDGQTERLNQILEDMLRACVLDFGKTGDKSLPYAEFSYNNSYQASIQMAPYEALYGRKCRTPLLWDQVGESQVFGTDILREAKAKVRTIRDNLKVAQSWQKSYADNRRRNLEFAVDDFVYLRVTPLRGVHRFQTKGKLAPRFVGPFRIIARRGEVAYQLELPASLGNVHDVFHVSQLKKCLRVPSEQADSEQIEVREDLTYVERPVKILDTMERRIRNRVIRFCKVQWSNYAEEEATTLRKTR

SEQ ID NO: 107677 - protein, 136 aa, Oryza sativa
  Clone ID: PAT_MRT4530_12005C.1.pep
MGMMNGSLFTPNHSETGLLARAAKRSHASLRPRLPPRLRQAQQSGNWLAGAMATCGGGDAACGQGEEDQACVQRRGKRPINYQDCDYSRINIIVVLNGNSLQLHNPWHASPHKKQHEIFLMSFIRDGKETRAYLRE

SEQ ID NO: 107678 - protein, 73 aa, Oryza sativa
  Clone ID: PAT_MRT4530_12006C.1.pep
MKRRTVVNVDGAPGLIADDTAGGVVVPAWPTTVYKQQQPGSRSSALLPMDKRLFVGMCTFAGVMILAHSSRET

SEQ ID NO: 107679 - protein, 1757 aa, Oryza sativa
  unsure (1)..(1757): unsure at all Xaa locations
  Clone ID: PAT_MRT4530_12007C.1.pep
MDISRANEGYTSCGPVVEMSWHRAGVLLLGAQSCLPIPEVPAVGGIGSVLLSMARMGWKLCHVFRLYTVVMAGSVTRRGLDMTGFVLELRGMCVVLGYPHGVDYQARPLPEQEGDDAEPHAGWEVTAVILSGSPERTSLAVTAGGDSFPAACQSAALLAIGTLHQRYPDELQHSPYRYHPRRGGARDYATFRDASSEDDATIVHLARMVEAYDAARIDFHQMVRRGMVENNMKILELRQENLQLKKDLDAVEAQLHQLKIAQGEVCRPKRRRVCRSQKITARKSTSRPELVRQSLAWTCFVEIPRAEPAPVVPQEGEASGVGSTEDALLLTFRPGPSQRRSANTGDGNQPEGSNHHHQGSPPPPPPPPPPPPPDTNAILTQILAQQANMMTAFLHHLQNPPQHNAPPPPPQHSKLAEFLRIRPPTFSSSNNPVDALDWLHAVGKKLDTVQCSDEEKVIFAAHQLQGPASLWWDHFQATQPEGQPITWARFTAAFRRTHVPAGVVALKKREFRELKQGNRSVMEYLHEFNNLARYAPEDVREDEEKQEKFLAGMDPELSVRLVSGDYPDFQRGSSSQQQQQQQQPRSAPRPQFVVRVPQPQQQQNQQGTRAPRPPTPTVQPGQGRRDAQGPQRLCFNCFEPGHFADKCPKPRRQQGQAPPRSNHGGKDVIRGRVNHVTAEDVLTTPDVIVGTFLIHSIPATILFDSGASHSFISVPFVGRNQLGVERLRNPLLITTPGGVMTAKYYSPAVPIEIQGIPFPSDLILLDTKNLDVILGMNWLAQFQGVVDCARRTVTLYRGPEQPVVFFAPPTSVSSSELHQIGLSEIPIVREFGDVFPEELPGMPPKREIEFRIDLAPGTTPLYKRPYRMAANELAEVKKQLEELKEKGYIRPSTSPWGAPVIFVEKKDKTKRMCVDYRALNEVTIKNKYPLPRIDDLFDQLKGATVFSMIDLRSGYHQLRIREEDIPKTAFTTRYGLYEFTVMSFGLTNAPAFFMNLMNKVFMEYLDKFVVVFIDDILIYSQSEEDHQHHLRLVLGKLREHQLYAKLSKCEFWLSEVKFLGHVISAKGVAVDPETVTAVTDWKQPKTVTQVRSFLGLAGYYRRFIENFSKIARPMTQLLKKEEKFVWSPQCEKAFKTLKEKLVSSPVLILPDTRKDFMVYCDASRQGLGCVLMQDGHVVAYASRQLRPHEGNYPTHDLELAAVVHALKIWRHYLIGNRCEIYTDHKSLKYIFTQSDLNLRQRRWLELIKDYDVGIHYHPGKANVVADALSRKSHCNTLNVRGIPLELSQQMEALNLSIVGRGFLAALEAKPTLLDQIREAQKNDPDMHGLLKNMKQGKAAGFTEDEHGTLWNGNRVCVPDNRELKQLILQEAHESPYSIHPGSTKMYLDLKEKYWWVSMKREIAEFVALCDVCQRVKAEHQRPAGLLQPLQVPEWKWDEIGMDFITGLPKTQGGYDSIWVVVDRLTKVARFIPVKTTYGGNKLAELYFARIVSLHGVPKKIVSDRGSQFTSHFWKKLQEELGTRLNFSSAYHPQTDGQTERLNQILEDMLRACVLDFGKTWDKSLPYAEFSYNNSYQASIQMAPYXALYGRKSEHALVDQVGESQVFGXDDFVYLRVTPLRGVHRFRTKGKLAPRYVGPFRIVARRREVAYQLELPASLGNVHDVLHVSQLKKCLRVPSEQADSEQIEVREDLTYVERPVKILDTMERRTRNRVIHFCKVQWSNHVEEEATWEREDELKAAHPDLFTSSSESRSRDSF

SEQ ID NO: 107680 - protein, 81 aa, Oryza sativa
  Clone ID: PAT_MRT4530_12008C.1.pep
RLLTMVLLAQQVVRFCRRCAVDLGLPSSNLQGHFYLPAKDTVQMCSSIPLLPQVDMYHVFLYGLEKACFSHDDVQGEQGRQ

SEQ ID NO: 107681 - protein, 55 aa, Oryza sativa
  Clone ID: PAT_MRT4530_12009C.1.pep
MVGVGVGRGVVCDGERPGRAVWRVARERDRMREPGLYVEARGLSGLAGQPARTAS

SEQ ID NO: 107682 - protein, 94 aa, Oryza sativa
  unsure (1)..(94): unsure at all Xaa locations
  Clone ID: PAT_MRT4530_1200C.1.pep
VVDKNDQSDAGRVSNGQPRSHVAPVSAGSGDPPKHRSRVLRFSAARTCIHRRCLAFXLASRQSFHXRESLRSHPKPPAEPAKGGPRGLPVRSHE

SEQ ID NO: 107683 - protein, 590 aa, Oryza sativa
  Clone ID: PAT_MRT4530_12010C.1.pep
MSWHRAGVLLLGAQSCLPVPGVPAMAGSVSRRGLDMTGFVLELRGMCVVLGYPHGLDYQGRPLPEQEGDDAEPHASWEVTAVILTGSPERTSLAVTAGGDSFSAACQSAALLAIGTLHQRYPDELQHSPYRYHPRRGGARDYATFRDASSEDDATIMHLARMVEAYDAARIDFHQMVRRGMVENNLKILELRQENLQLKKDLDAVEAQLHQLKIAQGEMVTTRRNAATSDGNQLEGSNHNNHGSPPPPPPPPPPPPPDTNAILTQILTQQANMMAAFLHHIQNPPQHNAPPPPPQHSKLAEFLRIRPPTFSSSNNPVDVLDWLHAVGKKLDTVQCSDEEKVVFAAHQLQGPASLWWDHFQATQPEGQPITWARFTAAFRRTHVPAGVMALKKREFRELKQGNRSVMEYLHEFNNLARYAPEDVREDEEKQEKFLAGMDPELSVRLVSGDYPDFQRLVDKSIRLEAKHKELESHKRRLANFRNQQGANQRIRYTNPYPGGSSSQQQQPRSAPRPQFVVRVPQPQQQQSQQGTHAPRPPTPAAQSGQGRRDVQGPQRLCFNCFEPGHFADKCPKSRRQQGQAPPDVIVVAHP

SEQ ID NO: 107684 - protein, 1753 aa, Oryza sativa
  Clone ID: PAT_MRT4530_12011C.1.pep
MSWHRAGVLLLGAQSCLPVPGVLAVGGIGSVLLSMARMGWKLCHVFRLYTVVMAGSVTRRGLDMTGFVLELRGMCVVLGYPHGVDYQGRPLPEQEGDDAEPHAAWEVTAVILVGSPERTSLAVTAGGDSFPAACQSAALLAIGTLHQRYPDELQHSPYRYHPRRGGARDYATFRDASSEDDATIVHLARMVEAYDAARIDFHQMVRRGMVENNMKILELRQENLQLKKDLDAVEAQLHQLKIAQGEMVTTRRNAATGDGNQPEGSNHNNHQGNPPPPPPPPPPPPPDTNAILTQILAQQANMMTAFLHHLQNPPQHNAPPPPPQHSKLAEFLRIRPPTFSSSNNPVDALDWLHAVGKKLDTVQCSDEEKVIFAAHQLQGPASLWWDHFQATQPEGQPITWARFTAAFQRTHVPAGVVALKKREFRELKQGNCSVMEYLHEFNNLARYAPEDVREDEEKQEKFLAGMDPELSVRLVSGDYPDFQRLVDKSIRLEAKHKELESHKRRLANFRNQQGANQRVRYTNPYPGGSSSQQQQQQQQPRSAPRPQFVVRVPQPQQQQNQQGTRAPRPPTPAVQPGQGRRDAQGQQRLCFNCFEPGHFADKCPKPRRQQGQAPPRSNNGGKDVIRGRVNHVTAEDVLTTPDVIVGTFLIHSIPATILFNSGASHSFISVPFVGRNQLGVERLRNPLLITTPGGVMTAKYYSPAVPIEIQGIPFPSDLILLDTKNLNVILGMNWLAQFQGVVDCARRTVTLYRGPEQPVVFFAPPTSVSSSELHQIGLSEIPIVREFGDVFPEELPGMPPKREIEFWIDLAPGTTPLYKRPYRMAANELAEVKKQLEELKEKGYIRPSTSPWGAPVIFVEKKDKTKRMCVDYRALNEVTIKNKYPLPRIDDLFDQLKGATVFSKIDLRSGYHQLRIREEDIPKTAFTTRYGLYEFTVMSFGLTNAPAFFMNLMNKVFMEYLDKFVVVFIDDILIYSQSEEDHQHHLRLVLGKLREHQLYAKLSKCEFWLSEVKFLGHVISAKGVAVDPETVTAVTDWKQPKTVTQVRSFLGLAGYYRRFIENFSKIARPMTQLLKKEEKFVWSPQCEKAFKTLKEKLVASPVLILPDTRKDFMVYCDASRQGLGCVLMQDGHVVAYASRQLRPHEGNYPTHDLELAAVVHALKIWRHYLIGNRCEIYTDHKSLKYIFTQSDLNLRQRRWLELIKDHDVGIHYHPGKANVVADALSRKSHCNTLNVRGIPPELSQQMAALNLSIVSRGFLAALEAKPTLLDQIREAQKNDPDMHGLLKNMKQGKAAGFTEDEHGTLWNGNRVCVPDNRELKQLILQEAHESPYSIHPGSTKMYLDLKEKYWWVSMKREIAEFVALCDVCQRVKAEHQRPAGLLQPLQVPEWKWDEIGMDFITGLPKTQGGYDSIWVVVDRLTKVARFIPVKTTYGGNKLAELYFARIVSLHGVPKKIVSDRGSQFTSHFWKKLQEELGTRLNFSTAYHPQTDGQTERLNQILEDMLRACVLDIGKTWDKSLPYAEFSYNNSYQASIQMAPYEALYGCKCRTPLLWDQVGESQVFGTDILREAEAKVRTIRDNLKVAQSRQKSYANNRRRNLEFAVDDFVYLRVTPLRGVHRFQTKGKLAPRYVSPFRIVARRGEVAYQLELPASLGNVHDVFHVSQLKKCLRVPSEQADSKQIEVREDLTYVERPVKILDTMERRTRNRVIRFCKVQWSNHAEEEATWEREDELKAAHPDLFASSSESRGRDSV

SEQ ID NO: 107685 - protein, 72 aa, Oryza sativa
  unsure (1)..(72): unsure at all Xaa locations
  Clone ID: PAT_MRT4530_12012C.1.pep
MLERWPSRGWSRPLSFLRDAAPRRDELVRRVRDSGGLINMRRTXVKSAPQTMWCGPDRPKYLEPVSEHTPSD

SEQ ID NO: 107686 - protein, 661 aa, Oryza sativa
  Clone ID: PAT_MRT4530_12013C.1.pep
SHSFISVPFVGRNQLGVERLRNPLLITTPGGVMTAKYYSPAVPIEIQGIPFPSDLILLDTKNLDVILGMNWLAQFQGVVDCARRTVTLYRGPEQPVVFFAPPTSVRSSELHQIGLSEIPIVREFGDVFPEELPGMPPKREIEFRIDLAPGTTPLYKRPYRMAANELAEVKKQLEELKEKGYIRPSTSPWGAPVIFVEKKDKTKRMCVDYRALNEVTIKNKYPLPRIDDLFDQLKGATVFSKIDLRSGYHQLRIREEDIPKTAFTTRYGLYEFTVMSFGLTNAPAFFMNLMNKVFMEYLDKFVVVFIDDILIYSQSEEDHQHHLRLVLGKLREHQLYAKLSKCDFWLSEVKFLGHVISAKGVAVDPETVTAVTEWKQPKTVTQIRSFLGLAGYYRRFIENFSKIARPMTQLLKKEEKFVWSPQCEKAFQTLKEKLVSSPVLILPDTRKDFMVYCDASRQGLGCVLMQDGHVVAYASRQLRPHEGNYPTHDLELAAVVHALKIWRHYLIGNRCEIYTDHKSLKYIFTQSDLNLRQRRWLELIKDYDVGIHYHPGKANVVADALSRKSYCNTLNVRGIPPELNQQMEALNLSIVGRGFLAALEAKPTLLDQIREAQKNDPDMHGLLKNMKQGKAAGFTEDEHGTLWNGNTVCVSRYRELKQLIL

SEQ ID NO: 107687 - protein, 1791 aa, Oryza sativa
  Clone ID: PAT_MRT4530_12014C.1.pep
MDEVGGRWTFSRANEGYTSCGPMAGSVTRRGLDMTGFVLELRGMCVVLGYPHGVDYQARPLPDQEGDDAEPHAGWEVTAVILSGSPERTSLAVTAGGDSFPAACQNAALLAIGTLHQRYPDELQHSPYRYHPRRGGACDYATFRDASSEDDATIVHLARMVEAYDAARIDFHQMVRRGMVENNMKILELRQENLQLKKDLDAVEAQLHQLKIAQGEICRPKRRRVCRSQKITARKSTSRPELVRQSLAWTCFVETPRAEPAPVVPQEGEASGVGSTEVVWGMVMPMVTTRRNAVTGDGNQPEGSNHNHQGNPPPPPPPPPPPPPDTNAILTQILAQQANMMTAFLHHLQNPPQQNAPPPPPQHSKLAEFLRIRPPTFSSSNNPVDALDWLHAVGKKLDTVQCSDEEKVVFAAHQLQGPASLWWDHFQATQPEGQPITWARFTAAFRRTHVPAGVVALKKREFRELKQGNRSVMEYLHEFNNLARYAPEDVREDEEKQEKFLAGMDPELSVRLVSGDYPDFQRLVDKSIRLEAKHKELESHKRRLANFRNQQGANQRVRYTNPYPGGSSSQQQQQQQQPRSAPRPQFVVRIPQPQQQQNQQGTRAPRPPTPTVQSGQGRRDAQGQQRLCFNCFEPGHFADKCPKPRRQQGQAPPRSNNGGKDVIRGRVNHVTAEDVLTTPDVIVGTFLVHSIPATILFDSGASHSFISVPFVGRNQLGVERLRNPLLITTPGGVMTAKYYSPAVPIEIQGIPFSSDLILLDTKNLDVILGMNWLAQFQGVVDCARRTVTLYRGPEQPVVFFAPPTSVRSSGLHQIGLSEIPIVREFGDVFPEELPGMPPKREIEFRIDLAPGTTPLYKRPYRMAANELAEVKRQLEELKEKGYIRPSTSPWGAPVIFVEKKDKTKRMCVDYRALNEVTIKNKYPLPRIDDLFDQLKGATVFSKIDLRSGYHQLRIREEDIPKTAFTTRYGLYEFTVMSFGLTNAPAFFMNLMNKVFMEYLDKFVVVFIDDILIYSQSEEDHQHHLRLVLGKLREHQLYAKLSKCEFWLSEVKFLGHVISAKGVAVDPETVTAVTDWKQPKTVTQVRSFLGLAGYYRRFIENFSKIARPMTQLLKKEEKFVWSPQCEKAFQTLKEKLVSSPVLILPDTRKDFMVYCDASRQGLGCMLMQDGHVVAYASRQLRPHEGNYPTHDLELAAVVHALKIWRHYLIGNRCEIYTDHKSLKYIFTQSDLNLRQRRWLELIKDYDVGIHYHPGKANVVADALSRKSHCNTLNVRGIPPELSQQMEALNLSIVGRGFLAALEAKPILLDQIREAQKNDPDMHGLLKNMKQGKAAGFTEDEHGTLWNGKRVCVPHNRELKQLILQEAHESPYSIHPGSTKMYLDLKEKYWWVSMKREIAEFVALCDVCQRVKAEHQRPAGLLQPLQVPEWKWDEIGMDFITGLPKTQGGYDSIWVVVDRLTKVARFIPVKTTYGENKLAELYFARIVSLHGVPKKIVSDRGSQFTSHFWKKLQEELGTRLNFSTAYHPQTDGQTERLNQILEDMLRACVLDFGKTWDKSLPYAEFSYNNSYQASIQMAPYEALYGRKCRTPLLWDQVGESQVFGTDILREAEAKVRIIRDNLKVAQSRQKSYADNRRRDLEFAVDDFVYLRVTPLRGVHRFQTKEKLAPRYVGPFRIVARRGEVAYQLELPASLGNVHDVFHVSQLKKCLRVPSEQADSEQIEVREDLTYVERPVKILDTMERRTRNRVIRFCKVQWSNHAEEEATWEREDELKAAHPDLFASSSESRGRDSV

SEQ ID NO: 107688 - protein, 1797 aa, Oryza sativa
  Clone ID: PAT_MRT4530_12015C.1.pep
MDISRANEGYTSCGPVVEMSWHRAGVLLLGAQSCLPIPEVPAVGGIGSVLLSMARMGWKLCHVFRLYTVVMAGSVTRRGLDMTGFVLELRGMCVVLGYPHGVDYQARPLPEQEGDDAEPHAGWEVTAVILSGSPERTSLAVTAGGDSFPAACQSAALLAIGTLHQRYPDELQHSPYRYHPRRGGARDYATFRDASSEDDATIVHLARMVEAYDAARIDFHQMVRRGMVENNMKILELRQENLQLKKDLDAVEAQLHQLKIAQGEVCRPKRRRVCRSQKITARKSTSRPELVRQSLAWTCFVEIPRAEPAPVVPQEGEASGVGSTEDALLLTFRPGPSQRRSANTGDGNQPEGSNHHHQGSPPPPPPPPPPPPPDTNAILTQILAQQANMMTAFLHHLQNPPQHNAPPPPPQHSKLAEFLRIRPPTFSSSNNPVDALDWLHAVGKKLDTVQCSDEEKVIFAAHQLQGPASLWWDHFQATQPEGQPITWARFTAAFRRTHVPAGVVALKKREFRELKQGNRSVMEYLHEFNNLARYAPEDVREDEEKQEKFLAGMDPELSVRLVSGDYPDFQRGSSSQQQQQQQQPRSAPRPQFVVRVPQPQQQQNQQGTRAPRPPTPTVQPGQGRRDAQGPQRLCFNCFEPGHFADKCPKPRRQQGQAPPRSNHGGKDVIRGRVNHVTAEDVLTTPDVIVGTFLIHSIPATILFDSGASHSFISVPFVGRNQLGVERLRNPLLITTPGGVMTAKYYSPAVPIEIQGIPFPSDLILLDTKNLDVILGMNWLAQFQGVVDCARRTVTLYRGPEQPVVFFAPPTSVSSSELHQIGLSEIPIVREFGDVFPEELPGMPPKREIEFRIDLAPGTTPLYKRPYRMAANELAEVKKQLEELKEKGYIRPSTSPWGAPVIFVEKKDKTKRMCVDYRALNEVTIKNKYPLPRIDDLFDQLKGATVFSMIDLRSGYHQLRIREEDIPKTAFTTRYGLYEFTVMSFGLTNAPAFFMNLMNKVFMEYLDKFVVVFIDDILIYSQSEEDHQHHLRLVLGKLREHQLYAKLSKCEFWLSEVKFLGHVISAKGVAVDPETVTAVTDWKQPKTVTQVRSFLGLAGYYRRFIENFSKIARPMTQLLKKEEKFVWSPQCEKAFKTLKEKLVSSPVLILPDTRKDFMVYCDASRQGLGCVLMQDGHVVAYASRQLRPHEGNYPTHDLELAAVVHALKIWRHYLIGNRCEIYTDHKSLKYIFTQSDLNLRQRRWLELIKDYDVGIHYHPGKANVVADALSRKSHCNTLNVRGIPLELSQQMEALNLSIVGRGFLAALEAKPTLLDQIREAQKNDPDMHGLLKNMKQGKAAGFTEDEHGTLWNGNRVCVPDNRELKQLILQEAHESPYSIHPGSTKMYLDLKEKYWWVSMKREIAEFVALCDVCQRVKAEHQRPAGLLQPLQVPEWKWDEIGMDFITGLPKTQGGYDSIWVVVDRLTKVARFIPVKTTYGGNKLAELYFARIVSLHGVPKKIVSDRGSQFTSHFWKKLQEELGTRLNFSTAYHPQTDGQTERLNQILEDMLRACVLDFGKTWDKSLPYAEFSYNNSYQASIQMAPYEALYGRKCRTPLLWDQVGESQVFGTDILREAEAKVRTIRDNLKVAQSRQKSYADNRRRDLEFAVDDFVYLRVTPLRGVHRFRTKGKLAPRYVGPFRIVARRREVAYQLELPASLGNVHDVLHVSQLKKCLRVPSEQADSEQIEVREDLTYVERPVKILDTMERRTRNRVIHFCKVQWSNHVEEEATWEREDELKAAHPDLFASSSESRGRDSF

SEQ ID NO: 107689 - protein, 51 aa, Oryza sativa
  Clone ID: PAT_MRT4530_12016C.1.pep
MAMAILPLSRTLLTSAAMAILPLARTSLTSQRGWRLGAVQPESVHQPRCDE

SEQ ID NO: 107690 - protein, 1805 aa, Oryza sativa
  unsure (1)..(1805): unsure at all Xaa locations
  Clone ID: PAT_MRT4530_12017C.1.pep
MDEVGGRWTFSRANEGYTSCGPMAGSVTRRGLDMTGFVLELRGMCVVLGYPHGVDYQARPLPEQEGEDAEPHAGWEVTAVILSGSPEWTSLAVTAGGDSFPAACQNAALLAIGTLHQRYPDELQHSPYRYHPRRGGASDHATFRDASSEDDATVVHLARMVEAYDAARIDFHQMVRRGMVENNLKILELRQENLQLKKDLDALEAQLHQLKVAQGEICRPKRRRVCRSQKITARKSTSRPELVRQSLAWTCFVETPRAEPAPVVPQEGEASGVGSSEGALLLTFRPGPSQRSPSLFAGSVWGFQMVSTRRNVNTGEGNQPEGSNPNPQGNPPPPPPPPDTNAILTQILAQQANMMNAFLHHLQNLPQQNAPPPPPQHSKLAEFLRIRPPTFSSSNNPVDALDWLHAVGKKLDTVQCSDEEKVIFAAHQLQGPASLWWDHFQATQPEGQPITWARFTAAFRRTHVPAGVVALKKREFRELKQGNRSVMEYLHEFNNLARYAPEDVREDEEKQEKFLAGMDPELSVRLVSGDYPDFQRLVDKSIRLEAKHKELESHKRRLXANFRNQQGANQRVRYTNPYPGGSSSQQQQQQQPRSAPRPQFVVRVPQQQQQQNQQGTRAPRPPTPTVQPVQGRRDAQGQQRLCFNCFEPGHFADKCPKPRRQQGQAPPRSNNGGKDVIRGRVNHVTAEDVLTTPDVIVGTFLVHSIPATILFDSGASHSFISVPFVGKNQLGVERLRNPLLITTPGGVMTAKYYSPAVPIEIQGIPFPSDLILLDTKNLDVILGMNWLAQFQGVVDCARRTVTLYRGPEQPVVFFAPPTSVRSSELHQVGLSEIPIVREFGDVFPEELPGMPPKREIEFRIDLAPGTTPLYKRPYRMAANELAEVKKQLEELKEKGYIRPSTSPWGAPVIFVEKKDKTKRMCVDYRALNEVTIKNKYPLPRIDDLFDQLKGATVFSKIDLRSGYHQLRIREEDIPKTAFTTRYGLYEFTVMSFGLTNAPAFFMNLMNKVFMEYLDKFVVVFIDDILIYSQSEEDHQHHLRLVLGKLREHQLYAKLSKCEFWLSEVKFLGHVISAKGVAVDPETVTAVTDWKQPKTVTQIRSFLGLAGYYRRFIENFSKIARPMTQLLKKEEKFVWSPQCEKAFQTLKEKLVSSPVLILPDTRKDFMVYCDASRQGLGCVLMQDGHVVAYASRQLRPHEGNYPTHDLELAAVVHALKIWRHYLIGNRCEIYTDHKSLKYIFTQSDLNLRQRRWLELIKDYDVGIHYHPGKANVVADALSRKSHCNTLNVRGIPPELNQQMEALNLSIVGRGFLAALEAKPTLLDQIREAQKNDPDMHGLLKNMKQGKAAGFTEDEHGTLWNGKRVCVPDSRELKQLILREAHESPYSIHPGSTKMYLDLKEKYWWVSMKREIAEFVALCDVCQRVKAEHQRPAGLLQPLQVPEWKWDEIGMDFITGLPKTQGGYDSIWVIVDRLTKVARFIPVKTTYGGNKLAELYFARIVSLHGVPKKIVSDRGSQFTSHFWKKLQEELGTRLNFSTAYHPQTDGQTERLNQILEDMLRACVLDFGKTWDKSLPYAEFSYNNSYQASIQMAPYEALYGRKCRTPLLWDQVGESQVFGTDILREAEAKVRIIRENLKVAQSRQKSYADNRRRDLEFAVDDFVYLRVTPLRGVHRFQTKGKLAPRYVGPFRITARRGEVAYQLELPASLGNVHDVFHVSQLKKCLRVPSEQADSEQIEVREDLTYVERPVKILDTMERRTRNRVIRFCKVQWSNHAEEEATWEREDELKAAHPGLFASSSESRGRDSV

SEQ ID NO: 107691 - protein, 540 aa, Oryza sativa
  Clone ID: PAT_MRT4530_12018C.1.pep
MVLRLPDPSHGGGAPPHDHTEDEWFKERYGGGGGGGDAPRSSRAVNPVPPYGRRSALAPRRKEDFGDGGAFPEVHVAQYPLDMGRRGGDGDGEQRGSSGGVLSLTVDGSGGRVEFDAVVRQGENAGKTVYSSPGDVLPKINAAAADADDDEQAAVEETTARTSAALRAIVEKRLSAVQPSNTLASNHDPEFIKYTPARQTSAFNSGAAERIIRMGETQQDPLEPPKFKHKRVPAPAGSPPVPVLRSPPRPPSQKDHDDWKVPPSISSWKNPKGYSIPLDKRAALDGRGLHDVQVSDAFAALAEALYAAEQKAREAVETRAKVHTEMKMREKEKAEQHLLQLATKARAEMLGAAPPAPSERSKAAAERDAIREERRRERRLEARAAAAAASKKSAATRDRDRDVSERIALGMANTGGGGGEVTYDQRLFNQEKGMGSGFAGDDQYNVYSGRLFAAQPALSTLYKPSKHGEEDPDAYGDADEHLGKIAKTRRFVPDKAFTGAPASVAAGKRERPVEFDGPEMEEDPFHLDQFLTQMKKGKHQ

SEQ ID NO: 107692 - protein, 183 aa, Oryza sativa
  Clone ID: PAT_MRT4530_12019C.1.pep
MLNLFKIKGQKKEEAANTNGRPPAKKQSPGELRLHKDIAELNLPKKTNITFPNGKDDLMNIEITLRPDEGYYVGGAFVFTLQVPPTYPHEPPKVKCTTKVYHPNIDLDGNVCLNILREDWKPVLNINTIVYGLNLLFIQPNDEDPLNHDAAAVLRDDPQKFRRNVQTAMSGGYVDRVHFPRCK

SEQ ID NO: 107693 - protein, 590 aa, Oryza sativa
  Clone ID: PAT_MRT4530_1201C.1.pep
MAQDAGDTVLPFSRITADRHLSLPRKIMPDGAVVRAVESRPRPRYPERSVHLLSFAMAGLIPSFSRFFHEVLDFYEIHALHLAPNAVMTLAIFVHLCEMFIGVRPTMRLFQAFFIPQLLQGAVVGGCYFQPRPGTAGQYIESHLRKKWEDWKKDWFYTALPDHPSAAWLAVSELGEEYDAVWDRLRGLRSLGLTGAMVFGDYIRRRIAPLQERSRGAWEYTGPNDPMRTHVGERWDWGEEDAKMVLVLGLDSAKQTLIPDGILPLYCDRDRESILAVMSVVGAGRSRSSRGGASGSAVGAGGGGATAGGSRTSGPGGGGSRAPDSSRGPGDDLVGDPKGKRKVPESRPPSPPRGGGTEHAADHPPAGHKRPAGPEVGRKKKRVRKIGQTEPSRGSFIETPKWTFNRPPRSEIPSQGVSGSEPSWGTKSERSERSGPGQSKAAGSSQPRSGTHRPHTGPGPERPSAGTRLAAGNGSGDVPPGGGCETRVHAERHPGSGGEGGRSSGAEAGGDPEPEVEVKAGGGPESEVKVEVGGGPEPEVEVEAARLAPQFTFGLASDEESGSGGDDDNVGDEDWDDVVSGAGLGGLGTP

SEQ ID NO: 107694 - protein, 1774 aa, Oryza sativa
  unsure (1)..(1774): unsure at all Xaa locations
  Clone ID: PAT_MRT4530_12020C.1.pep
MAGSISRRGLDLTGFVLELRGMCVVLGYPHGVDYQGRLLLEQEGDDAEPHAAWEVTAVILTGSPERTSLAVTAGGDSFSAACQNAALLAIGTLHQRYPDELQHSPYRYHPRRGGARDYATFRDASSEDDATIMHLARMVEAYDAARIDFHQMVRRGMVENNMKILELRQENLQLKKDLDAVEAQLHQLKIAQGEVCRPKRRRVCRSQKITARKSTSRPELVRQSLAWTCFVETPRAEPAPVVPQEGEASGVGSTEDLSLFAGSVWGFQMVTTRRSAATGDGNQPEGSNHNNHGSPPPPPPPPPPPPPDTNAILTQILAQQANMMTAFLHHLQNPPQQNAPPPPPQHSKLAEFLRIRPPTFSSSNNPVDALDWLHAVGKKLDTVQCSDEEKVVFAAHQLQGPASLWWDHFQATQPEGQPITWARFTAAFRRTHVPAGVMALKKREFRELKQGNRSVMEYLHEFNNLARYAPEDVREDEEKQEKFLAGMDPELSVRLVSGDYADFQRLVDKSIRLEAKHKELESHKRRLANFRNHQGANQRVRYTNPYPGGSSSQQQQQQQPRSAPRPQFMVRVPQPQQQQSQQGTRAPRPPMPAVQPGQGRRDVQGPQRLCFNCFEPGHFADKCPKPRRQQGQAPPRSNNGGKDVIRGRVNHVTAEDVLTTPDVIVGTFLIHSIPATILFDSGASHSFISVPFVGRNQLGVERLRNPLLITTPGGVMTAKYYSPAVPIEIQGIPFPSDLILLDSKNLDVILGMNWLAQFQGVVDCARRTVTLYRGPEQPVVFFAPPTSVSSSELHQIGLSEIPIVREFGDVFPEELPGMPPKREIEFWIDLAPGTTPLYKRPYRMAANELAEVKKQLEELKEKGYIRPSTSPWGAPVIFVEKKDKMKRMCVDYRALNEVTIKNKYPLPRIDDLFDQLKGATVFSKIDLRSGYHQLRIREEDIPKTAFTTRYGLYEFTVMSFGLTNAPAFFMNLMNKVFMEYLDKFVVVFIDDILVYSQSEEDHQHHLRLVLGKLREHQLYAKLSKCEFWLSEVKFLGHVISAKGVAVDPETVTAVTDWKXPKTVTQIRSFLGLAGYYRRFIENFSKIARPMTXLLKKEEKFVWSPQCEKAFQTLKEKLVSSPVLILPDTRKDFMVYCDASRQGLGCVLMQDGHVVAYASRQLRPHESNYPTHDLELATVVHALXKIWRHYLNGNRCEIYTDHKSLKYIFTQSDLNLRQRRWLELIKDYDVGIHYHPGKANVVTDALSQKSHCNTLNVRGIPPELNQQMEALNLSIVGRGFLAALEAKPTLLDQIREAQKNDPDMHGLLNNMKQGKAAGFTEDEHGTLWNGNRVCVPDNRELKQLILQEAHESPYSIHPSSTKMYLDLKEKYWWVSMKREIAEFVALCDVCQRVKAEHQRPAGLLQPLQVPEWKWDEIGMDFITGLPKTQGGYDSIWVVVDRLTKVARFILVKTTYGGNKLAELYFARIVSLHGVPKKIVSDRGSQFTSHFWKKLQEELDTRLNFSTAYHPQTDGQTECLNQILEDMLRACVLDFGKTWDKSLPYAEFSYNNSYQASIQMAPYEALYGRKCRTPLLWDQVGESQVFGTDILREAEAKVRTIRDNLKVAQSRQKSYADNRRRNLEFAVDDFVYLRVTPLRGVHRFQTKGKLAPRFVGPFRIIARRGEVAYQLELPASLGNVHDVFHVSQLKKCLRVPSEQTDSEQIEVREDLTYVERPVKILDTMERRTRNRVIRFCKVQWSNHAEEEATWEREDELKAAHPDLFASSSESRGRDSV

SEQ ID NO: 107695 - protein, 368 aa, Oryza sativa
  Clone ID: PAT_MRT4530_12021C.1.pep
MEELLGLVRGFVDVLVLAGGRTSSGAAATWRSGDVKKALQWALFFEEVFKNLRDDGQYDESASELDAALVQLASSPNFPKGIEDIRSKTLAMARELVVKHFLKTTNAENLGAVLQAVVEMDMDGISASGECNVCQEYKLDSGSCISLAERELNTLLKSMKKDSFDSAGSTLCTSATAQKTQIIDKFILWKQWKAKCLSYLLDERTIRIMSGTNMIFNAPKEQWMGLFEPLKVSADSSQSGIIEVMELCLLGLVARQWNSLIESIMSHTFSSFPISKQYADLHQLLQGTTQDECQDKLLGFKEMDICEYARQSLESEPYILWLLPPVLTAAAMPPRSSLFKIYLVEIDKQLGEAASKDRKCNCRADVID

SEQ ID NO: 107696 - protein, 139 aa, Oryza sativa
  Clone ID: PAT_MRT4530_12022C.1.pep
SSGGGGRQAPAWPSGGGCGGWWRLVERQRLRRAAAAGRAAVGGRVAAAVEGSGGGRQALVWLSGGDCGGRRQAGPRAAASRRLAADSFEKNFFAICDSIKMCNFFLRICDLLYVSEMQYVMYLICGIFFRICDVNVYIV

SEQ ID NO: 107697 - protein, 105 aa, Oryza sativa
  unsure (1)..(105): unsure at all Xaa locations
  Clone ID: PAT_MRT4530_12023C.1.pep
CYILQCIASTVTQPAVYCITVQFRNKQANSPCGRLLPITSSITRTNGYSPLSYHLSYALQFPSSLTNQLLLVSHQSVLTAHLSQSVVQYRQQHQQQLXLLLRLGS

SEQ ID NO: 107698 - protein, 109 aa, Oryza sativa
  Clone ID: PAT_MRT4530_12024C.1.pep
MADNRDGLKYVYCKECGIDDWVPSVQEKAHAKQHRKQNLERMNLLRLRAQQLQAKKAMEASKAAKKANSEAKKAKPQAKKYPNKHSSPVKKTLEETVANLLAPIGTPDS

SEQ ID NO: 107699 - protein, 70 aa, Oryza sativa
  Clone ID: PAT_MRT4530_12025C.1.pep
QRARKCSARRVVHAAKLCSALVFSRTSTPAGYAGTRSCPQRCRPTSATILSRPPRRQPRPLAPRPRRQRI

SEQ ID NO: 107700 - protein, 175 aa, Oryza sativa
  Clone ID: PAT_MRT4530_12026C.1.pep
AASLTLTAKSAGRPPLPHPAPLWASISLADGAAFPAETSGGRRLLGVGLRRTTILGLKSIDVYAFGVYADDHDLRQLREKYQKLPVSQLKENAELINDALERDIRMTVRLQIVYGRLSIRSVRSAFEKSVGSRLLKFGGSDTHELLQRVGVDPEGCEMGPAAADDAAAGEDQALS

SEQ ID NO: 107701 - protein, 86 aa, Oryza sativa
  Clone ID: PAT_MRT4530_12027C.1.pep
PRGGAPTGFFGGPLVVSPPFYRLWGGKFGPPVVLIVSNRGFGAIFGLCFPKPKNFPQIFFKFAMWTGFYPRFVYLISKGPIFFFGN

SEQ ID NO: 107702 - protein, 90 aa, Oryza sativa
  Clone ID: PAT_MRT4530_12028C.1.pep
KIHQSYLTCHKSVIKQYNYACHVSRYEDPKCGVHVCTYAYPTPVAVACTVSGGWLRATDLPHIYHIGTLYMYEPTVCTQRMCICMPVMCR

SEQ ID NO: 107703 - protein, 213 aa, Oryza sativa
  unsure (1)..(213): unsure at all Xaa locations
  Clone ID: PAT_MRT4530_12029C.1.pep
WIFFKRDMVITLKQELIMNSFKTIDGRGANVHIANGACITIQYVTNVIIHGLLIHDCRPTGNAMVRSSPSHYGWRTMADGDAVSIFGASHIWVDHCSLSNCADGLIDAIMGSTAITVSNNYFTHHNEVMLLGHSDSYVKDKAMQVTIAFNHFGEGLIQRMPRCRHGYFHVVNNDYTHWEMYAIGGSAEPTINSQGNRYLAPTXPFAKEVTKKV

SEQ ID NO: 107704 - protein, 205 aa, Oryza sativa
  unsure (1)..(205): unsure at all Xaa locations
  Clone ID: PAT_MRT4530_1202C.1.pep
CTRYGMAFGGAGSPVSYPAAAELAKAIDGCLERYRLFYGSDQRVQACLSELGVPLTREPGFHQVDVRGDAYGMLAAHPLAPLVSLHHLDHIEPISPGGQHGSPLDAARRLVRASRLDQARSLQQAFCYQRGPRYTWSVSVSWGYTVQLYPWAVAPXSLEVPLRTFKTWRSWADGPFVFNTRRSRGSKLTYACMRRHSSSIVSPKF

SEQ ID NO: 107705 - protein, 81 aa, Oryza sativa
  unsure (1)..(81): unsure at all Xaa locations
  Clone ID: PAT_MRT4530_12030C.1.pep
NEQSSRSLTLCCENNVPSIKMLITTNLSPTYPKNTKKITKIKGWHHLAVHFKFVYVATRCCSSLVCFLFLVKTEGEFLLHX

SEQ ID NO: 107706 - protein, 533 aa, Oryza sativa
  unsure (1)..(533): unsure at all Xaa locations
  Clone ID: PAT_MRT4530_12031C.1.pep
MAEAAARRWAAALVLLVLLTGTVELIGGGGGSGGRRLLAGLRAGSTAAASGTRRWLRDSSWPATAAAAAAASRGDDGDGDEASSAAMTVPGAVDDPEGVVSQEHISERAAAPKKNGAVDALEDVVLKVRMTIKNILARRKLGYLSCGSTARSDDGCXGVTRGWHXNRHAARDACGIGIGRNAVGGRDGKVYVVTDPSDDDAVNPKKGTLRYAVIRDEPLWIVFKRDMVITLKQELIMNSFKTIDGRGANVHIANGACITIQYVTNVIIHGLHIHDCRPTGNAMVRSSRSHYEGRTMADGDAVXIFGASHIWVDHCSLSNCADGLIDAIMGSTXAITVSNNXYFTHHNEVMLLGHSDSYVKDKAMQVTIAFNHFGEVTIAFNHFGEGLIQRMPRCRHGYFDMVNNGGSAEPTINSQGNRYLAPTNPFAKEVTKRVETAQTIWKGWNWRSEGDLLLNGAFFTPSGAGASASYSRASSLGAKSSSMVGTITSGAGALSCRGDTTFYKTIDHFLNLSRHPAVAPRQAQKKHKNYRRS

SEQ ID NO: 107707 - protein, 72 aa, Oryza sativa
  Clone ID: PAT_MRT4530_12032C.1.pep
AWIEIYFCFFWTFSLNSWDFGFIIIVLILYIYQVKSGMALYRTIDMVSNILENKGDLKDELTPCKGLLIIEI

SEQ ID NO: 107708 - protein, 91 aa, Oryza sativa
  Clone ID: PAT_MRT4530_12033C.1.pep
MALLTKPRISRMIHRHAQKKGQKQQAQAATASRSAVPTDHLHGYFSVLSPLSSATLSIQDIDWLHLKYTDGSIQDVVAVGITFDTSTGLAF

SEQ ID NO: 107709 - protein, 98 aa, Oryza sativa
  Clone ID: PAT_MRT4530_12034C.1.pep
MWLFPGRGRALGEVVVTPSSLGGRVAPTPSTCVADRPHVARMMGPTGLVHLTADCLLDGLQLALPHHIGMLRVVCPLPRPESTFRSGPWVQPVRRLGM

SEQ ID NO: 107710 - protein, 441 aa, Oryza sativa
  unsure (1)..(441): unsure at all Xaa locations
  Clone ID: PAT_MRT4530_12035C.1.pep
GAAREXRGGSAELNGPAGPRRRPKARARAGRGERXAGGPGPSRVVPGGTRLSSTRLTVSEVHAGRARVWGGRRGACVRFAEDAVRRAHSQPHGSRWTARARGRREAADRGLLDPVTAEVAPTWRLCGCHAGRWEVDDDAGRNGRRTTAARAGANHGNSGEGEHTGMLHRTRGDEPMARIRRGMLDGGGLRWRQPTAGEGGNGDEVTRGRFPAARASTRLREPTPCAGLGGIASREAGDERXLPSSGGDGGEHTARDGSKEERVRPESRSASXRAPTPSAHVMASVGDQQDRGDGNGAGEKRGRLGGEKEGRAPGFIGXDVGLERLSLRPLEASVRRWRGRVDDDGDDGGPVWSGAATWAADAGQARQALTAAVTGRSATTVRARAGGATIWAASAGMAARAXREGSARLXGRAGRERETEPGREGEMGREGFGPSNPREAK

SEQ ID NO: 107711 - protein, 89 aa, Oryza sativa
  Clone ID: PAT_MRT4530_12036C.1.pep
KKRATPFFHYRTRQHFTKGAIQWRGKKIFKTLKQPGKDSGPTRRKHWRGGGNISSKAQKPFLRKKQGLKSPPSKIARTLGGKPYTLKNP

SEQ ID NO: 107712 - protein, 448 aa, Oryza sativa
  unsure (1)..(448): unsure at all Xaa locations
  Clone ID: PAT_MRT4530_12037C.1.pep
MRAVRGGRGAAGARVASRLTVDHAHXGGGGKRRERLARSADPVAAEVAPRWRLRGCHAGRREVEDDAGRNGWRTTAASGGANQGDTGEGEHTGMLHRMRGDEPTARIRRRELDGGGNRRRGXGGNGDEVMRGRFLAVRASTRLRESVASVGLGGATLSKAGDERALRSTGGDGGEHTASGDNVTRGRRHGSDLSGVGSGKRKKASARSPLPRPNAHRLLRHTRRRRLAGETAMARARNGEDWEGKEGGAWVYRAAXRFGNRPWAVKGASWRSALAAKTATGGGEDDAGGREKGKXGGKKEGLPPCRFGEKEEGERATRQXGGGALPPSLGGTRGERRGRVDDDGDDGGAVWSGAETRAADAGQARQALTAAATGRSATTARXARAGGAAIWVASAGTAARVERESSTRFTGRAGRERERERERGRGRWAERDSAHRTRGRQNRLLRRD

SEQ ID NO: 107713 - protein, 99 aa, Oryza sativa
  Clone ID: PAT_MRT4530_12038C.1.pep
MGPGQLSLGTFLAIWPNNSRAEEDADATTVMARAKMSGETSFRLHLNGISAICAAQCTYVGALRSCASFACVSGASSSYPASCSAGNIGRSASAKYWEN

SEQ ID NO: 107714 - protein, 156 aa, Oryza sativa
  unsure (1)..(156): unsure at all Xaa locations
  Clone ID: PAT_MRT4530_12039C.1.pep
GREKGKRGREPLPPCHFGKKEEGEGATRQRGGALPPSLGGTRGERRGRVDDDGDDGGAVWSGAATRAADAGQARQALTAAATGRSATKARARAGGAAIWAASAGTAARAXREGSARLXGRAGRERERESRGGRGRWAXRDSAHRTRGRQNRLLRRN

SEQ ID NO: 107715 - protein, 365 aa, Oryza sativa
  unsure (1)..(365): unsure at all Xaa locations
  Clone ID: PAT_MRT4530_1203C.1.pep
MAQDTGDAVLPSSRITADMHLSLSRKIMPDGAVVRAGESRPXPRYLERSMHLLSFAMTGLIPPFSRFFHEVLDFYEIHALHLAPNAVMTLAIFAHLCEMFIGVRLTMRLFXAFFIPQLLQGAVVGGCYFQPRPGTAGQYIESHLCKKWEDWKKDWFYTALPDHPRLRVPASPPERSAAWLATSELGEEYDAVWDRLRGLQSLGLTGAMVFGDYFCRRIAPLQERSRGAWEYIGPNDPMRTHVGERWDWGAEDAKRVIQRVLGLDSAEPTLIPDGILPLCCDRDRESILAVMSAVGAGRSRSSRGGASGSVIGTGGGGATTGGSRAEGPGGGGSRAPGSSRGPGDDSAGDPKGNSSRSESRTASGS

SEQ ID NO: 107716 - protein, 892 aa, Oryza sativa
  unsure (1)..(892): unsure at all Xaa locations
  Clone ID: PAT_MRT4530_12040C.1.pep
MAAEISAPVSISSGRFPSLPTLFKRPPCSPHPFPPLAARSPRRNRARAVFLSLRRRRRAPVRRRRRSGLPPVSASPPSASPRPRRPRPRLRFARRPPEHRRPRRPEPRRRLPPFRPPFPSSPXDRGEPWTAPFASPFPPLSRVPLRRAGGRRRXPSGRGRAASRRPCRRGRLRARPAAARWGPAVSRLRPRVRLTRGTHGAGRRQPRAPGPPWTHLGHIRTGLXASVAKHYRXFHMSSGANEGYTSCGPVVEMSWHRAGVLLLGAQSCLPVPGVPAVGGIGSMYTSDQSRIYSNSRALGYGQAEQCTQMAGSVTRRGLDMTGFVLELRGMCVALGYPHGVDYQARPLPEQEGGDAEPRAGWEVTAVILAGSSERTSLTVTAGGDSFPAACQSAALLAIGTLHQRYPDELQHSPYRYHPRRGGARDYATFRDASSEDDATVVHLARMVEAYDAARIDFHQMVHRGMVENNLKILELRQENLQLKKDLDAVEVQLHQLKIAQGEVCRPKRRRVCRSQKITARKSTSRPELVRQSLAWTCFVETPRAEPAPVVPQEGEASGVGSTEDALLLTFRPGPSQRRNAATGDGNQPEGSNHNHPGNPPPPPPPPPPPPPDTNAILTQILAQQANMMTAFLHHLQNPPQQNAPPPPPQHSKLAEFLRIRPPTFSSSNNPVDALDWLHAVGKKLDTGPASLWWDHFQATQPEGQPITWARFTAAFRRTHVPAGVVALKKREFRELKQGNRSVMEYLHEFNNLARYAPEDVREDEEKQEKFLAGMDPELSVRLVSGDYPDFQRLVDKSIRLEAKHKELESHKRRLANFRNQQGANQRVRYTNPYPGGSSSQQQQQQQQPRSAPRPQFVVRVPQPQQQQNQQGTRAPRPPTPTVQPGQGRRDAQ

SEQ ID NO: 107717 - protein, 99 aa, Oryza sativa
  Clone ID: PAT_MRT4530_12041C.1.pep
AEGSRAGTARPTHQAMPCQPTGRTHAPGAAQHDSGRAGPAQPGLLAQRAGRGRPRHSPAVGPGRHRSDPSQGVPCLGRAKISCRGPGLWALGLMAIYNP

SEQ ID NO: 107718 - protein, 395 aa, Oryza sativa
  Clone ID: PAT_MRT4530_12042C.1.pep
MVRAIGPLLLLAHVLVFVVSIAAAAAPVRRPRCDAGDRAALLAVKAAFNNASYFQSWTPDIACCHWYGVDCGGDDYDYDPTDGDRVLSLAIIRDDNVTGGIPGDAIARLTRLQELMFFKVPGVTGPIPAALATLTALRELTISRTALSGSIPSFIGDKFTALQSLDLSFNSLTGAIPASLAKPPKLISIDLSRNQLTGSIPRLLLSKAGQQAFLTLSHNNLSGRIPAAFGAVNFVQIDLSRNQLTGDASMLFGSGKKELGSVYLSRNALSFDMSELRLPERLSFLDVSHNAIRGGIPAQVANLSNLQLLNVSYNRMCGEGGNHLSRSISIPAEFAAVNLARIDLSAHRRRCSIGRGKAAQAIDVSRNALELELELPEQVVTVDVSHNMHHLRRRS

SEQ ID NO: 107719 - protein, 455 aa, Oryza sativa
  unsure (1)..(455): unsure at all Xaa locations
  Clone ID: PAT_MRT4530_12043C.1.pep
ARAGGEGRERGFGEGGAAHARGSRRTRCGGPTRSLTARGGPRARXGQREAADRGLLDPVAAKVAPTWRLRGCHAGRREVDDDAGRNGRRTTAASGGANHGDTGESEHTGKLHRTRGDEPTARIRRGMLDGGGLRWRQPAAGEGGNGDGATGDRFGXARASTRLRESVASVGLGGATPSEAGDERVLRSTGGDGGNGRGGASXLRGGYSCYYPSLRGGDGTRRENGGRHYRAGNAPALPVXAMNGGGETEGRQWRGGGKRNGRRNRWEGALVYRTTMSVWKPTLGGQGXELALGARGQNGDRGGXDDAGGRKKGKRGREKEEGERAMRQRGGXALPPSLGSTREEGRGQGDDDDDDGXGDLERGDDTGGRRGXALTAAATGRSATMARARGKQXGGAAVLATSAGNDSEGGGRSARRGSRARVRSARAEREREREPGREGKMGREGFGPSNPREAK

SEQ ID NO: 107720 - protein, 2007 aa, Oryza sativa
  Clone ID: PAT_MRT4530_12044C.1.pep
MEPEISAADSFPSGRPLSLPTLFKRSPCLSPPFPPLAALSPRRIRARAVVLSLRRRRRAPVRRRRRPVPPPASASPPSASPRSRRPRPLLRFARQPPEHRRPRRPEPRRRLSPLWSPFPSSPSTRGEPRTAISFPPSLPSLGRRSACLWPPPATIGARARRLPSAVPARPPSGAPRGCQVGPGRQPPAPAGTADAWDPRRQPASAACARSTVDPPRPYKDRSSGLCCKALPYFHMSSGANEGYTSCGPVVEMSWHRAGVLLLGAQSCLHVPGVPAVGGIGSVLLSMARMGWKLCHVFRLYTVVMAGSVTRRGLDMTGFVLELRGMCVVLGYPHGVDYQGRPLPEQEGDDGEPHAAWEVTAVILAGSPERTSLAVTAGGDSFPAASQSAALLAIGTLHQRYPDELQHSPYRYHPRRGGARDYATFRDASSEDDATIVHLARMVEAYDAARIDFHQMVRRGMVENNLKILELRQENLQLKKDLDAVEAQLHQLKIAQGEVCRPKRRRVCRSQKITARKSTSRPELVRQSLAWTCFVETPRAEPAPVVPQEGEASGVGSTEDALLLTFRPGPSQRRSANTGDGNQPEGSNHHHQGSPPPPPPPPPPPPPDTNAILTQILAQQANMMTAFLHHLQNPPQHNAPPPPPQHSKLAEFLRIRPPTFSSSNNPVDALDWLHAVGKKLDTVQCSDEEKVIFAAHQLQGPASLWWDHFQATQPEGQPITWARFTAAFRRTHVPAGVVALKKREFRELKQGNRSVMEYLHEFNNLARYAPEDVREDEEKQEKFLAGMDPELSVRLVSGDYPDFQRLVDKSIRLEAKHKELESHKRRLANFRNQQGANQRIRYTNPYPGGSSSQQQQQQQQPRFAPRPQFVVRVPQPQQQQNQQGTRAPRPPTPTVQPGQGRRDAQGPQRLCFNCFEPGHFADKCPKLRRQQGQAPSRSNNGEKDVIWGRVNHVTAEDVLTTPDVIVGTFLIHSIPATILFDSGASHSFISVPFVGRNQLGVERLRNPLLITTPGGVMTAKYYSPAVPIEIQGIPFPSDLILLDTKNLDVILGMNWLAQFQGVVDCARRTVTLYRGPEQPVVFFAPPTSVSSSELHQIELLEIPIVREFGDVFPEELPGMPPKREIEFRIDLAPGTTPLYKRPYRTAANELAEVKKQLEELKEKGYIRPSTSPWGAPVIFVEKKDKTKRMCVDYRALNELKGATVFSKIDLRSGYHQLRIREEDIPKTAFTTRYGLYEFTVMSFGLTNAPAFFMNLMNKVFMEYLDKFVVVFIDDILVYSQSEEDHQHHLRLVLGKLREHQLYAKLSKCEFWLSEVKFLGHVISAKGVAVDPETVTAVTDWKQPKTVTQVRSFLGLAGYYRRFIENFSKIARPMTQLLKKEEKFVWSPQCEKAFKTLKEKLVSSPVLILPDTRKDFMDGHVVAYASRQLRPHEGNYPTHDLELAAVVHALKIWRHYLIGNRCEIYTDHKSLKYIFTQSDLNLRQRRWLELIKDYDVGIHYHPGKANVVADALSRESHCNTLNVRGIPPELSQQMEALNLSIVGRGFLAALEAKPTLLDQIREAQKNDPDMHGLLKNMKQGKAAGFTEDEHGTLWNGNRVCVPDNRELKQLILQEAHESPYSIHPGSTKMYLDLKEKYWWVSMKREIAEFVALCDVCQRVKAEHQRPAGLLQPLQVPEWKWDEIGMDFITGLPKTQGGYDSIWVVVDRLTKVARFIPVKTTYGGNKLAELYFARIVSLHGVPKKIVSDRGSQFTSHFWKKLQEELGTRLNFSTAYHPQTDGQTERLNQILEDMLRACVLDFGKTWDKSLPYAEFSYNNSYQASIQMAPYEALYGRKCRTPLLWDQVGESQVFGTDILREAEAKVRTIRDNLKVAQSRFRTKGKLAPRYVGPFRIVARRGEVAYQLELPASLGNVHDVFHVSQLKKCLRVPSEQTDPEQIEVREDLTYVERPVKILDTMERRTRNRVIRFCKVQWSNHAEEEATWEREDELKAAHPDLFASSSESRGRDSV

SEQ ID NO: 107721 - protein, 431 aa, Oryza sativa
  unsure (1)..(431): unsure at all Xaa locations
  Clone ID: PAT_MRT4530_12045C.1.pep
MRAVRGGRGAAGPRAASRLAVDRAREGRREAADRGLLDLVAAEVAPTWRLRGCHAGRREVDDDAGRNGRRSTAASGGANHGDTGEGEHTGMLRRTRGDEPMARIRRGMLDGGGLRRRQPAERKGGNDDEVTRGRFPAVGASKRLRESTPCAGLGGIASREARDERXLPSSGGDGGEHTASDGTEEGKRPESPSASTNTPALPVXLAMNGGGETEGRQWRGGSERNGRRNRWEGALVYRTTMSVWXTDLGRSRRELALSARGQNGDRXRMTPAGRGKGKRKGERGLAPCHFGKRRRGWGRRGRGRRSSASVPWRLARGEGKAESMTTAMTAGRFGAERRHGRQARAGADGGGDQAVGHHGARARGKQRAARREAAARAEGARLGAAHAHACAAHEQSGGEGERERAGEGGGDGPRGVRPIEPEGGKIDFCGG

SEQ ID NO: 107722 - protein, 1757 aa, Oryza sativa
  Clone ID: PAT_MRT4530_12046C.1.pep
MSWHRAGVLLLGAQSCLPVPGVPAVGGIGSVLLSMARMGWKLCHVFRLYTVVMAGSVSRRGLDMTGFVLELRGMCVVLGYPHGVDYQRRPLPEQEGDDAEPLAAWEVTAVILAGSPERTSLAVTAGGDSFPAACQSAALLAIGTLHQRYPDELQHSPYRYHPRRGGARDFATFRDASSEDDATIMHLARMVEAYDAARIDFHQMVRRGMVENNMKILELRQENLQLKKDLDAVEAQLHQLKIAQGEVCCPKRRRVCRSQKITARKSTSRPELIRQSLAWTCFMETPRAEPTLVVPQEGEASGVGSTEDALLLTFRPGPSQRRSANTGDGNQPEGSNHNHQGSPPPPPPPPPPPPPDTNAILTQILAQQANMMTAFLHHLQNPPQHNAPPPPPQHSKLAEFLRIRPPTFSSSNNPVDALDWLHAVGKKLDTVQCSDEEKVIFAAHQLQGPASLWWDHFQATQPEGQPITWARFTAAFRRTHVPAGVVALKKREFRELKQGNRSVMEYLHEFNNLARYAPEDVREDEEKQEKFLAGIDPELSVRLVSGDYPDFQRLVDKSLRLEAKHKELESHKRRLANFRNQQGANQRQQQQQPQPRSAPRPQFVVRVPQPQQQQSQQGTRVPRPPMPDGQPSQGHRDAQGPQRLCFNCFEPGHFADKCPKPRRQQGQAPPRSNNGGKDVIRGRVNHVTAEDVLTTPDVIVGTFLIHSIPATILFDSGASHSFISVPFVGRNQLGVERLRNPLLITTPGGVMTAKYYSPAVPIEIQGIPFPSDLILLDTKNLDVILGMNWLAQFQGVVDCARRTVTLYRGPEQPVVFFAPPTSVSSSELYQIGLSEIPIVREFGDVFPEELPGMPPKREIEFRIDLAPGTTPLYKRPYRMAANELAEVKKQLEELKEKGYIHPSTSPWGAPVIFVEKKDKTKRMCVDYRALNEVTIKNKYPLPRIDDLFDQLKGATVFSKIDLRSGYHQLRIHEEDILKTAFTTRYGLYEFTVMSFGLTNAPAFFMNLMNKVFMEYLDKFVVVFIDDILIYSQSEEDHQHHLRLVLGKLREHQLYAKLSKCEFWLSEVKFLGHVISAKGVAVDPETVTAVTDWKQPKTVTQVRSFLGLAGYYRRFIENFSKIARPMTQLLKKEEKFVWSPQCEKAFQTLKEKLVSSPVLVLPDTRKDFMVYCDFAPRIGLRPHDGNYPTHDLELAAVVHALKIWRHYLIGNRCEIYTDHKSLKYIFTQSDLNLRQRRWLELVKDYDVGIHYHPGKANVVADTLSRKSHCNTLNVRGIPPELNKQMEALNLSIVGRGFLAALEAKPTLLDQIREAQRNDPDMHGLLKNMKQGKVAGFTEDEHGTLWNGNRVCVPDNRELKQLILQEAHKSPYSIHPGSTKMYLDLKEKYCVSRQSTNDRPDFSNLSKYQNGNEMKLGWISSPDFQKPKVARFIPVKTTYGGNKLAELYFARIVSLHGVPKKIVSDRGSQFTSHFWKKLQEELGTRLNFSTAYHPQTDGQTERLNQILEDMLRACVLDFGKTWDKSFPYAEFSYNNSYQASIQMAPYEALYGRKCRTPLLWDQVGESQVFGIDILREAEAKVRAIRDNLKVAQSRQKSYADNRRRDLEFAVDDFVYLRVTPLRGVQRFRTKGKLAPRFVDPFRIIARRGEVAYQLELPASLGNVHDVFHVSQLKKCLRVPSEQADSEQIEVREDLTYVERPVKILDTMERRTRNRVIRFCKVQWSNHAEEEATWEREDELKAAHPDLFASSSESRGRDSV

SEQ ID NO: 107723 - protein, 95 aa, Oryza sativa
  Clone ID: PAT_MRT4530_12047C.1.pep
MARCSILPSLADREIWDATASLVEIIQAQGHRHGRLGSAPEQVGLVHCRRRCRGVRRDALGAIQSKQRSRELEIQAKQPEKSPRGLQSDSRPRKP

SEQ ID NO: 107724 - protein, 378 aa, Oryza sativa
  unsure (1)..(378): unsure at all Xaa locations
  Clone ID: PAT_MRT4530_12048C.1.pep
ASARGRREAADRGLLDPVAAEVAPTWRLRGCHAGRREVDDDAGRNGRRTTXGGVNHGDTGEGEHTRMLHRTRGDEPMARIRRGMLDGGRLRRRQPTAGEGGNGDEVTRGRFPAARASTRLREPTPCAGLGGIASRKDGDERXLPSSGGDGGEDTASDSSXRKKTSARSPLPRPNAHRLLRHTRRRRPARETAMARARNGEDWEGKEEGRRLGGGRMTPAGGKREKGGEKEGLPPCRFGEKEEGERATRQRXGELCLRPLEARAGRGGAESMMTVMTAGRFGVERRHGWQTRGRXRQALTAAATGRSATTARARAXGRRGDLGGIGGNGRESGEGELDAAYGLSGERERERAGEGGGDGPRGIRPIELEGGXIDFCGGI

SEQ ID NO: 107725 - protein, 918 aa, Oryza sativa
  unsure (1)..(918): unsure at all Xaa locations
  Clone ID: PAT_MRT4530_12049C.1.pep
MDISRTNEGYTSYGPVVEMSWHRAGVLLLGAQSCLPVPGVPAMAGSINCRGLDLTGFVLELRGMCVVLGYPHGVDYQGKQLPEQEGDDAEPHAAWEVTAVILTGSPERTSLAVTAGARDYATFRDAGSEDDSTIMHLARMVEAYDAARIDFHQMVRRGLVENNMKILELRQENLQLKKDLDAVEAQLRQLKVAQGEVCRPKRRRVCRSQKITARKSTSRPELVRQSLAWTCFVETPRAEPVLVMVTTRRSAATGEGSHPEGSNHNNHGSLPPPPPPPPPPPPDTNAILTQILAQQANMMAAFLHHIQNPPQHNAPPPPPQHSKLAEFLRIRPPTFSSSNNPVDALDWLHAVGKKLDTVQCSDEEKVIFTAHQLQGPASLWWDHFQATQPEGQPTTWARFTAAFWRTHVPAGVMALKKREFRELKQGNCSVMEYLHEFNNLARYAPEDVREDEEKQEKFLAGMDPELSVRLVSGDYPDFQHLVDKSIRLEAKHKERESHKRRLANFRNQQGANQRQQQQQQPRSAPRPQFVVRVPQPQQQQSQQGTRAPRPPTPAVQPSQGRRDVQGQQRLCFNCFEPGHFADKCPKPRRQQGQAPPHSNNGGKDVIRGRVNHVTAEDVLTTPDVIVGTFLIHSIPATILFDSGASHSFIYVPFVGRNQLGVERLRNPLLITTPGGVMTAKYYSPVVPIEIQGIPFPSDLILLDTKNLDVILGMNWLAQFQGVVDCARRTVTLYRGPEQPVVFFAPPTSVGSSELHQIGLSEIPIVRGFGDVFPEELPGMPPKREIEFRIDLAPGTTPQYKRPYRMAANELAKVKKQLEELKEKGYIRPSTSPWGAPVIFVEKKDKTKRMCIDYRALNEVTIKNKYPLPRIDDLFDQLKGAIVFSKIDLRSGYHXLRIREEDIPKTAFTTRYGLYEFTV

SEQ ID NO: 107726 - protein, 509 aa, Oryza sativa
  Clone ID: PAT_MRT4530_1204C.1.pep
QQKLEKEHRSPFDSQQPLQSTIASKITNLATKVTNKVRSRVRADENGIEREGGSGESHCSDRDAKEEPTSSGTTTPRGDAPRGAFATEESSPGKTAKMNSDESEGKVGFHRILSSKAEALLNKKGISWPWKGRDNDGPDVKNQATWPWLHGEQDGSQNHQKISDSAITQDGQGAEYNQPNKNEASGSWSSFNNNSTSSASSTGSTNSSALYKVDHEADCLDYEILWEDLVIGEQIGQGSCGTVYHALWYGSDVAVKVFSKQEYSEEVIQTFRQEVSLMKKLRHPNILLFMGAVTSPQRLCIVTEFLPRGSLFRLLQRNNTKLDWRRRVHMALDIARGMNYLHHFSPLIIHRDLKSSNLLVDKNWTVKVADFGLSRLKRETFLTTKTGKGTPQWMAPEVLRNEPSDEKSDVYSYGVILWELVTQKIPWENLNSMQVIGAVGFMNHRLEIPSETDPQWTSLILSCWETDSQLRPSFQQLLERLRELQRQYNVQTQMQRNASAAAKNSSIEE

SEQ ID NO: 107727 - protein, 153 aa, Oryza sativa
  unsure (1)..(153): unsure at all Xaa locations
  Clone ID: PAT_MRT4530_12050C.1.pep
RFWPDKWLGNLLFKXKHPSLYAIIRRKNSSIASVMGSVPLNVSFRRALVGHNLVSWHDLCASIVHVQLNQSFDCFIWKFNQSGRFSVRSMHLALINNGNIERNKIIXKLKMLLKIKIFMWYLLKVVVLTKDNLTKQNWNDSLRCCFCMKNESI

SEQ ID NO: 107728 - protein, 1788 aa, Oryza sativa
  Clone ID: PAT_MRT4530_12051C.1.pep
MSWHRAGVLLLGAQSCLPVPGVPAVGGIGSVLLSMARMGWKLCHVFRLYTVVMAGSVTRRGLDMTGFVLELRGMCVVLGYPHGVDYQARPLPEQEGEDAEPHAGWEVTAVILSGSPERTSLAVTAGGDSFPAACQNAALLAIGTLHQRYPDELQHSPYRYHPHRGGARDYATFRDASSEDDATIVHLARMVEAYDAARIDFHQMVRRGMVENNLKILELRQENLQLKKDLDAVEAQLHQLKIAQGEDCRPKRRRVCRSQKITARKSTSRPELVRQSLAWTCFVETPHAEPAPVVPQEGEASGVGSTEDALLLTFRPGPSQRRNVNTGDGNQPEGSNHNHQGNPPPPPPPPPPPPPDTNAILTQILAQQANMMTAFLHHLQNPPQQNAPPPPPQHSKLAEFLRIRPPTFSSSNNPVDALDWLHAVGKKLDTVQCSEEEKVIFAAHQLQGPASLWWDHFQATQPEGQPITWARFTAAFRRTHVPAGVVALKKREFRELKQGNRSVMEYLHEFNNLARYAPEDVREDEEKQEKFLAGMDPELSVRLVSGDYPDFQRLVDKSIRLEAKHKELESHKRRLANFHNQQGANQRVRYTNLYPGGSSSQQQQQQQQPRSAPRPQFVVRVPQPQQQQNQQGTRAPRPPTPTVQPGQGRRDAQGQQRLCFNCFEPGHFVDKCPKPRRQQGQAPPRSNNGGKDVIRGRVNHVTAEDVLTTPDVIVGTFLIHSIPATILFDSGASHSFISVPFVGRNQLGVERLRNPLLITTPGGVMTAKYYSPAVPIEIQGIPFPSDLILLDTKNLDVILGMNWLAQFQGVVDCAGRTVTLYRGPEQPVVFFAPPTSVRSSEVHQIGLSEIPIVREFGDVFPEELPGMPPKREIEFRIDLAPGTTPLYKRPYRMAANELAEVKKQLEELKEKGYIRLSTFPWGAPVIFVEKKDKTKRMCVDYRALNEVTIKNKYPLPRIDDLFDQLKGATVFSKIDLRSGYHQLRICEEDIPKTAFTTRYGLYEFTVMSFGLTNAPAFFMNLMNKVFMEYLDKFVVVFIDDILIYSQSEEDHQHHLRLVLGKLREHQLYAKLSKCEFWLPEVKFLGHVISAKGVAVDPETVTAVTDWKQPKTVTQVRSFLGLAGYYRRFIENFSKIARPMTQLLKKEEKFVWSPQCEKAFQTLKEKLVSSPVLILPDTRKDFMVYCDASRQGFGCVLMQDGHVVAYASRQLRPHEGNYPTHDLELAAVVHALKIWRHYLIGNRCEIYTDHKSLKYIFTQSDLNLRQRRWLELIKDYDVGIHYHPGKANVVADALSRKSHCNTLNVRDIPPELNQQMEALNLSIVGRGFLAALEAKPTLLDQIREAQKNDPDMHGLLKNMKQGKAAGFTEDEHGTLWNGKRVCVPDNRELKQLILQEAHESPYSIHPGSTKMYLDLKEKYCVSRQSTSDRPDFSNLSKYQNGNGMKLGWISSPDFQKPKVAQFIPVKTTYGGNKLAELYFARIVSLHGVPKKIVSDRGSQFTSHFWKKLQEELGTRLNFSTAYHPQTDGQTERLNQILEDMLRACVLDFGKTWDKSLPYAEFSYNNSYQASIQMAPYEALYGRKCRTPLLWDQVGESQVFGTDILREAEAKVRIFRDNLKVAQSRQKSYADNRRRDLEFAVGDFVYLRVTPLRGVHRFQTKGKLAPRYVGPFRILARRGEVTYQLELPASLGNVHDVFHVSQLKKCLRVPSEQADSEQIEVREDLTYVERPVKILDTMERWTRNRVIRFCKVQWSNHAEEEATWEREDELKAAHPDLFASSSESRGRDSV

SEQ ID NO: 107729 - protein, 170 aa, Oryza sativa
  Clone ID: PAT_MRT4530_12052C.1.pep
AKLLPHSQRLAANVVLARGREAVLVAAPVHVVTLVHHPDNDRPSIHGGGDDDADPPVAAAAACATTAVVEAQPPRPGVQLDDQLHVPAEAHMQRRDRRRMSDTGCEPHEPRVALADDAAVRASLGAPGTSSRFRGVGIAAAAGVAAASSRDAMPPWIMGEAESKHMTVGH

SEQ ID NO: 107730 - protein, 208 aa, Oryza sativa
  unsure (1)..(208): unsure at all Xaa locations
  Clone ID: PAT_MRT4530_12053C.1.pep
KCVDLYYDHAYDKCLEXSVIKPEEMDLVSFAIESLNSSSREKRLAGLRILHGFLRYREGMPDSGSSEAEVASKVIASEKAVPRLIGMLGWTIKADEETRLFASKVVAVLAGRIRVAGIPGAVQLISSLLDAQDQPIMQAAIALERARERDGSCWAHWFSIPEEEPSANQDLLPEIGMKILGRLTYDIHNCAEISKATDLISKIIGYTN

SEQ ID NO: 107731 - protein, 65 aa, Oryza sativa
  Clone ID: PAT_MRT4530_12054C.1.pep
MDDVLCAVFPIGWFSGELLRATAAGRDAGGGPQQGGKKRRVGGRKWRARTHRLARKDGGRGGVSV

SEQ ID NO: 107732 - protein, 462 aa, Oryza sativa
  unsure (1)..(462): unsure at all Xaa locations
  Clone ID: PAT_MRT4530_12055C.1.pep
ARAGRREREPGLGRGGAAHARGSRRTRXGGPTRSLMAHRGPCARGGTEGAAGXGQLDPVLAELAPTWRLCGCHADRREVEEDAGRNGRRTVAANGGANHGDTGESEHTGRLHGMRGDEPTTRICRGMLDGGGLWWRQPVAREGGNGDGTTGDRFGRARASTRLREFVASVGLGGATPSEAGNERVLRSTGGDGGEHTASGSNGRGGASXLRGGYSCYYPSLRGGDGTRRENEGRHYRAGRALAPPAHATAAVGERDGNGVGEKRGRLGGEKXGREGAWVYRTAMSVWKPTLGGQGSEPALGGRGPNGDRGGXDDAGGREKGKGGERKEEGERAMRQRGGXALPPSLGSTREERRGQVDDDGDDGXGGLERSNDTGGRHRQARQALTAAATGRSATMARARAGSNXGAAIWAASTGXAARAEGXGSAQLTGERERERERERGMGREGEMGREEFGPSNLREAK

SEQ ID NO: 107733 - protein, 1697 aa, Oryza sativa
  Clone ID: PAT_MRT4530_12056C.1.pep
MAGSVTRRGLDMTGFILELRGMCVVLGYPHGVDYQARPLPEQEGDDAEPHAAWEVTAVILSGSPERTSLAVTAGGDSFPAACQNAALLAIGTLHQRYPDELQHSPYRYHPRRGGARDYATFRDASSEDDATIVHLARMVEAYDAARIDFHQMVRRGMVENNLKILELRQENLQLKKDLDAVEAQLHQLKIAQGEVCCPKRRRVCRSQKITARKSTSRPELVRQSLAWTCFVETPRAEPAPVVPQEGEASGVGSTEDALLLTFRPGPSQRRNAATGDGNQPEGSNHNHQGNPPPPPPPPPPPPPDTNAILTQILAQQANMMTAFLHHLQNPPQQNAPPPPPQHSKLAEFLRIRPPTFSSSNNPVDALDWLHAVGKKLDTVQCSDEEKVIFAAHQLQGPASLWWDHFQATQPEGQPITWARFTAAFRRTHVPAGVVALKKREFRELKQGNRSVMEYLHEFNNLARYAPEDVREDEEKQEKFLAGMDPELSVRLVSGDYPDFQRLVDKSIRLEAKHKELESHKRRLANFRNQQGANQRVRYTNPYPGGSSSQQQQQQQQPRSAPRPQFVVRVPQPQQQQNQQGTRAPRPPTPTVQSGQGRRDAQGQQRLCFNCFEPGHFADKCPKPRRQQGQAPPHSNNGGKDVIRGRVNHVTAEDVLTTPDVIVGTFLVHSIPATILFDSGASHWFISVPFVGRNQLGVERLRNPLLITTPGGVMTAKYYSPAVPIEIQGIPFPSDLILLDTKNLDVILGMNWLAQFQGVVDCARRTVTLYRGPEQPVVFFAPPTSVSSSELHQIGLSEIPIVREFGDVFPEELPGMPPKREIEFRIDLAPGTTPLHKRPYRMAANELAEVKKQLEELKEKGYIRPSTSPWGAPVIFVEKKDKTKRMCVDYRALNEVTIKNKYPLPRIDDLFDQLKGATVFSKIDLRSGYHQLRIREEDIPKTAFTTRYGLYEFTVMSFGLTNAPAFFMNLMNKVFMEYLDKFVVVFIDDILVYSQSEEDHQHHLRLVLGKLREHQLYAKLSKCEFWLSEVKFLGHVISAKGVSVDPETVTTVTDWKQPKTVTQVRSFLGLAGYYRRFIENFSKIARPMTQLLKKEEKFVWSPQCEKAFQTLKEKLVSSPVLILPDTRKDFMVYCDASRQGFGCVLMQDGHVVAYASRQLRPHEGNYPTHDLELAAVVHALKIWRHYLIGNRCEIYTDHKSLKYIFTQSDLNLRQRRWLELIKDYDVGIHYHPDMRQGKAAGFTEDEHGTLWNGKRVCVPDSRELKQLILQEAHESPYSIHPGSTKMYLDLKEKYWWVSMKREIAEFVALCDVCQRVKAEHQRPAGLLQPLQVPEWKWDEIGMDFITGLPKTQGGYDSIWVIVDRLTKVARFIPVKTTYGGNKLAELYFARIVSLHGIPKKIVSDRGSQFTSHFWKKLQEELGTRLNFSTAYHPQTDGQTERLNQILEDMLRACVLDFGKTWDKSLPYAEFSYNNSYQASIQMAPYEALYGRKCRTPLLWDQVGESQVFGTDILREAEAKVRIIRDNLKVAQSRQKSYADNRRRDLEFAVDDFVYLRVTPLRGVHRFQTKGKLAPRYVGPFRIIARRGEVAYQLELPASLGNVHDVFHVSQLKRCLRVPSEQADSEQIEVREDLTYVERPVKILDTRERRTRNRVIRFCKVQWSNHAEEEATWEREDELKAAHPDLFASSSESRGRDSV

SEQ ID NO: 107734 - protein, 412 aa, Oryza sativa
  unsure (1)..(412): unsure at all Xaa locations
  Clone ID: PAT_MRT4530_12057C.1.pep
MRAVRGGRGAAGPRSASWLAVDRTREXGRREAADRGLLDPVAAEVAPTWRLRGCHAGRREVDDDAGRNGRRTTAASGGANHGDTGEGEHTGMLHRTRGDEPMARIRWGMLDGGGLRWQQPTAGEGGNGDEVTRGRFPTARASTQLREPTPCAGLGGIASREAGDERXLPSSGGDGGEHTASDGTMTMGRRHGSDLSLLGPGERKKTSARSHLPRPNAHWLLRHTRRRRPARETAMARARNREDWEGKEEGRRLGNRPWAVKGASWRSALAAKTATGWGEDDDGGREKGKXGGEKEGLPPCRFGEKEEGEKATRQRGGALPPSLGGTRGERRGRVDDDGDDGGAVWSGATTRATGAGWRGRXVTAAATRRSATRHARAGYNGRRGWARALARRAERLRGCGRGRRMVRGRRER

SEQ ID NO: 107735 - protein, 1794 aa, Oryza sativa
  Clone ID: PAT_MRT4530_12058C.1.pep
MSSGANEGYTSCGPMAGSVTRRGLDMTGFVLELRGMCVVLGYPHGVDYQARPLPEQEGEDAEPHAGWEVTAVILSGSPERTSLAVTAGGDSFPAACQNAALLAIGTLHQRYPDELQHSPYRYHPRRGGARDHATFRDASSEDDATVVHLARMVEAYDAARIDFHQMVRRGMVENNMKILELRQENLQLKKDLDALEAQLHQLKIAQGEGSRPKRRRVCRSQKITARKSTSRPELVRQSLAWTCFVETPRAEPAPVVPQEGEASGVGSSEGALLLTFRPGPSQRSPSLFAGSVWGFQMVTTRRNVNTGEGNQPEGSNPNPQGNPPPPPPPDTNAILTQILAQQANMMNAFLHHLQNPPQQNAPPPPPQHSKLAEFLRIRPPTFSSSNNPVDALDWLHAVGKKLDTVQCSDEEKVVFAAHQLQGPASLWWDHFQATQPEGQPITWTRFTAAFRRTHVPAGVVALKKREFRELKQGNRSVMEYLHEFNNLARYAPEDVREDEEKQEKFLAGMDPELSVRLVSGDYPDFQRLVDKSIRLEAKHKELESHKRRLANFRNQQGANQRVRYTNPYPGGSSSQQQQQQPRPAPRPQFVVRVPQQQQQQNQQGTRAPRPPTPAVQPVQGRRDASGPQRLCFNCFEPGHFADKCPKPRRQQGQAPPRSNNGGKDVIRGRVNHVTAEDVLTTPDVIVGTFLVHSIPATILFDSGASHSFISVPFVGKNQLGVERLRNPLLITTPGGVMTAKYYSPAVPIEIQGIPFPSDLILLDTKNLDVILGMNWLAQFQGVVDCARRTVTLYRGPEQPVVFFAPPTSVRSSELHQISLSEIPIVREFGDVFPEELPGMPPKREIEFRIDLAPGTTPLHKRPYRMAANELAEVKKQLEELKEKGYIRPSTSPWGAPVIFVEKKDKTKRMCVDYRALNEVTIKNKYPLPRIDDLFDQLKGATVFSKIDLRSGYHQLRIREEDIPKTAFTTRYGLYEFTVMSFGLTNAPAFFMNLMNKVFMEYLDKFVVVFIDDILIYSQTEEDHQHHLRLVLGKLREHQLYAKLSKCEFWLSEVKFLGHVISAKGVAVDPETVTAVTEWKQPKTVTQIRSFLGLAGYYRRFIENFSKIARPMTQLLKKEEKFVWSPQCEKAFQTLKEKLVSSPVLILPDTRKDFMVYCDASRQGLGCVLMQDGHVVAYASRQLRPHEGNYPTHDLELAAVVHALKIWRHYLIGNRCEIYTDHKSLKYIFTQSDLNLRQRRWLELIKDYDVGIHYHPGKANVVADALSRKSHCNTLNVRGIPPELNQQMEALNLSIVGRGFLAALEAKPTLLDQIREAQKNDPDMHGLLKNMKQGKAAGFTEDEHGTLWNGKRVCVPESRELKQLILQEAHESPYSIHPGSTKMYLDLKEKYWWVSMKREIAEFVALCDVCQRVKAEHQRPAGLLQPLQVPEWKWDEIGMDFITGLPKTQGGYDSIWVVVDRLTKVARFIPVKTTYGGNKLAELYFARIVSLHGIPKKIVSDRGSQFTSHFWKKLQEELGTRLNFSTAYHPQTDGQTERLNQILEDLLRACVLDFGKTWDKSLPYAEFSYNNSYQASIQMAPYEALYGRKCRTPLLWDQVGESQVFGTDILREAEAKVRIIRDNLKVAQSRQKSYADNRRRDLEFAVDDFVYLRVTPLRGVHRFQTKGKLAPRYVGPFRIIARRGEVAYQLELPASLGNVHDVFHVSQLKKCLRVPSEQADSEQIEVREDLTYVERPVKILDTMERRTRNRVIRFCKVQWSNHAEEEATWEREDELKAAHPDLFASSSESRGRDSV

SEQ ID NO: 107736 - protein, 227 aa, Oryza sativa
  unsure (1)..(227): unsure at all Xaa locations
  Clone ID: PAT_MRT4530_12059C.1.pep
MARARAGRGEREPVGRVHPRVVPGGTRLSGARLTVXEGARGACARFAEDAVRRAHVQPHGSRWTSRARGRRGAADRGLLDPVAAKVAPTWRLRGCHAGRREVEEDACRNRRRTAVASGGANHGDTGESEHTGKLHGTRGVEPKARICRGMLDGGGLRRRQPAAGEGGNGDEVTRGRFPAARASTRLRESVASVGLGGAAPSEAGDERVXGDGGEHTAGGGNGRGGAC

SEQ ID NO: 107737 - protein, 659 aa, Oryza sativa
  Clone ID: PAT_MRT4530_1205C.1.pep
MAGTGQSRPCIMGSSVLIVPCLSAYAPLCRVAARRGPRGEGAVGLEGAMPYPEGATSYPEAPPAASMIRVAFAMAQDAGDAVLLSSRITVDKHLSLPRKIMPEEAVVREGESLPRPRYLERSVHLLSFAMVGLIPPFSKFFHEVLDFYEIHALHLAPNAVMTLAIFTHLYEMFIGVRPTMRLFQAFFIPQLLQGVVVGGCYFQPRPGTAGQYIESHLRKKWEDWKKDWFYTALPDHPRLRVPAGPPERSAAWLATSELGEEYDAVWDRLRGLWSLGLTGAMVFGDYFRRRIAPLQERSRGAWEYTGPNDPMRTHVGERWDWGEEDAKRVIRGVLGLDSAEPTLIPDGILPLCCDRDRESILAVMSAIGAGRSREIPSQGIPGSNPSHGQSGLGQSKAAGSSQPRGGTQSAVGDRGGDAPPEGGPGTGAHVERPLKSGGEGGRGPSAETRSGLEPEAEAEGGPESEAEAEAEGGPEPEAEAEAESTRGPEAGEQARRAQELEERARLLDQWESTLAAHERTAMEVEASLRLCEEAASERDQITLAAKAYADRHAEELRLREEACRERDAALAEREAEVSRREIASRWLSEQLARCEEAVAGREARHLESARAERAAIAAKTSELEAREKDLAASGPSGGAELASQLATAQSTLADLECLA

SEQ ID NO: 107738 - protein, 926 aa, Oryza sativa
  Clone ID: PAT_MRT4530_12060C.1.pep
MPPNREIEFRIDLAPGTTPLYKRPYRMAANELAEVKKQLEELKEKGALNEVTIKNKYPLPRIDDLFDQLKGATVFSKIDLRSGYHQLRIREEDIPKTAFTTRYGLYEFTVMSFGLTNAPAFFMNLMNKVFMEYLDKFVVVFIDDILVYSQSEEDHQHHLRLVLGKLREHQLYAKLSKCEFWLSEDKFLGHVISAKGVAVDPETVTAVTDWKQPKTVTQIRSFLGLAGYYRRIIENFSKIARPMTQLLKKEEKFVWSPQCEKAFQTLKEKLVSSPVLILPDTRKDFMVYCDASRQGLGCVLMQEGHVVAYASRQLWPHEGNYPTHDLELAAVVHALKIWRHYLIGNRCEIYTDHKSLKYIFTQSDLNLQQRRWLELIKDYDVGIHYHPGKANVVADALSRKSHCNTLNVRGIPPELNQQMEALNLSIVGRGFLATLEAKPTLLDQIREAQKNDPDMRGLLKNMKQGKAAGFTEDEHGTLWNRNRVCVPDNRELKQLILQEAHESPYSIHPGSTKMYLDLKEKYWLVSMKREIAGFVALCDVCQRVKAEHQRPAGLLQPLQVPEWKWDEIGMDFITGLPKTQGGYDSIWVVVDRLTKVARFIPMKTTYGGNKLAELYFARIVSLHGVPKKIVSDRGSQFTSHFWKKLQEELGTRLNFSTAYHPQTDGQTERLNQILEDMLRACVLDFGKTWDKSLPYAEFSYNNSYQGSIQMAPYEALYGRKCRTPLLWDQVGESQVFGTDILREAEAKVRTIRDNLKVAQSRQKSYADNRRRNLEFAVDDFVYLRVTPLRGVHRFQTKGKLAPRFVGPFRIIARRGEVAYQLELPASLGNVHDVFHVSQLKKCLRVPSEQADSEQIEVREDLTYVERPVKILDTMERRTRNRVIRFCKVQWSNHAEEEATWEREDELKAAHPDFFASSSESRGRDSV

SEQ ID NO: 107739 - protein, 88 aa, Oryza sativa
  Clone ID: PAT_MRT4530_12061C.1.pep
THHYRFFFNKTKQTSDVNTRTLETIKSSIKTFWRQKIIVIQKEISQCTFPQNRIRMAGLQNKSQLCHPNKQKIGPDLPNRLSMFHMST

SEQ ID NO: 107740 - protein, 485 aa, Oryza sativa
  unsure (1)..(485): unsure at all Xaa locations
  Clone ID: PAT_MRT4530_12062C.1.pep
MGRPAQEGGPRHARGRGGEREXGGPGPSRVVPGGTRLSATRLTVSEVHAGRARVWGGRRGACARFAEDAVRRAHVQTHGSRWTARTRGWREAADRGLLDPVAAEVAPTWRLRGCHAGRWEVDDDAGRNGRRTTAASGGANHGDTGEGEHIGMLHRTRGDEPTARICRGMLDGGGLRRRQPAERKGGNGDEVTRGRFPDTRIREPIPCAGLGGNASREAGDERXLLSSGGDSGEHTTSGGSGRRRAPGVPFRVHECTGSPXLGDERRRRDRGVAMARWRRAKWEEESMGGRLGLXTTMSVWKPTLGGQGXELALGARGQNGDRGXDDAGGEGKRKKKGERGLAPXPLWEKEEGMGATRQREEELCLHPLEASAGRGGAEAMTTAMTAGRFGAERRHGRQARAGAAGADGGGDXPVGHHGARAQEATGGAAIWAALAGNGSEGGGRSARRGSRACVRSARAERGRGRERERERAGEGGEDGPRGIRP

SEQ ID NO: 107741 - protein, 1848 aa, Oryza sativa
  unsure (1)..(1848): unsure at all Xaa locations
  Clone ID: PAT_MRT4530_12063C.1.pep
MEVDEVGGRWTFSRANEGYSCGPVVEMSWHRAGVLLLGAQSCLPVPGXPXVGGIGSVLLSMARMGWKLCHVFRLYTVVMAGSVTRRGLDMTGFVLELRGMCVVLGYPHGVDYQARPLPDQEGDDAEPHAGWEVTAVILSGSPERTSLAVTAGGDSFPAACQNAALLAIGTLHQRYPDELQHSPYRYHPRRGGACDHATFRDASSEDDATIVHLARMVEAYDAARIDFHQMVRRGMVENNMKILELRQENLQLKKDLDTVEAQLHQLKIAQGEVCRPKRRRICRSQKITARKSTSRPELVRQSLAWTCFVETPRAEPAPVVPQEGEASGVGSTEGALLLTFRPGPSQRRNANTGDGNQPEGSNHNHQGNPPPPPPPPPPPPPDTNAILTQILAQQANMMTAFLHHLQNPPQQNAPPPPPQHSKLAEFLRIRPPTFSSSNNPVDALDWLHAVGKKLDTVQCSDEEKVIFAAHQLQGPASLWWDHFQATQPEGQPITWARFTAAFRRTHVPAGVVALKKREFRELKQGNRSVMEYLHEFNNLARYAPEDVREDEEKQEKFLAGMDPELSVRLVSGDYPDFQRLVDKSIRLEAKHKELESHKRRLANFRNQQGANQRVRYTNPYPGGSSSQQQQQQQQPRSAPRPQFVVRVPQPQQQQNQQGTRAPRPPTPTVQPGQGRRDAQGQQRLCFNCFEPGHFADKCPKPRRQQGQAPPRSNNGGKDVIRGRVNHVTAEDVLTTPDVIVGTFLVHSIPATILFDSGASHSFISVPFVGRNQLGVERLRNPLLITTPGGVMTAKYYSPAVPIEIQGIPFPSDLILLDTKNLDVILGMNWLAQFQGVVDCARRTVTLYRGPEQPVVFFAPPTSVRSSELHQIELSEIPIVREFGDVFPEELPGMPPKREIEFRIDLAPGTTPLHKRPYRMAANELAEVKKQLEVLKEKGYIRPSTSPWGAPVIFVEKKDKTKRMCVDYRALNEVTIKNKYPLPRIDDLFDQLKGATVFSKIDLRSGYHQLRIRKEDIPKTAFTTRYGLYEFTVMSFGLTNAPAFFMNLMNKVFMEYLDKFVVVFIDDILIYSQSEEDHQHHLRLVLGKLREHQLYAKLSKCEFWLSEVKFLGHVISAKGVAVDPETVTAVTDWKQPKTVTQVRSFLGLAGYYRRFIENFSKIARPMTQLLKKEEKFVWSPQCEKAFQTLKEKLVSSPVLILPDTRKDFMVYCDASRQGLGCVLMQDGHVVAYASCQLRPHEGNYPTHDLELAAVVHALKIWRHYHIGNRCEIYTDHKSLKYIFTQSDLNLRQRRWLELIKDYDVGIHYHPGKANVVADALSRKSHCNTLNVRGIPPELSQQMEALNLSIVGRGFLAALEAKPTLLDQIREAQKNDPDMHGLLKNMKQGKATGFTEDEHGTLWNGKRVCVPDNRELKQLILQEAHESPYSIHPGSTKMYLDLKEKYWWVSMKREIAEFVALCDVCQRVKAEHQRPAGLLQPLQVPEWKWDEIGMDFITGLPKTQGGYDSIWVVVDRLTKVARFIPVKTTYGGNKLAELYFARIVSLHGVPKKIVSDRGSQFTSHFWKKLQEELGTRLNFSTAYHPQTDGQTERLNQILEDMLRACVLDFGKTWDKSLPYAEFSYNNSYQASIQMAPYEALYGRKCRTPLLWDQVGESQVFGTDILREAEAKVRIIRDNLKVAQSRQKSYADNRRRDLEFAVGDFVYLRVTLLRGVHRFQTKGKLAPRYVGPFRINARRGEVAYQLELPASLGNVHDVFHVSQLKKCLRVPSEQADSEQIEVREDLTYVERPMKILDTMERRTRNRVIRFCKVQWSNHAEEEATWEREDELKAAHPDLFASSSESRGRDSV

SEQ ID NO: 107742 - protein, 1538 aa, Oryza sativa
  unsure (1)..(1538): unsure at all Xaa locations
  Clone ID: PAT_MRT4530_12064C.1.pep
MRCCSPSMVTTRRNAATSDSNQPEGSNHNNHGSPPPPPPPPPPPPPDTNAILTQILAQQANMMAAFLHHIQNPPQHNAPPPPPQHSKLAEFLRIRPPTFSSSNNPVDALDWLHAVGKKLDTVQCSDEEKVIFAAHQLQGPASLWWDHFQATQLEGQPITWARFTAAFRRTHVPAGVMALKKREFRELKQGNRSVMEYLHEFNNLARYAPEDVREDEEKQEKFLAGMDPELSVRLVSGDYPDFQRLVDKSIRLEAKHKELESHKRRLANFRNQQGANQRIRYTNPYPGGSSSQQQQPRSAPRPQFVVRVPQPQQQQSQQGTRAPRPPTPAAQSGQGRRDVQGPQRLCFNCFEPGHFADKCPKPRRQQGQAPPHSNNGGKDVIWGRVNHVTAEDVLTTPDVIVGTFLIHSIPATILFDSGASHSFISVPFVGRNQLGVERLRNPLLITTPGGVMTAKYYSPAVPIEIQGIPFPSDLILLDTKNLDVILGMNWLAQFQGVVDCARRTVTLYRGPEXPVVFFAPPTSVSSSELHQIGLSEIPIVREFGDVFPEELPGMPPKREIEFRIDLAPGTTPLYKRPYRMAANELAEVKKQLEELKEKGYIRLSTSPWGAPVIFVEKKDKTKRMCVDYRALNEVTIKNKYPLPRIDDLFDQLKGATVFSKIDLRSGYHQLRIREEDIPKTAFTIRYGLYEFTVMSFGLTNAPAFFMNLMNKVFMEYLDKFVVVFIDDILVYSQSEEDHQHHLRLVLGKLREHQLYAKLSKCEFWLSEVTDWKQPKTVTQIRSFLGLAGYYRRFIENFSKITRPMTQLLKKEEKFVWSPQCEKAFKTLKEKLVSSPVLILLDTRKDFMVYCDASRQGLGXVLMQDGHVVAYASRQLRPHEGNYPTHDLELAAVVHALKIWRHYLIGNRCEIYTDHKSLKYIFTQSDLNLRQRRWLELIKDYDVGIHYHPGKANVVADALSRKSHCNTLNVRGIPPELNQQMEALNLSIVGRGFLAALEAKPTLLDQIREAQKNDPDMHGLLKNMKQGKATGFTEDEHGTLWNGNRRVKAEHQRLAGHLQPLQVPEWKWDEIGMDFITGLPKTQGGYDSIWVVVDRLTKVARFILVKATYGGNKLAELYFARIVSLHGVPKKIVSDRGSQFTSHFWKKLQEELGTRLNFSTAYHPQTDGQTERLNQILEDMLRACVLDFGKTWDKSLPYAEFSYNNSYQASIQMAPYEALYGRKCRTPLLWDQVGESQVFGTDILREAEAKVRTIRDNLKVAQSRQKSYVDNRRRDLEFAVDDFVYLRVTPLRGVHRFQTKGKLAPRFVGPFRIIARRGEVAYQLELPASLGNVHDVFHVSQLKKCLRVPSEKADSEXIEVREDLTYVERPVKILDTMERRTRNRVIRFFKVHWSNHAEEEATWEREDEPPRASLHRFRHSPLSLPAGIELAPSPSLSVVAAELRSAAVVAPDHLSPRRHLLRLRRIPGDLVHPSVSLADRRSTVDPVHPSRAAAFLRSGRRFRLRRRPGVSRGPPLLFPLPFPSLGRRSAVPMDAAGDH

SEQ ID NO: 107743 - protein, 1356 aa, Oryza sativa
  Clone ID: PAT_MRT4530_12065C.1.pep
MALLALRLGHHHHHLGLSAPRDPRLLLRRRLVVASSGAVKAPAAAAVVWFKHDLRVDDHPGLAAAVAAEPRRPVLPLYVFDRRILDDASKWREQLLFSPNFLRRPAPPLSGMCQIMKVLIGMDEIKGYSDTMLELLLFALEDLKMVLKSQESDLLIGLGNAEDVVLKLVNEVQAGLIFTEEEVEYRVRNVLASVESSLSNASFLSGNPPEIVVWSASLYDYKNPRELSTSHNQFLKEKLPMNTPLAAPSLPALNIEIETGSLPTLEELKGFLKESRTSENNWVPLKGTSARSILKKTLSQINVKTGVASSGSDGGEDTTAYYAMSGRKIQNSMFTSESSTEVRGGTEITLDALAAYLKYLEGTGKASWQELHDKVRLTETRDGASFCTLFGPALQLGVISKRRVYHETIQYERDRNAGFISPFGYSTPTVTAAVDAICSMEWYWLLALKSQVCIEGNYPVRIWRWKGHLIQYTSVGHEGPSVLLVHGFGASLQHFRDNIGAIADQGCQVWAITLLGFGKSEKPNINYSELLWSELLRDFIVDVVKEPVHLVGNSIGGYICSITASLWPSLARSLILLNTAGSVVPSYSFIPLSEEGRTSWLSSLQARLLLLFLRSRAGGILKEYYPTRTERVDKPLVDEIIRAVSSDHKYSLQFFFLDRQIQSYDPGAATVIESIFSFNLSIPLNFLFDSFGGKILIVQGMKDPLTKSKSFVSMLREHCSKVHIRELDAGGKKEMNIEHCTEFWVEVRGRKEFKTWSRAHMNGPREQVALLTIRLHFGAKPMFCWAKAYASTRSSSSFGPRLPVRAHAITASPMLPSPPAPPPISPARLHKLVTSQSDPLLALELVTVTAPTTAPHPSTLHALALRLSRRREHLPHALALLRRLPSPPSPRILLPLLLSALRLRRQPHLFLSTFNSLFVSGPSPLPLHPELLLRLLSVLSSTASYFPCALHLLRDVSTRLPLPEPLVLASHNLLIEAAARSGHLAVSISLFHRLRSLHVSPNAETYRILTQSLCRRGQVRTAATLLDEMLHRGIPADPLAYTTVLNALCRKKQLREAYRLLCLMRGRGVSPDIVHYNTVIVGVCREGRPLDACKVFGDMRESGCAPNAVAYTAVVNGLCVSGLYDKAEAYLDDMLGKGLLPHFSVLHSVIKGCCAVGKVNEAAGMMTRMLDLGMVPHAETWSSVIRSVCSDEDNVEVRRYCLTSTKIWAVLTGGVVFAAAESKRYSDTMLELLLFALEDLKMVLKSQESDLLIGLGNAEDVVLKLVNEVQAGLIFTEEEVEYRVRNVLASVESSLSNASYLSGNPPEIVVWSASLYDYKISCAIDASKRTHNTVSNLNEILFSYTYKNILLSNSMV

SEQ ID NO: 107744 - protein, 67 aa, Oryza sativa
  Clone ID: PAT_MRT4530_12066C.1.pep
MAWLEMDHVGRNSDDVMAAAPDEVLNQKLLIAKPQKQRDCLLAFHWRGKFSDFKYRRLENGRQSLEM

SEQ ID NO: 107745 - protein, 51 aa, Oryza sativa
  Clone ID: PAT_MRT4530_12067C.1.pep
MEALACRDGMYNLPAERNSCLSEADDRLGEWHSVPACIEHLVTEGCNSAVS

SEQ ID NO: 107746 - protein, 80 aa, Oryza sativa
  Clone ID: PAT_MRT4530_12068C.1.pep
RARFFSSWIGGSIFLNIGSHTPGSVVRGGPTYSFFMAFREYTSTIFCRAQWWPTPTPAVMNHILVLQPVGPPRDFVALWT

SEQ ID NO: 107747 - protein, 95 aa, Oryza sativa
  Clone ID: PAT_MRT4530_12069C.1.pep
WSICRGNHILGGKLVNFGIELKKKSKYSHLQPGGSTRTICIQKGTTKFNLSVRYKLKLPSHYEITLRVFISFLLVSLFLHYLLFLYHNSQGGVWS

SEQ ID NO: 107748 - protein, 61 aa, Oryza sativa
  Clone ID: PAT_MRT4530_1206C.1.pep
MTLRRTTRRRPEEQEGLQEVEDRERIADFSSLIGTVAKMETLRSKEQIEEWRLESSGVVDD

SEQ ID NO: 107749 - protein, 129 aa, Oryza sativa
  Clone ID: PAT_MRT4530_12070C.1.pep
MAMSDEKPGRNNGEAGGAWIGENSSDDGRVSERHKIGSPNFGELGKSRRGFYIFLTLLGTQLGCTWAMLAILQAQPMEAEERIQKAAAALLEASNRSIGERRTAAATWWPVGTLSISFLPTYLPSSSTF

SEQ ID NO: 107750 - protein, 80 aa, Oryza sativa
  unsure (1)..(80): unsure at all Xaa locations
  Clone ID: PAT_MRT4530_12071C.1.pep
KVYIRGCKVCIRVYKFCIRCVFFSFFIFNTYVYKVCIYRIQSLYMSYINFVYVCVCVFMXLKIYIYIYIYVCIYYIHTHV

SEQ ID NO: 107751 - protein, 244 aa, Oryza sativa
  Clone ID: PAT_MRT4530_12072C.1.pep
AEDGRSMKSICLLQLCRIGVIVYDWLDIPWLKNYYNFGFDHFEMSWRKVGLSGLIDLLLGHTGPFASGDWILPDLTIQGSLTLNSTLRTFPNTFYFSYATKRTRKLFGITVPSSVLGIHPMLFLRVLQMCMWRHPQNAPLPYKGYRDEDWEDNDGALNTISMTHPRIPTEHPNRLVVDDSDCHPLQPGIWYYKIIEADHILFIVNRERAGVQFDLLYDGIFQRCRKHAFRRSPPTVPNESSQSQ

SEQ ID NO: 107752 - protein, 66 aa, Oryza sativa
  Clone ID: PAT_MRT4530_12073C.1.pep
DFRVDWLADQLHSLLLPTTVHPYRKMFNLNKVISIPGCFIKRIAQGRCMIQSENTAILQIVCRGCN

SEQ ID NO: 107753 - protein, 119 aa, Oryza sativa
  Clone ID: PAT_MRT4530_12074C.1.pep
TFHEASPKNKQNQLKPNYHLIMASPFPFPCTHHTGSSKQDKSQQQLTGQTRVKLPTGSPQLAAPPLRRRRRLPPQRRPCPRRHGVLRRRVLLVLEEPEHRPRAHRHVQHHRRHADAGGV

SEQ ID NO: 107754 - protein, 70 aa, Oryza sativa
  Clone ID: PAT_MRT4530_12075C.1.pep
ALRRRGEVVEQKGHRNLTDGIDWTYNITLFLLHQLFRSLTSLNYIDDNYFSAITRKKRKSCFDEKKKTTM

SEQ ID NO: 107755 - protein, 154 aa, Oryza sativa
  Clone ID: PAT_MRT4530_12076C.1.pep
PAGRGSRRACGSAWPTRTRSRRSSTTRRMMMSRRWTTTTPTSAPARWTRAPTTSSTTSATSSSCSASTPTSATATCSAAATPPPPPPRWAATCETRVISSNPRGLAAKLLIKKRRREIQGEEEELEREKNGSFFLSPHLFCFGLFSFFFSFQNA

SEQ ID NO: 107756 - protein, 312 aa, Oryza sativa
  Clone ID: PAT_MRT4530_12077C.1.pep
MLLRLKAVAVHPAALLGRPRSHDAPQLVGRTGASTTTARRKAARSAVTVTMALKEEPEGSRSGFAGGVPSWDPGLEIQVPFEQRPVNEYSALKDSVLYSWAELSPGSFFLRLGSLWLITFTVLAAPIAAASFSPGKDPLKFVLAAGIGTLLLVSLVVLRIYLGWSYVGDRLLSAVVPYEETGWYDGQMWVKPPEVLARDRLLGSYKVKPVINLLKQTLVGTGALLVGAVSLFAFAAPVEDFLHSVNAPPSAASSKPSLRREELLRLPVEVRQDDDLAAAAAEAADGRPVYCRDRYYRALAGGQYCKWDDLLN

SEQ ID NO: 107757 - protein, 190 aa, Oryza sativa
  Clone ID: PAT_MRT4530_12078C.1.pep
IQLERLSTQMDKQKTGRFIWNRKIGQTEDLGNTSCSFTMEARIRSVLLVRLDELGVLEVLLGEAGGHLGDDGAGDGEAGEEGPAALPLPPEEHRPRIEAAEKHPRSPPLPPPPRRPRCGWGVKRSFRFFLDPKGEEADGGGGYRIAFRVRQGRRRMEMGLASPPRGPDFSGPPRESAFAVLLEQFKLYRH

SEQ ID NO: 107758 - protein, 73 aa, Oryza sativa
  Clone ID: PAT_MRT4530_12079C.1.pep
MACDCGEASQAVGGSENQRPPYGYGAACGVGTARGPANVALAVTTSLKDMRMANNFYSGSLEWAVHGTEGDDA

SEQ ID NO: 107759 - protein, 104 aa, Oryza sativa
  unsure (1)..(104): unsure at all Xaa locations
  Clone ID: PAT_MRT4530_1207C.1.pep
GAVQLRGNGGGYEAARGDGGGAAPVRGGAGGWDAXRGHCGRADPVRGGTGTCNPARSDGGRPRYLCLRLTACRTMEVATEFGRFQSISMIQNTMLIFNYDNQRK

SEQ ID NO: 107760 - protein, 100 aa, Oryza sativa
  Clone ID: PAT_MRT4530_12080C.1.pep
RSPRPRVTSTNTHQPSLGSHLSRPGETWIKRRCGGFGRTQWFGQTMGWADLAQFRQAASSFALIHRLVNFGPIHRTNSEFLAHSCISLILDIVRLIYRLC

SEQ ID NO: 107761 - protein, 86 aa, Oryza sativa
  Clone ID: PAT_MRT4530_12081C.1.pep
FYVVIRSFYWLIIMESRTQGLLFVYRCQKERWPFFIRGDDCVCWPLLLLLLLQNVTFAGGEVNRREERAMHCICFAHRNGEDVRWD

SEQ ID NO: 107762 - protein, 113 aa, Oryza sativa
  Clone ID: PAT_MRT4530_12082C.1.pep
MVTPPPLPSPPHHPPRRLLFVRLHLLPFPIHLHSPSPSPIPSTTPRATFCTSSLPPASIPSSFVSVSASSNSLHHHPLPLGILRLRLIPAPSRSSLLPPFARRRGRSRRDHLP

SEQ ID NO: 107763 - protein, 468 aa, Oryza sativa
  Clone ID: PAT_MRT4530_12083C.1.pep
MALAAAAAGEELHNLGPAAADSFCAAASRPSWSSTARVGAASSPSRRHPPSGHTESPAAAAARAEAELGEVRRKLNRRRRAVSASYRRKMPARGSAGQRPAVDDDLDAVEHDRLLGYVHQELVIPLRGQVPAVLPRYRLAVASSKNTARMASNIERRIGLSPEWAEAAKSNMCYEKSTRTRWRVFTWTCDSVLEEHWDMPPEQFMKTHASMRLAHSERRKKERPPASAGAGEKDRRGEGTRPGPSRVVPGGTRLSATRLTVSEVHAGRARVWGGRRGACARFAEDAVRRAHAQPHSSRWTACAREGKRRERLAGSADPVAAEVAPTWRLRGSHAGRREVEEDAGRNGRRTAVASSGANHGDTSEGEHTGMLHRTRGDEPTARIRQGMLDGGGLRRRQPAAREGGNGDGATRDRFGRARASTRLRESVAGVGLGGATPSEAGDERVLRSTGGDGGEHTAGGGNGRGGAS

SEQ ID NO: 107764 - protein, 187 aa, Oryza sativa
  unsure (1)..(187): unsure at all Xaa locations
  Clone ID: PAT_MRT4530_12084C.1.pep
MGRRHGSDLFGLGPGKRRKSSSRSPLPRPRTHRLSRCLAMNGGGETEGRQWRGGGERNGRRNGWEGALVYRTTMSVWKPTLGGQGASWRSALAAKTVTEADDAGGEXKGKRKGERELAPCHFGKRRXGAGATRQREEELCLRPLEASAWSGGGRVVMTAMTVGRCGAERRHGRQARAGAADADGGSD

SEQ ID NO: 107765 - protein, 475 aa, Oryza sativa
  unsure (1)..(475): unsure at all Xaa locations
  Clone ID: PAT_MRT4530_12085C.1.pep
GRGPREWGGSGAEGRERAGGPGPSRVVPGWTRLSATRLTVSEVHAGRARVXGGRRGACARFAEDAVRRAHAEPHGSRWTTPARGRREAADRGLLDPVAAEVAPTWRLRGCHAGRREEDDDAGWNGRRSTAASGGANHGDTGEGEHTGMFDGGGLRRRQPAERKGGNSDKVTRGRFPAVRASTRLRESTPCAGLGGIASREAGDERXLPSSGGNGGEHTASGGRGRRRAPGVPFRVHERTGSPXLGDERRRXETEGRQWRGGGERNGRRNGWEGALVYRTTMSVWKPTLGGQGAXLALGARGQNGDRGXDDAGGEGKRKKEGRKGACPLPLWEKEEGMGXTRQREEELCLRPLEASAGRGGAESMTTAMTAGRFGAERRHGRLARAGADGGGDQAVGHHGARAREATGGAARSGSEGGGRSARRGSCARVRSARAERGRGRERERESRGGSRRWAERSLAHRSSQGRKIENLRKAF

SEQ ID NO: 107766 - protein, 1800 aa, Oryza sativa
  unsure (1)..(1800): unsure at all Xaa locations
  Clone ID: PAT_MRT4530_12086C.1.pep
RAGPTAPTAASRVRPGPPWTERLTRGPHFPWTRANEGYTSCGPVVEMSWHRAGVLLLGAQSCLPVPGVSAVGGVGSVLLSMARMGWKLCHVFRPYTVVMAGSINRRGLDLTGFALELRGMCVVLGYPHGVDYQGKQLPEQEGDDAEPHATWEVTVVILTGSPERTSLAVTAXMVRRGLVENNKQILELHXENLQLKKDLDAVEAQLRQLKIAQGEVCRPKRRRVCRSLKITARKSTSRPELVRQSLAWTCFVETPRAEPAPMVPQEDGASGVGXHGGCAAAHLPPWPVAAVDEQLVGLRMVTTRRSAVTGEGSHPEGSNHNNHGSPHPPPPPPPPPPPDTNAILTQILAQQANMMAAFLHHIQNLPQHNAPPPPPQHSKLAEFLRIRPPTFASSNNPVDALDWLHAVGKKLDTVQCSDEEKVIFAAHQLQGPASLWWDHFQATQPEGQPITWARFTAAFRRTHVPAGVMALKKREFRELKQGNRSVMEYLHEFNNLARYAPEDVREDEEKQEKFLAGMDPELSVRLVFGDYSDFQRLVDKSIRLEVKHKELESHKRRLATFRNQQGANQRVRYTNPYPGGSSLQQQPRSAPRPQFVVRVPQPQQQQSQQGTRAPRPPTPAMQPGQGRGDVQGQQRLCFNCFEPGHFADKCPKPRRQQGQAPPRPNNGGKDVIRGRVNHVTAEDVLTTPDIIVGTFLIHSIPATILFDSGASHSFISVPFVGRNQLGVERLRNPLLITTPGGVMTAKYYSPAVPIEVQGIPFPSDLILLDTKNLDVILGMNWLAQFQGVVDCARRTVTLYRGPEQPVVFFAPPTSVGSSELHQIRLSKIPIVREFGDVFPEELPGMPPKREIEFRIDLAPGTTPQYKRPYRMASNELAEVKKQLEELKEKGYIRPSTSPWGAPVIFVEKKDKTKRMCVDYRALNEVTIKNKYPLPRIDDLFDQLKGATVFSKIDLHSGYHQLRIREEDIPKTAFTTRYGLYEFTVMSFGLTNAPAFFMNLMNKVFMEYLDKFVVVFIDDILVYSQSEEDHQHHLRLVLGKLREHQLYDKLSKCEFWLSEVKFLGHMISAKGVAVDPETVTAVTDWKQPKTVTQIRSFLGLAGYYRRFIENFSKIARPMTQLLKKEEKFVWSPQCEKAFQTLKEKLVSSPVLILPDTRKDFIVYCDASRQGLGCVLMQEGQVVAYASRQLRPHEGNYPTHDLELAAVVHALKIWQHYLIGNRCEIYTDHKSLKYIFTQSDLNLRQRRWLELIKDYDVGIHYHPGKANVVADALIRKSHYNTLDVRGIPPELNQQMEALNLSIVGRGFLATLEAKLTLLDQIREAQKNDPDMRGLLKNMKQGKAAGFTEDEHGTLWNGNRVCVPDDRELKQLILQEAHESPYSIHPGSTKMYLDLKEKYWWVSMKREIAEFVALCDVCQRVKAEHQRPAGLLQPLQVPEWKWDEIGMDFITGLPKTQGGYDSIWVVVDRLTKVARLIPVKTTYGGNKLAELYFARIVSLHGVPKKIVSDRGSQFTSHFWKKLQEELGTRLNFSTAYHPQTDGQTERLNQILEDMLRACVLDFGKTWDKSLPYAEFSYNNSYQASIQMAPYEALYGRKCRTPLLWDQVGESQVFRTDILREAEAKVRTIRDNLKVAQFRQKSYADNRRRNLKFAVDDFVYLRVTPLRGVHRFQTKGKLTPRFVGPFRIIARRGEVAYQLELPTSLGNVHDVFHVSQLKKCLRVPSEQADSEQIEVREDLTYVERPVKILDTMERRTRNRVIPFCKVQWSNHAEEEATWEREDEMKAAHPDLFASSSESRGRDSV

SEQ ID NO: 107767 - protein, 204 aa, Oryza sativa
  unsure (1)..(204): unsure at all Xaa locations
  Clone ID: PAT_MRT4530_12087C.1.pep
QAISCTTATQRQNSPHGSRWTARARGRREAADRGLLDPVAAEVAPTWRLRGCHASRREVDDDAGRNGRRTTAASGGANHGDTGEGEHTGMLHRTRGDEPMARIRRGMLDGGGLRRRQPAAGEGGNGDEVTRGRFPAARASTRLREPTPCAGLGGIASREAGDEWRFRARAATAASTRXATAAVGAGCVRSPLPRPNAHRLLWHT

SEQ ID NO: 107768 - protein, 1664 aa, Oryza sativa
  unsure (1)..(1664): unsure at all Xaa locations
  Clone ID: PAT_MRT4530_12088C.1.pep
MDISRANEGYTSCGPMAGSINRRGLDLTGFVLELRGMCVVLGYPHGVDYQGRQLPEQEGDDAEPHAAWEVTAVILTGSPERTSLAVTAGGDSFSAACQNAALLAIGTLHQRYPDELQHSPYRYHPRRGGARDHATFRDASSEDDATIMHLARMVEAYDAARIDFHQMVRRGMVENSMKILELRQENLQLKKDLDAVEAQLHQLKIAQGEMVTTRRSANTGDGNQPEGSNHNNHGSPPPPPPPPPPPPLDTNAILTQILAQQANMMAAFLHHIQNPPQHNAPPPPPQHSKLAEFLRIRPPTFSSSNNPVDALDWLHAVGKKLDTVQCSDEEKVVFAAHQLQGPASLWWDHFQATQPEGQPITWARFTAAFRRTHVPAGVMALKKREFRELKQGNRSVMEYLHEFNNLARYAPEDVREDEEKQEKFLAGMDPELSVRLVSGDYPDFQRLVDKSIRLEAKHKELESHKRRLANFRNQQGANQRIRYTNPYPGGSSSQQQQQQQPRSAPRPQFVVRVPQPQQQQSQQGTRAPRPPTPAAQSGQGRRDVQGPQRLCFNCFEPGHFADKCPKPRRQQGQAPPRSNNGGKDVIRGRVNHVTAEDVLTTPDVIVGTFLIHSIPATILFDSGASHSFISVPFVGRNQLGVERFRNPLLITTPGGVMTAKYYSPAVPIEIQGIPFPSDLILLDTKNLDVILGMNWLAQFQGVVDCARRTVTLYRGPEQPVVFFAPPTSVSSSELHQIGLSEIPIVREFGDVFPEELPDMPPKREIEFRIDLAPGTTPLYKRPYRMAANELAEVKKQLEELKEKGYIRPSTFPWGAPMIFVEKKDKTKRMCVDYRALNKVTIKNKYPLPRIDDLFDQLKGATVFSKIDLRSGYHQLRIREEDIPKTAFTTRYGLHGHIILVYSQSEEDHQHHLRLVLGKLREHQLYAKLSKCEFWLSEVKFLGHVISAKGVAVDPETVTXPDWKQPKTVTQIRSFLGLAGYYRXLLKKKYKFVWSPQCEKAFKTLKEKLVSSPVLILPDTRKDFMVYCDASRQGLGCVLMQEGHVVAYASRQLRPHEGNYPTHDLELAAVVHALKIWRHYLIGNRCEIYTDHKSLKYIFTQSDLNLRQRRWLELIKDYDVGIHYHPGKANVVVDALSQKSHCNTLNVRGIPPELNQQMEALNLSIVGRGFLAALEAKPTLLDQIREAQKNDPDMRGLLKNMKQGKAAGFTEDEYGTLWNGNRVCVPDNRELKQLILQEAHESPYSIHPGSTKMYLDLKEKYWWVSMKREIAEFVALCDVCQRVKAEHQRPAGLLQPLQVPEWKWDEIGMDFITGLPKTQGGYDSIWVVVDRLTKVARFIPVKTTYGGNKLAELYFARIVSLHGVPKKIVSDRGSQFTSHFWKKLQEELGTRLNFSTAYHPQTDGQTERLNQILEDMLRACVLDFGKTWDKSLPYAEFSYNNSYQASIQMAPYEALYGRKCRTSLLWDQVGESQVFGTDILREAEAKVRTIRDNLKVAQSWQKSYADNRRRNLEFAVDDFVYLRVTPLRGVHRFQTKGKLAPRYVGPFRIVARRGEVAYQLELPASLGNVHDVFHVSQLKKCLRVPSEQADSEQIEVREDLTYVERPVKILDTMERRTRNRVIRFCKVQWSNHAEEEATWEREDELKAAHPDLFASSSESRGRDSV

SEQ ID NO: 107769 - protein, 596 aa, Oryza sativa
  Clone ID: PAT_MRT4530_12089C.1.pep
MGRPAQESGPRRARGRGGERERAGGPGPSRVVPGGTRLSATRLSVSEVHAGRARVWGGRHGACARFAEDAVRRTHAQPHGSPRTMRTGGKRRERLAGSADPVTAEVAPTWRLRGCHAGRREVDDDAGRNGRRTTAASGGANHGDTGEGEHTGMLHRTRGDEPTARIRRRELDSGGLRRRQPVVREGGNGDEVTRGRFPVVRASTRLWESVASVGLGGATPSEAGDERALRSTGGDGGEHTASGGNGRRRAPGVPFRVLARAGSSDMSDGERRQRTEHGRRRQWSGGEWERKGKGEKLGFIWATMSVWEPTLGGQGSELALGGRGPNGDRGEDDAGGRKKGKRGRERGLSPFPLWEKEEGMGATWQREEELCLRPLEARASRGGAKAMTTAITAGRFGAERRHGRQARVGAAGADGGGDWPVGHHGARAREATGGVAIWAASAGNGSEGGGRSARRGSRARSRSRSSLSCGSDELEISRWERRSATAHRSGRHRVETGRCLVDPGRRRMDPRPPRRSRPPPPRRFAAAASIRHRRCLIRRRCIDPPPPPLDPAVGREGWARERRRLREGEAWGERVDAGKETAGERRGAREIGLGRW

SEQ ID NO: 107770 - protein, 94 aa, Oryza sativa
  Clone ID: PAT_MRT4530_1208C.1.pep
LGGIRPTAGDRSGDARLEGSSRTRAHAEHHPGSGGEGRRGPGAEARGGPEPEAKAEAEGGPEPEAEVEAEAGPEPEVEAEAEGGPEPEVEAEAH

SEQ ID NO: 107771 - protein, 1784 aa, Oryza sativa
  Clone ID: PAT_MRT4530_12090C.1.pep
MDEVGGRWTFSRANEGYTSCGPMAGSVTRRGLDMTGFVLELRGMCVVLGYPHGVDYQARPLPEQEGEDAEPHAGWEVTAVILSGSPERTSLAVTAGGDSFPAACQNAALLAIGTLHQRYPDELQHSPYRYHPRRGGARDHATFRDASSEDDATVVHLARMVEAYDAARIDFHQMVRRGMVENNMKILELRQENLQLKKDLDALEAQLHQLKVAQGEDSRPKRRRVCRSQKITARKSTSRPELVRQSLAWTCFVETPRAEPAPVVPQEGEASGVGSTEDALLLTFRPGPSQRRNVSTGEGNQPEGSNPNPQGNPPPPPPPDTNAILTQILAQQANLMTAFLHHLQNPPQQNAPPLPPQHSKLAEFLRIRPPTFSSSNNPVDALDWLHAVGKKLDTVQCSDEEKVTFAAHQLQGPASLWWDHFQATQPEGQPITWARFTAAFRRTHVPAGVVALKKREFRELKQGNRSVMEYLHEFNNLARYAPEDVREDEEKQEKFLAGMDPELSVRLVSGDYPDFQRLVDKSIRLEAKHKELESHKRRLANFRNQQGANQRVRYTNPYPGGSSSQQQQQQPRSAPRPQFVVRVPQPQQQQNQQGTRAPRPPTPAVQPVQGRRDASGPQRLCFNCFEPGHFADKCPKPRRQQGQAPPRSNNGGKDVIRGRVNHVAAEDVLTTPDVIVGTFLIHSIPATILFDSGASHSFISVPFVGKNQLGVERLRNPLLITTPGGVMTAKYYSPAVPIEIQGIPFPSDLILLDTKNLDVILGMNWLAQFQGVVDCARRTVTLYRGPEQPVVFFAPPTSVRSSELHQIELSEIPVVREFGDVFPEELPGMPPKREIEFRIDLAPGTTPLHKRPYRMAANELAEVKKQLEELKEKGYIRPSTSPWGAPVIFVEKKDKTKRMCVDYRALNEVTIKNKYPLPRIDDLFDQLKGATVFSKIDLRSGYHQLRIREEDIPKTAFTTRYGLYEFTVMSFGLTNAPAFFMNLMNKVFMEYLDKFVVVFIDDILIYSQSEEDHQHHLRLVLGKLREHQLYAKLSKCEFWLSEVKFLGHVISAKGVAVDPETVTAVTDWKQPKTVTQVRSFLGLAGYYRRFIENFSKIARPMTQLLKKEEKFVWSPQCEKAFQTLKEKLVSSPVLILPDTRKDFMVYCDASRQGLGCVLMQDGHVVAYASRQLRPHEGNYPTHDLELAAVVHALKIWRHYLIGNRCEIYTDHKSLKYIFTQSDLNLRQRRWLELIKDYDVGIHYHPGKANVVADALSRKSHCNTLNARDIPPELNQQMEALNLSIVGRGFLAALEAKPTLLDQIREAQKNDPDMHGLLKNMKQGKAAGFTEDEHGTLWNGNRVCVPADKELKQLILQEAHESPYSIHPGSTKMYLDLKGKYWWVSMKREIAEFVALCDVCQRVKAEHQRPAGLLQPLQVPEWKWDEIGMDFITGLPKTQGGYDSIWVIVDRLTKVARFIPVKTTYGGNKLAELYFARIVSLHGIPKKIVSDRGSQFTSHFWKKLQEELGTRLNFSTAYHPQTDGQTERLNQILEDMLRACVLDFGKTWDKSLPYAEFSYNNSYQASIQMAPYEALYGRKCRTPLLWDQVGESQVFGTDILREAEAKVRIIRDNLKVAQSRQKSYADNRRRDLEFAVDDFVYLRVTPLRGVHRFQTKGKLAPRYVGPFRVIARRGEVAYQLELPASLGNVHDVFHVSQLKKCLRVPSEQADSEQIEVREDLTYVERPVKILDTMERRTRNRVIRFCKVQWSNHAEEEATWEREDELKAAHPDLFASSSESRGRDSV

SEQ ID NO: 107772 - protein, 344 aa, Oryza sativa
  Clone ID: PAT_MRT4530_12091C.1.pep
MEFLVAQALLLLVVVSNSLLLPSLGLAVSGQEAHEVAMAGLHDQQPPSPAAVAARVSVAHADLPMVASSVLGAESWLRAHVLAHYPSNHVTAIAVAVACARGGSRHGQDLRASRAAKNLHHALVRWGLVDEIKIDASSAPCAEEVGGGALKRRLYGMHHLPPPLPPTSVASPPPPGVPLSFAPNAPPEVVPSVPPAAAPPSTPVVVVPAPATSPPMSMPATPPEAAAGGMAPCSAPPTAAMSPQPCSGEGGNGGGQWCVAKPTVPLDRLQEAMDYACSQDGVDCQEISGGGSCFYPDNIAAHASYAFNSYWQKMKHIGGSCSFGGTAVLINSDPSYLQCRFMMS

SEQ ID NO: 107773 - protein, 133 aa, Oryza sativa
  Clone ID: PAT_MRT4530_12092C.1.pep
MTACTWTTNELWQFTAKEQYVFTKLAKRFNKGCQAQLDAGEGTCIPGRAGSGWLCCPIVDLELEGGAGGRHNWLRQQNGHGGLGVRLWRSRRFHLCGGGPQQFQAIDLIILSADATGEKVIQLQLADLLIPSI

SEQ ID NO: 107774 - protein, 626 aa, Oryza sativa
  unsure (1)..(626): unsure at all Xaa locations
  Clone ID: PAT_MRT4530_12093C.1.pep
YTHVRNACWVISGRDTHEGNYPTHDLELVAVVHALKIWRHYLIGNRCEKYTDHKSLKYIFIQSDLNLRQRRWLELIKDYDVGIHYHPGKANVVADALSRKSHCNTLNVRGIPSELNQQMEALNLSIVGRGFLAALEAKPTLLDQIREAQKNDPDMRGLLKNMKQGKAAGFTEDEHGTLWNGNRVCVPDNRELKQLILQEAHESPYSIHPGSTKMYLDLKEKYWWVSMKREIAEFVALCDVCQRVKAKHQRPAGLLQPLQVPEWKWDEIGMDFITGLPKTQGGYDSIWVVVDRLTKVARFIPVKTTYGGNKLAELXFARIVSLHGVPKKIVSDRGSQFTSHFWKKLQEELGTRLNFSTAYHPQTDGQTERLNQILEDMLRACVLDFGKTWDKSLPYAEFSYNNNYQASIQMAPYEALYGRKCRTPLLWDQVGESQVFGTDILREAEAKVRTIWDNLKVAQSRQKSYADNRRRNLEFAVDDFVYLRVTPLRGVHRFQTKGKLAPRFVGPFRIIARRGEVAYQLELPASLGNVHDVFHVSQLKKCLRVLSEQADSEQIEVREDLTYVERPVKILDTMERKTRNRVIRFCKVQWSNHAEEEATWEREDELKAAHPDHFASSSESRGRDSV

SEQ ID NO: 107775 - protein, 56 aa, Oryza sativa
  Clone ID: PAT_MRT4530_12094C.1.pep
LLWDNRYFPPFEVKPENRLAGKPKRSKTHPSPVKRVKRKERPNTLNRLLPGRWPIH

SEQ ID NO: 107776 - protein, 1650 aa, Oryza sativa
  Clone ID: PAT_MRT4530_12095C.1.pep
MMKALVSSSCLPSSACGSRPSLPLFLVCLCVCWAFAAHMAGSVSRRGLDMTGFVLELRGMCVVLGYPPGVDYQARPLPEQEGDDAEPHAAWEVTAVILTGSPERTSLAVTAGGDSFPAACQNAALLAIGTLHQRYPDELQHSPYRYHPRCGGARDFATFRDASSEDDATIVHLARMVEAYDAARIDFQQMVRRGMVENNMKILELRQENLQLKKDLHALEAQLCQLKVAQGEMVMTRRSANTGDGNQPEGSNHNNHGSPPPPPPPPPPPPPDTNAILTQILAQQANMMTAFLHHLQNPPQHNAPPPPPQHSKLAEFLRIRPPTFSSSNNPVDALDWLHAVGKKLDTVQCSDEEKVVFAAHQLQGPASLWWDHLQATQPERQPITWARFTADFRRTHVPAGVVALKKREFRELKQGNRSDVREDEEKQEKFLAGMDPELSVRLVSGDYPDFQRLVDKSIRLEAKHKELESHKRRLANFRNQQGANQRVRYTNPYPGGSSSQQQQQQQQPRSAPRPQFVVRVPQPQQQQNQQGTRAPRPPTPTVQPGQGRRDAQGPQRLCFNCYEPGHFADKCPKPRRQQGKAPPRSNNGGNDVIRGRVNHVTAENVLTTPDVIVGTFLIHSIPATILFDSGASHSFISVPFVGRNQLGVERLRNPLLITTPGVVMTAKYYSPAVPIEIQGIPFPSDLILLDTKNLDVILGMNWLAQFQGVVDCARRTVTLYRGPEQPVVFFAPPTSVSSSELHQIGLSEIPIVREFGDVFPEELLGMPPKREIEFRIDLAPGTTPLYKRPYRMAANELAEVKKQLEELKGKGYIRPSTSPRGAPVIFVEKKDKTKRMCVDYRTLNEVTIKNKYPLPRIDDLFDQLKGATVFSKIDLRSGYHQLRIREEDIPKTAFTTRYGLNCEFWLSEVKFLGHMISAKGAAVDPETVTAVTDWKQPKTVTQIRSFLGLAGYYRRFIENFSQIARPMTQLLKKEEKFVWSPQCEKAFQTLKEMLVSSPVLVLPDTRKDFMVYCDASRQGLRCVLMQEGHVVAYASRQLRPHEGNYPTHDLELAAVVHALKIWRHYLIGNRCEIYTDHKSLKYIFTQSDLNLRQRRWLELIKDYDVGIHYHPGRANVVANALSRKSHCNTLNIRGIPPELNQQMAALKLSIVSRGFLAALEAKPTLLDQIREAQKNDPDMHGLLKNMKQGKAAGFTEDEHGTLWNGNRVCVPDNRELKQLILQEAHESPYSIHPGSTKMYLDLKEKYWWVSMKREIAEFVALCDVCQRVKAEHQRPAGLLQPLQVPEWKWDEIGMDFITGLPKTQGGYDSIWVVVDRLTKVARFIPVKTTYGGNKLAELYFARIVSLHGVPKKIVSDWGSQFTSHFWKKLQEELGTRLNFSTAYHPQTDGQTECLNQILEDMLRACVLDFGKTWDKSLPYAEFSYNNSYQASIQMAPYEALYGRKCRTPLLWDQVGESQVFGTDILREAEAKVRTIRDNLKVAQSRQKSYAYNRRRDLEFAMDDFVYLRVTPLRGVHRFQTKGKLAPRFVGPFRIIARRGEVAYQLELPASLGNVHDVFHVSQLKKCLRVPSEQADSEQIEVREDLTYVERPVKILDTMERRTRNRVIRFCKVQWSNHAEEEATWEREDELKAAHPDLFASSSESRGRDSV

SEQ ID NO: 107777 - protein, 1865 aa, Oryza sativa
  unsure (1)..(1865): unsure at all Xaa locations
  Clone ID: PAT_MRT4530_12096C.1.pep
MDEVGGRWTFSRANEGYTSCGPVVEMSWQRVGALLLGAQSCLPVPGVPAVGGIGSMYTSDQSIIYSNSRALGYGQAEQCTQMAGSVTRRGLDMTGFVLELRGMCVVLGYPHGVDYQARTLPDQEGDDAEPHAGWEVTAVILSGSPERTSLAVTAGGDSFPAACQNAALLAIGTLHQRYPDELQHSPYRYHPRRGGACDHATFRDASSEDDATIVHLARMVEAYDAARIDFHQMVRRGMVENNMKILELRQENLQLKKDLDAVEAQLHQLKIAQGEICRPKRRRVCRSQKITARKSTSRPELVRQSLAWTCFVETPRAEPAPVVPQEGEAFRRWXHGGCAVAHLPSWPVAAVDEQLVGLRMVTTRRNAATGDGNQPEGSNHNHQGNPPPPPPPPPPPPPDTNAILTQILAQQANMMTAFLHHLQNPPQQNAPPPPPQHSKLAEFLRIRPPTFSSSNNPVDALDWLHAVGKKLDTVQCSDEEKVVFAAHQLRGPASLWWDHFQATQPGEQPITWARFTAAFRRTHVPAGVVALKKREFRELKQGNRSVMEYLHEFNNLARYAPEDVREDEEKQEKFLAGMDPELSVRLVSGDYPDFQRLVDKSIRLEAKHKELESHKRRLANFRNQQGANQRVRYTNPYPGGSSSQQQQQQQQPRSAPRPQFVVRVPQPQQQQNQQGTRAPRPLTPTVQPGQGRRDASGPQRLCFNCFEPGHFADKCPKPRRQQGQAPPRSNNGGKDVIRGRVNHVTAEDVLTTPDVIVGTFLVHSIPATILFDSGASHSFISVPFVGRNQLGVERLRNPLLITTPGGVMTAKYYSPAVPIEIQGIPFPSDLILLDTKNLDVILGMNWLAQFQGVVDCARRTVTLYRGPEQPVVFFAPPTSVRSSELHQIELSEIPIVREFGDVFPEELPGMPPKREIEFRIDLAPGTTPLHKRPYRMAANELAEVKKQLEELKEKGYIRPSTSPWGAPVIFVEKKDKTKRMCVDYRALNEVTIKNKYPLPRIDDLFDQLKGATVFSKIDLRSGYHQLRIREEDIPKTAFTTRYRLYEFTVMSFGLTNAPAFFMNLMNKVFMEYLDKFVVVFIDDILIYSQSEEDHQHHLRLVLGKLREHQLYAKLSKCEFWLSEVKFLGHVISAKGVAVDPETVTAVTDWKQPKTVTQVRSFLGLAGYYRRFIENFSKIARPMTQLLKKEEKFVWSPQCEKAFQTLKEKLVSSPVLILPDTRKDFMVYCDASRQGLGCVLMQDGYVVAYASRQLRPHEGNYPTHDLELAAVVHALKIWRHYLIGNRCEIYTDHKSLKYIFTQSDLNLRQRRWLELIKDYDVGIHYHPGKANVVADALSRKGHCNTLNVRGIPPELNQQMEALNLSIVGRGFLAALEAKPTLLDQIREAQKNDPDMHGLLKNMKQGKAAGFTEDEHGTLWNGKRVCVPDNRELKQLILQEAHESPYSIHPGSTKMYLDLREKYWWVSMKREIAEYVALCDVCQRVKAEHQRPAGLLQPLQVPEWKWDEIGMDFITGLPKTQGGYDSIWVVVDRLTKVARFIPVKTTYGGNKLAELYFARIVSLHGVPKKIVSDRGSQFTSHFWKKLQEELGTRLNFSTAYHPQTDGQTERLNQILEDMLRACVLDFGKTWDKSLPYAEFSYNNSYQASIQMAPYEALYGRKCRTPLLWDQVGESQVFGTDILREAEAKVRIIRDNLKVAQSRQKSYADNRRRDLEFAVDDFVYLRVTPLRGVHRFQTKGKLAPRYVGPFRIVARRGEVAYQLELPASLGNVHDVFHVSQLKKCLRVPSEQADSEQIEVREDLTYVERPVKILDIMERRTRNRVIRFCKVQWSNHAEEEATWEREDELKAAHPGLFASSSESRGRDSV

SEQ ID NO: 107778 - protein, 1803 aa, Oryza sativa
  unsure (1)..(1803): unsure at all Xaa locations
  Clone ID: PAT_MRT4530_12097C.1.pep
MVLMVAPRPYMDRSSGLCCKALPYFHMSSGANEGYTSCGPVVEMSWHRAGVLLLGAQSCLPVPGVPAVGGIGSMYTSDQSIIYSNSRALGYGQAEQCTQMAGSVSRRGLDMTGFVLELRGMCVVLGYPHGVDYQGRPLPEQEGDDAEPHAAWEVTAVILTGSPERTSLAVTAGGDSFSAACQSAALLAICTLHQRYPDELQHSPYRYHPRRGGARDYATFRDASSEDDATIMHLARMVEAYDAARIDFHQMVRRGMVENNLKILELRQENLQLKKDLDAVEAQLHQLKIAQGEVCRPKRRRVCRSQKITARKSTSRPELVRQSLAWTCFVENPRAEPAPVVPQEGEASGVGSTEDALLLTFHXMTRRSASTGDGNQPEGSNHNHQGSPPPPPPPPPPPPPDTNAILTQILAQQANMMIAFLHHLQNPPQHNAPPPPPQHSKLAEFLRIRPPTFFSSNNPVDALDWLHAVGKKLDTVQCSDEEKVIFAAHQLQGPASLWWDHFQATQPEGQPITWARFTAAFRRTHVPAGVVALKKREFRELKQGNRSVMEYLHEFNNLARYAPEDVRXDEEKQEKFLAGMDPELSVRLVSGDYPDFQRLVDKSIRLEAKHKELESHKRRLANFRNQQGANQRVRYTNPYPGGSSSQQQPRSAPRPQFVVRVPQPQQQQSQQGTRAPRPPTPTVQPGQGRRDAQGPQRLCFNCFEPGHFADKCPKPRRQQGQAPPRSNNGGKDVIRGRVNHVTAEDVLTTPDVIVGTFLIHSIPATILFDSGASHSFISVPFVGRNQLGVERLRNPLLITTPGGVMTAKYYSPAVPIEIQGIPFPSDLILLDTKNLDVILGMNWLAQFQGVVDCARRTVTLYRGPEQPVVFFAPPTSVRSSELHQIVLSEIPIVREFGDVFPEELPGMPPKREIEFRIDLAPGTTPLYKRPYRMAANELAEFKKQLEELKEKGYIRPSTSPWGAPVIFVEKKDKTKRMCVDYRALNEVTIKNKYPLPRIDDLFDXLKSATVFSKIDLRSGNHQLRIREEDIPKTAFTTRYGLYEFTVMSFGLTNAPAFFMNLMNKVFMEYLDKFVVVFIDDILIYSQSEEDHQHHLRLVLGKLREHQLYAKLSKCEFWLSEVKFLGHVISAKGVAMDPETVTAVTDWKQPKTVTQVRSFLGLAGYYRRFIENFSKIARPMTQLLKKEEKFVWSPQCEKAFQTLKEKLVSSLVLVLPDTRKDFMVYCDASRQGLGCVLMQDGHVVAYASRQLRPHEGNYPTHDLELAAVVHALKIWRHYLIGNRCEIYTDHKSLKYIFTQSDLNLRQRRWLELIKDYDVGIHYHPGKANVVADALSRKSHCNTLNVRGIPPELNQQMEALNLSIVGRGFLATLEAKPTLLDQIREAQKNDPDMRGLLKNMKQGKAAGFTEDEHGALWNGNRRVKAEHQRPAGLLQPLQVPEWKWDEIGMDFITGLPKTQGGYDSIWVVVDRLTKVARFIPVKTTYGGNKLAELYFARIVSLHGVPKKIVSDRGSQFTSHFWKKLQEELGTRLNFSTAYHPQTDGQTERLNQILEDMLRACVLDFGKTWDKSLPYAEFSYNNSYQASIQMAPYEALYGRKCRTPLLWDQVGESQVFGTDILREAEAKVRTIRDNLKVAQPRQKSYADNRRRNLEFAVDDFVYLRITPLRGVHRFRTKGKLAPRFVGPFRIIARRGEVAYQLELPASLGNVHDVFHVSQLKKCLRVPSEQADSEQIEVREDLTYVERPVKILDTMERRTRNRVIRFCKVQWSNHAEEEATWEREDELKAAHPDLFASSSESRGRDSV

SEQ ID NO: 107779 - protein, 690 aa, Oryza sativa
  unsure (1)..(690): unsure at all Xaa locations
  Clone ID: PAT_MRT4530_12098C.1.pep
DGAAISAADSSLSGRSLSLPALYKRSPCLCPTFPPSAARSPRRNRARAVASSLRRRRRAPVHRRRRSGLPPVSASRPSASPRRRRPRPPLRFARRPPELRRPRRPEPRRRFPPLRSSFPPSSLSRGEPWTVPLASPFPPLSRVPLRRAGGRRRXTIGARARVSRRPCRRGRLRARPAAARWGPAVSRPRPRVRLTRGTHGAGRRQPRAPGPPWTHLGHIRTGLRASVAKHYRXFHMSSGANEGYTSCGPVVEMSWHRAGVLLLGAQSCLPVPEVPAVGGVGSMYTSDQSIIYSNSRALGYGQAEQCTQMAGSVTRRGLDMTGFVLELRGMCVALGYPHGVDYQARPLPDQEGDDAEPHAGWEVTAVILSGSPERTSLTVTAGGDSFPAACQSAALLAIGTLHQRYPDELQHSPYRYHPRRGGARDYATFRDASSEDDATIVHLARMVEAYDAARIDFHQMVRRGMVENNMKILELRQENLQLKKDLDAVEAQLHQLKIAQGEICRPKRRRVCRSQKITARKSTSRPELVRQSLAWTCFVETPRAEPAPVVPQEGEASGVGSTEGALLLTFHGXTRRNAATGDGDQPEGSNHHHQGNPPPPPPPPPPPPPDTNAILTQILAQQANMMTAFLHHLQNPPQQNAPPPPPQHSKLAEFLRIRPPTFSSSNNPVDALDWLHAVGKKLDTVQCSCH

SEQ ID NO: 107780 - protein, 2025 aa, Oryza sativa
  unsure (1)..(2025): unsure at all Xaa locations
  Clone ID: PAT_MRT4530_12099C.1.pep
MEMDEVGGRWTFSRADEGYTSCGPVVEMSWHRAGVLLLGXSVLPACPGGSGRRXIGSVLLSMARMGWKLCHVFCLYTMVMAGSVTRRGLDMTGFVLELRGMCVVLGYPHGVDYQARPLPEQEGDDAEPHAGWEVTAVILSGSPERTSLAVTAGGDSFPAACQSAALLAIGTLHQRYPDELQHSPYRYHPRRGGARDYATFRDASSEDDATIVHLARMVEAYDAARIDFHQMVRRGMVENNLKILELRQENLQLQKDLDAVEAQLHQLKIAQGEVCRPKRRRVCRSQKITARKSTSRPELVRQSLAWTCFIETPRAEPAPVVPQEGETSGVGSTEDALLLTFRPGPSQRRSANTGDGNQLEGSNHNHQGNPPPPPPPPPPPPPDTNAILTQILAQQANMMTAFLHHLQNPPQHNAPPPPPQHSKLAEFLRIRPPTFSSSNNPVDALDWLHAVGKKLDIVQCSDEEKVIFAAHQLQGPASLWWDHFQATQPEGQPITWARFTAAFRRTHVPAGVVALKKREFRELKQGNRSVMEYLHEFNNLARYAPEDVREDEEKQENFLAGMDPELSVRLVSGDYPDFQRLVDKSICLEAKHKELESHKRRLANFRNQQGANQRVRYTNPYPGGSSSQQQQQQPRPAPRPQFVVRVPQPQQQQNQQGTRAPRPPTPTVQPGQGRRDAQGPQRLCFNCFEPGHFADKCPKPRRQQGQAPPRSNNGGKDVIRGRVNHVTAEDVLTTPDVIVGTFLIHSIPATILFDSGASHSFISVPFVGRNQLGVERLRNPLLITTPGGVMTAKYYSPAVPIEIQGIPFPSDLILLDTKNLDVILGMNWLAQFQGVVDCARRTVTLYRGPEQPVVFFASPTSVRSSELHQIGLSEIPIVREFRDVFPEELPGMLPKREIEFRIDLAPGTTPLYKRPYRMAANELAEVKKQLEELKEKGYIRPSTSPWGAPVIFVEKKDKTKRMCVDYRALNEVTIKNKYPLPRIDDLFDQLKGATVFSKIDLRSGYHQLRIREEDIPKTAFTTRYGLYEFTVMSFGLTNAPAFFMNLMNKVFMEYLDKFVVVFIDDILIYSQSEEDHQHHLRLVLGKLREHQLYAKLSKCEFWLSEVKFLGHVISAKGVAVDPETVTAVTDWKQPKTVTQVRSFLGLAGYYRRFIENFSKIARPMTQLLKKEEKFVWSPQCEKAFQTLKEKLVSSPVLILPDTRKDFVVYYDASRQGLGCVLMQDGHVVAYASRQLRPHEGNYPTHDLELAAVVHALKIWRHYLIGNRYEIYTDHKSLKYIFTQSDLNLRQRRWLELIKDYDVGSHYHPGKANVVADALSRKSHCNTLNIRGVPPELNQQMEALNLSIVGRGFLAALEAKPTLLDQIREAQKNDLDMHGLLRNMKQGKAAGFTEDEHGTLWNGNRVCVPDNRELKQLILQEAHESPYSIHPGSTKMYLDLKEKYWWVSMKREIAEFVALCDVCQRVKEEHQRPAGLLQPLQVPEWKWDEIGMDFITGLPKTQGGYDSIWVVVDRLTKVARFIPVKTTYGGNKLAELYFARIVSLHGVPKKIVSDRGSQFTSHFWKKLQEELGTRLNFSTAYHPQTDGQTERLNQILEDMLRACVLDFGKTWDKSLPYAEFSYNNSYQASIQMAPYEALYGRKCRTPLLWDQAGESQVFGTDILREAEAKVRTIRDNLKVAQSRQKSYADNRRRDLEFAVDDFVYLRVTPLRGVHRFQTKRKLAPRYVGPFRIIARRGEVAYRLELPASLGNVHDVFHVSQLKKCLRVPSEQADSEQIEVREDLTYVERPVKILDTMERGTRNRVIRFCKVQWSNHAEEEATWEREDELVPLRHRLLRLRRVLADLVHSSVSPADRRNTAVLVDPSRAAAFLHSGRRSRRPRRPGVSRGPPLSLPPSLPSLGRRSAACVMPGGDHRGAGAPPPVGRAARPPSGAPRGCQVGPGRQPPAPSGAAGPRAPPLGRSESQNPGLHLRSGAAAAAVDALLLLLRLSLLLVLAAAGLARSHLLLALHAAALALPPRPRPPPRH

SEQ ID NO: 107781 - protein, 83 aa, Oryza sativa
  Clone ID: PAT_MRT4530_1209C.1.pep
STPHLNRRRGSALFPSPYFEIQDDDDNEGYLTAVSREGSISIAVASASAWKDDLDDAHRPPELRTCHLVVIVVELERAADSSP

SEQ ID NO: 107782 - protein, 930 aa, Oryza sativa
  Clone ID: PAT_MRT4530_120C.1.pep
MEENIGKLDNTIKNLEVRKNEIQIRLSISEGKQETCNPEVTEWLQKVAAMETEVNEIKNVQRKRKQLFSYWSKYEIGMQAAKKLKEAEMLHEKGAFKEVSFEVPPYFVQEVPTIPSTEETECNLKEVLQYLKDDNVGILGIWGMGGVGKTTLLRKINNHFLGVTKENYGFDLVVYVVASTASGIGQLQADIAERIGLFLKPGCSINIRASFLLSFLRRKKFLLLIDDLWGYFDLAEAGIPYPNGLNKQKVVLATRSESVCGHMGAHKTIFMECLDQEKAWRLFKEKATEEVISSDVRIESLAKEVAEECGGLPLALATLGRAMSTKRTRHEWALALSYLKKSRIHEIPNMGNTSHIYTRLKLSYDYLQDKQIKYCFLCCSLWPEGYSIWKVALIDCWMGMGLIEYDTIEEAYDKGHSIIEYLKNACLLEAGYLEDREVRIHDIIRDMALSISSGCVDQSMNWIVQAGVGIHKIDSRDIEKWRSARKISLMCNYISELPHAISCYNLQYLSLQQNFWLNVIPPSLFKCLSSVTYLDLSWIPIKELPEEIGALVELQCLKLNQTLIKSLPVAIGQLTKLKYLNLSYMDFLEKIPYGVIPNLSKLQVLDLYGSRYAGCEEGFHSRSHMDYDEFRIEELSCLTRELKALGITIKKVSTLKKLLDIHGSHMRLLGLYKLSGETSLALTIPDSVLVLNITDCSELKEFSVTNKPQCYGDHLPRLEFLTFWDLPRIEKISMGHIQNLRVLYVGKAHQLMDMSCILKLPHLEQLDVSFCNKMKQLVHIKNKINTEVQDEMPIQGFRRLRILQLNSLPSLENFCNFSLDLPSLEYFDVFACPKLRRLPFGHAIVKLKSVMGEKTWWDNLKWDDENSPLLLFPFFKASETRIASLRPELDTSVASSPKAFFTKRQPYLSSSIRYTSFLKSMFEAEEFSSL

SEQ ID NO: 107783 - protein, 1887 aa, Oryza sativa
  unsure (1)..(1887): unsure at all Xaa locations
  Clone ID: PAT_MRT4530_12100C.1.pep
MDRPFRFPLPSPLSGAAPSRRRSPPATIGARARRLPSAVPARPPSGAPRGCHVGPGRQPPASSGAADAWDPRRRPAQAACTRSTVDPPRPYKDRCSGLCCKALPYFHMSSGANEGYTSCGPVVEMSWHRAGVLLLGAQSCLPVPGVPAVGGIGSMYTSDQSKIYSNSRALGYGQAEQCTQMAGSVSRRGLDMTGFVLELRGMCVVLGHPHGVDYQARPLPEQEGDDAEPHAAWEVTAVILAGSPERTSLTVTAGGDSFPAACQSAALLAIGTLHQRYPDELQHSPYRYHPRRGGARDYATFRDASSEDDATIVHLARMVEAYDAARIDFHQMVRRGMVENNMKILELRQENLQLKKDLDAVEAQLHQLKIAQGEICRPKHRRVYRSQKITARKSTSRPELVRQSLAWTCFVETPRAEPAPVVPQEGEASGVGSTEDALLLTFHXMTRRNAATSDGNQPEDSNHNNHGSPPPPPPPPPPPPPDTNAILTQILAQQANMMTAFLHHLQNPPQHNAPPPPPQHSKLAEFLRICPPTFSSSNNPVDALDWLHAVGKKLDTVQCSDEEKVIFAAHQLQGPASLWWDHFQATQPEGQPITWARFTAAFRRTHVPAGVVALKKREFRELKQGNRSVMEYLHEFNNLARYAPEDVREDEEKQEKFLAGMDPELSVCLVSGDYPDFQRLVDKSIRLEAKHKELESHKRRLANFHNQQGANQRVRYTNPYPGGSSSQQQQQQQQPRSAPRPQFVVRVPQPQQEQNQQGTRAPRPPPPTVQPGQGRRDAQGPQRLCFNCFEPGHFADKCPKPRRQQGQAPPRPNNGGKDVIRGRVNHVTAEDVLTTPDVIVGTFLIHSIPATILFDSGASHSFISVPFVGRNQLGVERLRNPLLITTPGGVMTAKYYSPAVPIEIQGIPFPSDLILLGTKNLDVILGMNWLAQFQGVVDCARRTVTLYRGPEQPVVFFAPPTSVRSSELHQIELSEIPIVREFGDVFPEELPGMPPKREIEFRIDLAPGTAPLYKRPYRMAANELAEVKKQLEELKEKGYIRPSTSPWGAPVIFVEKKDKTKRMCVDYRALNEVTIKNKYPLPRIDDLFNQLKGATVFSKIDLRSGYHQLRIREEDIPKTAFTTRYGLYEFTVMSFGLTNAPAFFMNLMNKVFMEYLDKFVVVFIDDILIYSQSEEDHQHHLRLVLGKLREHQLYAKLSKCEFWLSEVKFLGHVISAKGVAVDPETVIAVTDWKQPKTVTQVRSFLGLAGYYRRFIENFSKIARPMTQLLKKEEKFVWSPQCEKAFQTLKEKLVSSPVLILPDTHKDFMVYCDASRQGXGCVLMQDGYVVAYASRQLRPHEGNYPTHDLELAAVVHALKIWWHYLIGNRCEIYTDHKSLKYIFTQSDLNLRQRRWLELIKDYDVGIHYHPGKANVVADALSRKSHCNTLNVRGIPPELNQQMEALNLSIVSRGFLATLEAKPTLLDQICKAQKNDPDMHGLLKNMKQGKAAGFTEDEHGTLWNGNRRVKAEHQRPAGLLQPLQVPEWKWDEIGMDFITGLPKTQGGYDSIWVVVDRLTKVARFIPVKTTYGGNKLAELYFARIVSLHGVPKKIVSDRGSQFTSHFWKKLQEELGTRLNFSTAYHPQTDGQTERLNQILEDMLRACVLDFGKTWDKSLPYAEFSYNNSYQASIQMAPYEALYGRKCRTPLLWDQVGESQVFGTDILREAEAKVRTIRDNLKMAQSRQKSYADNRRRDLEFAADDFVYVRVTPLRGVHRFRTKGKLAPRYVGPFRITARRGEVVTTGNNPTGIPYVRALILVPGGKAQNTQRQTRNSGRLGRRPQALDGRHELDTKAFIFKELLFWTWEKLSKTEYNHRTQQDTPTNATRHIFLTCYHAPHTTTVYRRKT

SEQ ID NO: 107784 - protein, 149 aa, Oryza sativa
  unsure (1)..(149): unsure at all Xaa locations
  Clone ID: PAT_MRT4530_12101C.1.pep
SRTPPSPDLAAYAAHPAHVPRAGHVLPTRLDTTAIDWVNPALXAPSPVTPGSPLSGLTACRKLKKVLKFPQRXEEVPHGRTAAAGQAKGRPRLXFGKEPSSPARAKGYQFGMCXLFTSLKKLNPLKGNRKVPEAKPPLSPLASNRVASC

SEQ ID NO: 107785 - protein, 511 aa, Oryza sativa
  unsure (1)..(511): unsure at all Xaa locations
  Clone ID: PAT_MRT4530_12102C.1.pep
MPQPATSSRRSGDFPDWVFLDTVAHTGRCHDNATTARAKSSDGYPIEVSFVFADPPALTRCFVHCPAGLTAGEFSMSPPSITGADGAFLLLRVIFPHRSDRCMVTDWFVYKSGPGTPSLELLIQRPNPLDVVSRRAGVLSCGDHCLVVDPEWRFHDDDWMKFHLHIFSSKTKRWSNKVAKLGRGMEAFNPFFLPTKVLCVVRGGSMAWVDFRNSILLLDSVPGNCPEVSLIRLPPLMPINNVDSGGSPDGPCVDLVRDVTCRDGWFKFIEMGFPYLDPNDAQLNRGWEATMFKRKIRSDNYWQWEPCGTVDSASLLPADSCVACLFPEIFDCNEHKLALNNVVSSFPTLDLYCDDVVYMMTKIKADDPDACAVATGDCGCSVGGREARRLHLNRRAAAGATSXGGEEAAHLAAAPRPTRVDLAWILHGXGGCGCDXATAGRRQGGGESGRRSARTRTARPLRRQARTRMDMEEQRRPPPRHAAIDVRSKRYRIIIGRSCRGPGYQPRRQRK

SEQ ID NO: 107786 - protein, 57 aa, Oryza sativa
  Clone ID: PAT_MRT4530_12103C.1.pep
TEYQFSPPGTSYDHDYEFELGYPGDPLEIKLFFFPKVSIIFAFMINAFLLSSYYYRV

SEQ ID NO: 107787 - protein, 77 aa, Oryza sativa
  Clone ID: PAT_MRT4530_12104C.1.pep
SHKFSHDVGIYAPLSPSLTARLNGDLLKHGTSLKLTFEGTNQLVYPETWFFVLIVATCVLTQMNYLNKVCLLMPLGH

SEQ ID NO: 107788 - protein, 66 aa, Oryza sativa
  unsure (1)..(66): unsure at all Xaa locations
  Clone ID: PAT_MRT4530_12105C.1.pep
PVSXPPPRPRXPXXXATHRXXXSLSXQHPRARAARAEAALXXXVXAQHLLWGDGGVRGQKRFEFRR

SEQ ID NO: 107789 - protein, 286 aa, Oryza sativa
  Clone ID: PAT_MRT4530_12106C.1.pep
MDGGGGAKKSRNPHKAPADYRSDRKSASGMSGEPKKGGRGGKFTWEGADGYADEDLDLISPKNSTSHSKSAASAAAADSSSNKKSGDDERLFLEEGRNSSVGSSSSSSDIAELDGMSPDSYCIWVSSPSPASSPSRPPRKSGSTGSITRWRRISELVIGRSHSDGKEKFRFISALSSLAREHPKPKPTTKGATATKPHSSLTAAKRPLEDEDDDDDLGGPSVNVDGYGGRTRRRSPHLRRPIPAAARRRGCRLPPGVEPRGGGVTPRRRRPLRRASIALLLGKKGK

SEQ ID NO: 107790 - protein, 50 aa, Oryza sativa
  Clone ID: PAT_MRT4530_12107C.1.pep
MWAKCSHHSAPGVFGATCSIPLMSTSSGAGPGNFAKTSSLNLTIFLKSLN

SEQ ID NO: 107791 - protein, 555 aa, Oryza sativa
  Clone ID: PAT_MRT4530_12108C.1.pep
MRPFHPPRPNAGQPHRPRPGDPAPPPLPMHPGFNPPPVPNLAAANPMAAAAAANPFLAMQLFGQAQQLQSLGFLAAAALQQHHHQPQPQAPFFPGGGFPPNPNQFGAFPVQHAGFNGGGAFRPGGVGVGVAGPRTPRPMMGAPGNGYNSGGGSGHGTGAGAPRPMLNGGGNDRNSSAGKGGEVNHTKIKPDGIPRFTSENGERKNTTDQKARFNSGRDCRDSRQFGPSGGRGRGRGRSFNQGRGGGNNNWRDAKSNFRSSDSPSPASGQRRNDSPASGGHRKRPRIIYDANEVKQWLEARKKNYPTSVNINKASATLCPHQTIREASSTDHLMQKLSESRPDGEKKDEEAQMRRQELKEVLEKQKELGFELPELPPGYLSEHEDQGNGRRSNWKTQRRDCRFGNRADNKRSRYDRNDFQSKRPKVRNQTHCDDGAVLKSREPTLLQKLLSSDVKRDRHRLLHTFKFMVLNNFFSDYPDKPLEFPSVKVNQIELESNIAEEDLDDLMNSETAKDSILDLKENGDQKDSSSIDGESDLDDDNDDEDEEDDDDGNGQC

SEQ ID NO: 107792 - protein, 71 aa, Oryza sativa
  unsure (1)..(71): unsure at all Xaa locations
  Clone ID: PAT_MRT4530_12109C.1.pep
FLVNPLVFRFLPGYCWKAQAGPPMKQVTGLGPPPCRLAPHPDFLERKNTLRRVPTAMASGFSEGKXEXGAA

SEQ ID NO: 107793 - protein, 219 aa, Oryza sativa
  Clone ID: PAT_MRT4530_1210C.1.pep
MAQDTGDAVLPSSRITADRHLSLPRKIMPDGAVVRAGESRPRPRYPERSMHLLSFAMTGLIPPFSRFFHEVLDFYEIHALHLAPNAVMTLAIFVHLCEMFIGPRPGTAGQYIESNLRKKWEDWNKDWFYTALPDHPRLRVPAGPPERSAAWLATSELGEEYDAVWDRLRGLRSLGLTGAMVFGDYFRRCIAPLQERSRGAWEYTGPNDPMRTHVGERWD

SEQ ID NO: 107794 - protein, 38 aa, Oryza sativa
  Clone ID: PAT_MRT4530_12110C.1.pep
MASANTSRWFSLGTLAFLRLHVMPSENVSGTIIAIRKC

SEQ ID NO: 107795 - protein, 85 aa, Oryza sativa
  Clone ID: PAT_MRT4530_12111C.1.pep
PRLRFILGHTNVQIRDMSVGQNIHRSRASRTIEGTRGTREQRLLQEQAVHAAGHAVQHPQGLPRRPAPGGRRREHQLRGRQKARQ

SEQ ID NO: 107796 - protein, 153 aa, Oryza sativa
  Clone ID: PAT_MRT4530_12112C.1.pep
MAGEEGVEPSTFEAEVGAAPPPAAAPSLPPSALTTLTDADTLKAAATLQFRDVILSPQLATTSTAIITLQADANLKAQANADMGAIRQNMAKLRDTLRQMQEQQQAYGAARQAKANTQEFPTLYAQPQVFPPHAAPAPAYYAKPVPAVAVRPP

SEQ ID NO: 107797 - protein, 168 aa, Oryza sativa
  unsure (1)..(168): unsure at all Xaa locations
  Clone ID: PAT_MRT4530_12113C.1.pep
MFTSHTNQIHHIFTSHTNHLRSESQILNQKKRKEDERPTAAAGAGAPPAAYPVPPRGRQPPEGRHAISPSSRGAGRSRTTGAFSRXLARAQPRNRRRVAWQPPLAAPXXRAGGLXAHAARGAAXLXAHRXKGRWGGGKGRKNKGVTILGLLEGAPPGGALWSLGGNFL

SEQ ID NO: 107798 - protein, 243 aa, Oryza sativa
  unsure (1)..(243): unsure at all Xaa locations
  Clone ID: PAT_MRT4530_12114C.1.pep
MPPKEIVKERVAKXKEGNSEGEMAGEEGVEPSTFEAEVGAAPPPAAAPSLPPSALTTLTDADTLKAAATLQFRDVILSPQVPGAPQAAAFTXLATTSTAIITLQADANLKAQANADMGAIRQNMAKLRDTLRQMQEQQQAPVPAVAVRPPXHVISAPVRPAAHQAQYPKPTHTPQAMMEAASTLQAQFQAFLQQLNQPHNNIPRASPLAQDERSPSQGCASRAAVGXFIMPSSVATTLKLAPP

SEQ ID NO: 107799 - protein, 181 aa, Oryza sativa
  Clone ID: PAT_MRT4530_12115C.1.pep
MAARKSQTGVPRAPVVAVIVVVMTMLASRAASQNNGCSSVMMTLSPCLDYISGKSPIPEFTCCTTLAGVVQSDPRCLCMVLDGSAASFGISINHTRALELPGVCKVQAPPISQCTAVPTPPPAPDTPTLADEPAETNEDEPSPPPAGSAGSNKTSSATNSKKAASLMASVLIPTCALFYVF

SEQ ID NO: 107800 - protein, 80 aa, Oryza sativa
  Clone ID: PAT_MRT4530_12116C.1.pep
MAILVLRSSVAANPAAPASGGLDPPPLASGAAGPWRRRWEQHTAIMAPEKLLQLSLGWPDYCRHGGVLNVAVAAARGGGP

SEQ ID NO: 107801 - protein, 228 aa, Oryza sativa
  Clone ID: PAT_MRT4530_12117C.1.pep
MSEASTATVDDNPAGPKALLFRLPRLPRTRCSRIVSRLPVKDGARTAVLSPCWRRIWASTLLIFNDADLLPDNDNPQIFWRDIADIVSRVLAAYPSHRCIRLTNACSYVDSRSAAVLSRWLGVLAAKGVQELILVFLPIWPMRVEPPADVLCIASLHRLYLGLRRSFPDTEHIRLGADVFPYLIELGICRTNMKAKDLDRLLRSLTPNQSIAFVRKYWLRNGRMYTAR

SEQ ID NO: 107802 - protein, 175 aa, Oryza sativa
  unsure (1)..(175): unsure at all Xaa locations
  Clone ID: PAT_MRT4530_12118C.1.pep
MASGRPHTAHPIKVLHRLLAKTDILRRQRRKRRLVLGRRGIPAKRSADIALPWRPPPPPRELMMFPVATAVXSPRPHPRLPPPPPGRPPQSPREPNRARLALPATLPPRHPLLSGAHRPVPPPRRAYHRSSTSSGHHSSPSSPRFSADIPLPRHHPPPAIARRHERRPPTAALAC

SEQ ID NO: 107803 - protein, 46 aa, Oryza sativa
  Clone ID: PAT_MRT4530_12119C.1.pep
KKAKEKVEEVKERVPGADDPPDPGKEKKLPPPHVDGKQKPRPVAEL

SEQ ID NO: 107804 - protein, 241 aa, Oryza sativa
  unsure (1)..(241): unsure at all Xaa locations
  Clone ID: PAT_MRT4530_1211C.1.pep
MAQDTGDAVLPSSRITADRHLSLPRKIMPDGAVVRAGESRPRPRYPERSMHLLSFAMTGLIPPFSRFFHEVLDFYEIHALHLAPNAVMTLAIFVHLCEMFIGVRPTMRLFQAFFIPXLLQGAVVGGCYFQPRPGTAGQYIESNLRKKWEDWNKDWFYTALPDHPRLRVPAGPPERSAAWLATSELGEEYDAVWDRLRGLRSLGLTGAMVFGDYFRRCIAPLQERSRGAWEYTGPNDPMRTH

SEQ ID NO: 107805 - protein, 200 aa, Oryza sativa
  unsure (1)..(200): unsure at all Xaa locations
  Clone ID: PAT_MRT4530_12120C.1.pep
SAPEEEARPGASRDTNEAVGRHRPATEAAATAAGARDVPRGHRSGSILAGGGRRGLAGISVRSPRAPNRTHHSTLYAAHRARLCTQPRPHPRLPPRPPGRPPRSPREPXPRSPRPPSHAPSSPPTAVAPXPPPPRFSADIPLPRRHPPPALARAVSADHPPPPLCADHPRGCASCLIVQRSRQKSSAFNPTPLGLSLEFE

SEQ ID NO: 107806 - protein, 83 aa, Oryza sativa
  Clone ID: PAT_MRT4530_12121C.1.pep
MDIGISVPSRPCHCPLVFMVKLVTGNGDEELRTRHGTEARRPPITRSSGRGPYLGGVALGRKATPARDFSGNSPAAPAARGGR

SEQ ID NO: 107807 - protein, 235 aa, Oryza sativa
  Clone ID: PAT_MRT4530_12122C.1.pep
GVRPAVHGTSNRSTPPPSCKDRHTRASAPEEEARPGASRDTNEAVGRHRPATEAAATAAGARDVPRGHRSGSILAGGGRRGLAGISVRSPRAPNRTHHSTLYAAHRARLCTQPRPHPRLPPRPPGRPPRSPREPSHARLALPATPPPRHPLLSGAHRPVLPPRRAYHRSSTSSGHRSSPPPPRFSADIPLPRRHPPPALARAGSEPPREERRNFLAAQTPQNFRSSKTGTSGIEI

SEQ ID NO: 107808 - protein, 114 aa, Oryza sativa
  Clone ID: PAT_MRT4530_12123C.1.pep
MVQVFGWQCSSEGDRPMTGEGLPWQERERSRASSSVDVRKRRREVAADVGCGCLAATERRRRQLMNTTWRRWRRDLAATEEELAAACAVRVYDTHWEEGAVRLGLAGPNWAGSA

SEQ ID NO: 107809 - protein, 60 aa, Oryza sativa
  Clone ID: PAT_MRT4530_12124C.1.pep
KHSMTLPDHVQGAKNVVQGHFLRSTTPTLSLASLSPALPVTRLLIHCTILIPCCQMHHQA

SEQ ID NO: 107810 - protein, 86 aa, Oryza sativa
  Clone ID: PAT_MRT4530_12125C.1.pep
LKGSAQTAYSEVTYALRGQIICAFEQERCRCHNTEITIFVIFQKHGTDMLISTADLVTSTLNYFPSDVQVYAFWLPVPHIIYDMHF

SEQ ID NO: 107811 - protein, 1581 aa, Oryza sativa
  unsure (1)..(1581): unsure at all Xaa locations
  Clone ID: PAT_MRT4530_12126C.1.pep
MAQGRCPAARGSVLPTCPGGPAVGGIGSMYTSDQSITYSNSRALGYGQAEQCTQMAGSINRRGLDLTGFVLELRGMCVVLGYPHGVDYQGRQLPEQEGDDAERHAAWEVTAVILTGSPERTSLAVTAGGDSFSAACQNAALLAIGTLHQRYPDELQHSPYRYHPRRGGARDYAIFRDASSEDDATIMHLARMVEAYDAARIDFHQMVRRGMVKNNMKILELRQENLQLKKDLDAVEAQLHQLKIAQGEVCRPKRRRVYRSQKITARKSTSRPELVRQSLAXTSFVETPRAEPAPVVPQEGEASGVGSTEDALLLTFHXTTRRSANTGDGNQPKGSNHNNHGSPPPPPPPPPPPPPDTNAILTQILAQQANMMAAFLHHIQNPPQHNAPPPPPQHSKLAEFLRIRPPTFSSSNNPVDALDWLHAVGKKLDTVQCSDEEKVIFAAHQLQGPASLWWDHFQATQPEGQPITWARFTAAFRRTHVPAGVMALKKREFRELKQGNRFVMEYLHEFNNLAQYAPEDVREDEEKQEKFLAGMDPELSVRLVSGDYQDFQRLVDKSIRLEAKHKELESHKRRLASFRNQQGANQRVRYTNPYPGGSSSQQQQQQQQPRSAPRPQFVVRVPQPQQQQSQQGTRAPRPPTPAVQPGQGRRDAPGPQRLCFNYFEPGHFADKCPKPRRQQGQAPPRPNNGGKDVNRGRVNHVTAEDVLTTPDVIVGTFLIHSIPATILFDSGASHSFISVPFVGRNQLGVERLRNPLIITTPGGVMTAKYYSPAVPIEIQGIPFPSDLILLDTKNLDVILGMNWLAQFQGVVDCARRTVTLYRGPEQPVVFFAPPTSVGSSELHQIGLSEIPIVREFGDVFPEELPGMPPKREIEFRIDLAPGTTPQYKRPYRMAANELAEVKKQLEELKEKGYIRPSTSPWGAPVIFVEKKDKTKRMCVDYRALNEVTIKNKYPLPRIDDMFDQLKAATVFSKIDLRSGYHQLRIREEDIPKTAFTTRYGLYEFTVMSFGLTNAPAFFMNLMNKVFMEYLDKFVVVFIDDILVYSQSEEEHQHHLSLVLGKLREHQLYAKLSKCEFWLSEVKFLGHVISAKGVAVDPETVTAVTDWKQPKTVTQIRSFLGLVGYYRRFIENFSKIARPMTQLLKKEEKFVWSPQCEKAFQTLKEKLVSSQVLILPDTRKDFMVYCDASRQGLGCVLMQEGHVVAYASRQLRPHEGNYPTHDLELAAVVHALKIWRHYLIGNRCEIYTDHKSLKYIFTQSDLNLRQRRWLELIKDYDVGIHYNPGKANVVADALSRKSHCNTLDVRGIPPELNQQMEALILSIVGRGFLATLEAKPTLLDQIREAQKNDPDMRGLLKNMKQGKAAGFTEDEHGTLWNGNRRVKAEHQRPAGLLQPLQVPEWKWDEIGMDFITGLPKTQGGYDSIWVVVDRLTKVARFIHVKTTYGGNKLAELYFARIVSLHGVPKKIVSDRGSQFTSHFWKKLQEELGTRXVAYQLELPASLGNVHDVFHVSQLKKCLRVPPEQADSEQIEVREDLTYVERPVRILDTMERRTRNRVIRFCKVQWSNHAEEEATWEREDEPR

SEQ ID NO: 107812 - protein, 208 aa, Oryza sativa
  Clone ID: PAT_MRT4530_12127C.1.pep
MSGFARRLGGIPWREIAGEAFSRVFLVAQAVCAVHVVNAHVCSFALVLYFARVSSSSLSLSALLWLDPHPRSVGLLASAQVMGPSMLPAMNLAGDVVAVDLVSARLGRVASGDAVLLVSPENPRKAVVKRVVGMEGDAVTFLVDPGNSDASKTVVVPKGHVWVQGDNIYASRDSRQFGPVPYGLITGKIFCRVWPLKDFGPIDPMSAE

SEQ ID NO: 107813 - protein, 1806 aa, Oryza sativa
  Clone ID: PAT_MRT4530_12128C.1.pep
MSWHRASVLLLGAQSCLPVPGVPAVGGIGSVLLSMARMGWKLCHVFRLYTVVMAGSINRRGLDLTGFVLELRGMCVVLGYPHGVDYQGRQLPEQEGDDAEPHAAWEVTAVILTGSPERTSLAVTAGGDSFSAACQNAALLAIGTLHQRYPDELQHSPYRYHPRRGGARDYATFRDASSEDDATIMHLACMVEAYDAARIDFHQMVRHGLVENNMKILELRQENLQLKKDLDAVEAQLHQLKIAQGEVCRPKRRRVCRSQKITARKSTSRPELVRQSLAWTCFVETPRAEPMPVVPQEGEASGVGSTEDALLLTFRPGPSQRRSANTGDGNQPEGSNHHNHGSPPPPPPPPPPPPPDTNAILTQILAQQANMMAAFLHHIQNPPQHNAPPPPPQHSKLAEFLRIHPPTFSSSNNPVDALDWLHAMGKKLDIVQCSDEEKVVFAAHQLQGPASLWWDYFQATQPEGQPITWARFTAAFRRTHVPAGVMALKKREFRELKQGNRSVMEYLHEFNNLARYAPEDVREDEEKQEKFLAGMDPELSVRLVSGDYPDFQRLVDKSIRLEAKHKELESHKRRLANFRNQQGANQRIRYTNPYPGGSSSQQQQQQQPRSAPRPQFVVRVPQPQQQQSQQGTRAPRPPTPAAQSGQGRRDVQGPQRLCFNCFEPGHFADKCPKPRRQQGQAPPRSNNGGKDVIRGRVNHVTAEDVLTTPDVIVGTFLIHSIPATILFDSGASHSFISVPFVGRNQLGVERLRNPLLITTPGGVMTAKYYSPAVPIEIQGIPFPSDLILLDTKNLDVILGMNWLAQFQGVVDCARRTVTLYRGPEQPVVFFAPPTSVSSSELHQIGLSEIPIIREFGDVFPEELPGMPPKREIEFRIDLAPGTTPLYKRPYRMAANELAEVKKQLEELKEKGYIRPSTSPWGAPVIFVEKKDKTKRMCVDYRALNEVTIKNKYPLPRIDDLFDQLKGATVFSKIDLRFGYHQLRIREEDIPKTAFTTRYGLYEFTVMSFGLTNAPAFFMNLMNKVFMEYLDKFVVVFIDDILVYSQSEEDHQHHLRLVLGKLREHQLYAKLSKCEFWLSEVKFLGHVISAKGVAVDPETVTAVTDWKQPKTVTQIRSFLGLAGYYRRFIENFSKIARPMTQLLKKEEKFVWSPQCEKAFQTLKEKLVSSPVLILPDTRKDFMVYCDASRQGLGCVLMQEGHVVAYASRQLRPHEGNYPTHDLELAAVVHALKIWRHYLIGNRCEIYTDHKSLKYIFTQSDLNLRQRRWLELIKDYDVGIHYHPGKANVVADALSRKSHCNTLNVRGIPPELNQQMEALNLSIVGRGFLAALEAKPTLLDQIREAQKNDPDMRGLLKNMKQGKAAGFTEDEHGTLWNGNREAHESPYSIHPGSTKMYLDLKEKYWWVSMKREIAEFVALCDVCQRVKAEHQRPAGLLQPLQVPEWKWDEIGMDFITGLPKTQGGYDSIWVVVDRLTKVARFIPVKTTYGGNKLAELYFARIVSLHGVPKKIVSDRGSQFTSHFWKKLQEELGTRLNFSTAYHPQTDGQTERLNQILEDMLRACVLDFGKTWDKSLPYAEFSYNNSYQASIQMAPYEALYGRKCRTPLLWDQVGESQVFGTDILREAEAKVRTIRDNLKVAQSRQKSYADNRRRNLEFAVDDFVYLRVTPLRGVHRFQTKGKLAPRFVGPFRIIARRGEVAYQLELPASLGNVHDVFHVSQLKKCLRVPSEQADSEQIEVREDLTYVERPVKILDTMEHRTRNRVIRFCKVQWSNHAEEEATWEREDELKAAHPDLFASSSESRGRDSV

SEQ ID NO: 107814 - protein, 570 aa, Oryza sativa
  Clone ID: PAT_MRT4530_12129C.1.pep
MDFFKIKKLGKARKSGGGGGEVVESEEETKAGNNAASDEQKGKILEDDPAAAAAGAGMDADAGNGAVEGQEEDDDDDDFITNEVKRRLKELRKNSFMVLIPEEECAEVEEDGEEEEEEGSSSREWMESDVGDGFPLCGFDSLYEKYCERMAVFDKMITQLLKDPGSFNISKKSPRSASKLASTLRNLSFKRRDDLQEDCEHLQQQQSEDDPYQTLETAYVGHVSLSWEALHCMYVHLSLILAAQPDNPTTYSCAAQAFQQFQVLLQRFVENEPFEQGSRVEIYARSRSSLSKLLQVPTFQVADGKYNAEDQVEPSIFASDLIKLLEESIMTFRLFLKKDKKKNSALMSVHSHTGSSIQQVQSSLDKKEVKVKELFKKKKGWKSKTWPATMEEVQLLFALIDIKVVSRVLRMAKLSKEQLLCYWSNEIEAGGFKLLNLHMQRNFSVFDCNLQTEVGVVPLPYLLALGFCKDKPAARASTHTERGRGQVRYFFKNSFLLALLFFSQVSLLGIDQQATKIGLKRVQRNCIGILILAAMNCIARSIGPSDIYSSKLQTKKHTIINPCRMQALVL

SEQ ID NO: 107815 - protein, 120 aa, Oryza sativa
  unsure (1)..(120): unsure at all Xaa locations
  Clone ID: PAT_MRT4530_1212C.1.pep
YSTSIRYTNIFAENNNKVEENRHQLKRXINRTMSTIRLIYEXAKNSELTRXIGPKFTSLPMRAKEEAAYRNWVRSAQPMVWPNPPQLRLIQGSPERLRWLPNHGWRVFLSPKQVPLRTKT

SEQ ID NO: 107816 - protein, 1783 aa, Oryza sativa
  Clone ID: PAT_MRT4530_12130C.1.pep
MDEVGGRWTFSRANEGYTSCGPMAGSVTRRGLHMTGFVLELRGMCVVLGYPHGVDYQARPLPDQEGEDAEPHAGWEVTAVILSGSPERTSLAVTAGGDSFPAACQNAALLAIGTLHQRYPDELQHSPYRYHPRRGGARDYATFRDASSEDDATVVHLARMVEAYDAARIDFHQMVRRGMVENNMKILELRQENLQLKKDLDALEAQLHQLKIAQGEICRPKRRRVCRSQKITARKSTSRPELVRQSLAWTCFVETPRAEPAPVVPQEGEASGVGSSEGALLLTFRPGPSQRSPSLFAGSVWGFQMVTTRRNVNTGEGNQPEGSNPNPQGNPPPPPPPDTNAILTQILAQQANMMNAFLHHLQNPPQQNAPPPPPQHSKLAEFLRIRPPTFSSSNNPVDALDWLHAVGKKLDTVQCSDEEKVIFAAHQLQGPASLWWDHFQATQPEGQPITWARFTAAFRRTHVPAGVVALKKREFRELKQGNRSVMEYLHEFNNLARYAPEDVREDEEKQEKFLAGMDPELSVRLVSGDYPDFQRLVDKSIRLEAKHKELESHKRRLANFRNQQGANQRVRYTNPYPGGSSSQQQQQQQNQQGTRAPRPPTPTVQPVQGRRDASGPQRLCFNCFEPGHFADKCPKPRRQQGQAPPRSNNGGKDVIRGRVNHVTAEDVLTTPDVIVGTFPVHSIPATILFDSGASHSFISVPFVEKNQLGVERLRNPLLITTPGGVMTAKYYSPAVPIEIQGIPFPSDLILLDTKNLDVILGMNWLAQFQGVVDCARRTVTLYRGPEQPVVFFAPPTSVRSSELHQIGLSEIPIVREFGDVFPEELPGMPPKREIEFRIDLAPGTTPLYKRPYRMAANELAEVKKQLEELKEKGYIRPSTSPWGAPVIFVEKKDKTKRMCVDYRALNEVTIKNKYPLPRIDDLFDQLKGATVFSKIDLRSGYHQLRIREEDIPKTAFTTRYGLYEFTVMSFGLTNAPAFFMNLMNKVFMEYLDKFVVVFIDDILIYSQSEEDHQHHLRLVLGKLREHQLYAKLSKCEFWLSEVKFLGHVISAKGVAVDPETVTAVTDWKQPKTVTQIRSFLGLAGYYRRFIENFSKIARPMTQLLKKEEKFVWSPQCEKAFQTLKQKLVSSPVLILPDTRKDFMVYCDASRQGLGCVLMQDGHVVAYASRQLRPHEGNYPTHDLELAAVVHALKIWRHYLIGNRCEIYTDHKSLKYIFTQSDLNLRQRRWLELIKDYDVGIHYHPGKANVVADALSRKSHCNTLNVRGIPPELSQQMEALNLNIVGRGFLAALEAKPTLLDQIREAQKNDPDMHGLLKNMKQGKAAGFTEGEHGTLWNGKRVCVPDSRELKQLILQEAHESPYSIHPGSTKMYLDLKEKYWWVSMKREIAEFVALCDVCQRVKAEHQRPAGLLQPLQVPEWKWDEIGMDFITGLPKTQGGYDSIWVIVDRLTKVARFIPVKTTYGGNKLAELYFARIVSLHGVPKKIVSDRGSQFTSHFWKKLQEELGTRLNFSTAYHPQTDGQTERLNQILEDMLRACVLDFGKTWDKSLPYAEFSYNNSYQASIQMAPYEALYGRKCRTPLLWDQVGESQVFGTDILREAEAKVRIIRDNLKVAQSRQKSYADNRRRDLEFAVDDFVYLRVTPLRGVHRFQTKGKLAPRYVGPFRIIARRGEVAYQLELPASLGNVHDVFHVSQLKKCLRVPSEQANSEQIEVREDLTYVERPVKILDTMERRTRNRVIRFCKVQWSNHAEEEATWEREDELKAAHPDLFASSSESRGRDSV

SEQ ID NO: 107817 - protein, 98 aa, Oryza sativa
  Clone ID: PAT_MRT4530_12131C.1.pep
DAWADAWADAWVRNIIPPTPSIIPSGSEPGFLREGEGFEIKKAGWGLDPWLGRWRWHRDGFRGGEKTGGWSRGGIHQPEWLPGGVLMGGKFWIRVSYL

SEQ ID NO: 107818 - protein, 475 aa, Oryza sativa
  Clone ID: PAT_MRT4530_12132C.1.pep
MVRASTAISAGRVVVVAGAAALVVVLLCAAPAPAAVEAVPAGAEVSEFPGFDGDLPSKHYAGYITVGHQPLKRHMYYYFATSERNSTTDPVIIWINGGPACSGFSAFLHSIGPLKIEGPMIHARDEPRTKLNPFSWTKMSSVLLVDSPAGVGYSYSENEDDYVTNDTSRVLDLYDFLSKWFSEYLEFLSNPFYIAGCSYSGVIVPVLAQEILKRNEDNGRIKINFKGYSLCNPAVDVEIENNAFVPYAFRMGLISDELYQNLVSTCNGKYWNNKGPSCLANLEQFHKQISGINMEHILCPPCRYQMGITKEANEEYDFGQMFELLSESSEYGLECNNQELVLEKLFDTKSSREKLHAKPIEILQKWKRCPNFIQYTRDIPTLTEYHLNEFFQCSGDHALLVPFSATLEWLKTLNYKEIEKWHPWFVEKQIAGYSVRYENNILFATIKGAGHVPSDYLPFEVFVAYQRWIDGSDSL

SEQ ID NO: 107819 - protein, 927 aa, Oryza sativa
  unsure (1)..(927): unsure at all Xaa locations
  Clone ID: PAT_MRT4530_12133C.1.pep
MRCCSPSMVTTRRSAVTGDGNQPEGSNHNNHGSPPPPPPPPPPPPPDTNAILTQILAQQANMMAAFLHHIQNPPQHNAPPPPPQHSKLAEFLRIRPPTFSSSNNPVDALDWLHAVGKKLDTVQCSDEEKVVFAAHQLQGPASLWWDHFQATQPEGQPITWARFTAAFRRTHVPAGVMALKKREFRELKQGNRSVMEYLHEFNNLARYAPEDVRENEEKQEKFLAGMDPELSVRLVSGDYPDFQRLVDKSIRLEAKHKELESHKRRLANFRNQQGANQRIRYTNPYPGGSSSQQQQQQQQPCSAPRPQFVVRVPQPQQQQSQQGTRAPRPPTPAVQSGQGRRDVQGPQRLCFNCFEPGHFADKCPKPRRQQGQAPPRSNNGGKDVIRGQVNHVTAEDVLTTPDVIVGTFLIHSIPATILFDSGASHSFISVPFVGRNQLGVERLRNPLLITTPGGVMTAKYYSPAVPIEIQGIPFPSDLILLDTKNLDVILGMNWLAQFQGVVDCARRTVTLYRGPEQPVVFFAPPTSVSSSELHQIGLSEIPIVREFGDVFPEELPGMPPKREIEFRIDLAPGTTPLYKRPYRMAANELAEVKKQLEELKEKGYIRPSTSPWGSPVIFVEKKDKTKRMCVDYRALNEVTIKNKYPLPWIDDLFDQLKGATVFSKIDLRSRYHXLRIREEDIPKTAFTTXYGLYEFTVMSFGLTNAPAFFMNLMNKVFMEYLDKFVVVFIDDILVYSQSEEDHQHHLRLVLGKLREHQLYAKLSKCEFWLSEVKFLGHVISAKGVAVDPETVTAVTDWKQPKTVTQIRSFLGLAGYYRRFIENFSKIARPMTQLLKKEEKFVWSPQCEKAFQTLKEKLVSSPVLILPDTRKDFMVYCDASRQGLGCVLMQDGHVVAYASRQLRPHEGNFPTERSIKATQIPAKITVSA

SEQ ID NO: 107820 - protein, 410 aa, Oryza sativa
  Clone ID: PAT_MRT4530_12134C.1.pep
METFTFLKFLRGGAVAGNKGGAVAATTIAASACEDGGGGGGGGGGGGEVDDDASFFDLEFAVPGDESAASDAEEERVEFNFSVAGDVASGGEVVTVDDAVAVAPGGECGEAKVVELVSEAAAPPASFLRPATKFRVLLLKLRKPKVPVPAECNGGGGSPAPKTNRFLIKFRVDDAPFVSLFTRDNSSRTSDAGAGAGAARPAVQALQTPEAAAITAEERRFAKEMLLKYLNKIKPLYVKVSRRYGERLRFASASEGEETDLEPDPSPSPSPSPSPAPTQPPTAAAAAAVAPAPPQPVVVACGVRAPRASVPAGLKQVCKRLGKSRSASSAVAAAPSPSLPPPPSTAGQQPQRRDDSLLQLQDGIQSAIAHCKRSFNASKGSESPLLRSMSDTRDGGRADTKDGGGGDGGA

SEQ ID NO: 107821 - protein, 93 aa, Oryza sativa
  Clone ID: PAT_MRT4530_12135C.1.pep
MSISTGPPMTGNENVVATNQGDSMSKNPPAGTENGASTTSELEKDSDAAKPCRSDMNCEPTKMTSEATRSATTTTITTIANDRCQTIPVEDVA

SEQ ID NO: 107822 - protein, 1777 aa, Oryza sativa
  unsure (1)..(1777): unsure at all Xaa locations
  Clone ID: PAT_MRT4530_12136C.1.pep
MSSGANEGYTSCGPVVEMSWHRAGVLLLGAQSCLPVPGVPAVGGIGSMYTSDQSIIYSNSRALGYGQAEQCTQMAGSVSRRGLDMTGFVLELRGMCVVLGYPHGVDYQGRPLPEQEGDDAEPHAAWEVTAVILTGSPERTSLAVTAGGDSFSAACQSAALLAICTLHQRYPDELQHSPYRYHPRRGGARDYATFRDASSEDDATIMHLARMVEAYDAARIDFHQMVRRGMVENNLKILELRQENLQLKKDLDAVEAQLHQLKIAQGEVCRPKRRRVCRSQKITARKSTSRPELVRQSLAWTCFVENPRAEPAPVVPQEGEASGVGSTEDALLLTFHXMTRRSASTGDGNQPEGSNHNHQGSPPPPPPPPPPPPPDTNAILTQILAQQANMMIAFLHHLQNPPQHNAPPPPPQHSKLAEFLRIRPPTFFSSNNPVDALDWLHAVGKKLDTVQCSDEEKVIFAAHQLQGPASLWWDHFQATQPEGQPITWARFTAAFRRTHVPAGVVALKKREFRELKQGNRSVMEYLHEFNNLARYAPEDVRXDEEKQEKFLAGMDPELSVRLVSGDYPDFQRLVDKSIRLEAKHKELESHKRRLANFRNQQGANQRVRYTNPYPGGSSSQQQPRSAPRPQFVVRVPQPQQQQSQQGTRAPRPPTPTVQPGQGRRDAQGPQRLCFNCFEPGHFADKCPKPRRQQGQAPPRSNNGGKDVIRGRVNHVTAEDVLTTPDVIVGTFLIHSIPATILFDSGASHSFISVPFVGRNQLGVERLRNPLLITTPGGVMTAKYYSPAVPIEIQGIPFPSDLILLDTKNLDVILGMNWLAQFQGVVDCARRTVTLYRGPEQPVVFFAPPTSVRSSELHQIVLSEIPIVREFGDVFPEELPGMPPKREIEFRIDLAPGTTPLYKRPYRMAANELAEFKKQLEELKEKGYIRPSTSPWGAPVIFVEKKDKTKRMCVDYRALNEVTIKNKYPLPRIDDLFDXLKSATVFSKIDLRSGNHQLRIREEDIPKTAFTTRYGLYEFTVMSFGLTNAPAFFMNLMNKVFMEYLDKFVVVFIDDILIYSQSEEDHQHHLRLVLGKLREHQLYAKLSKCEFWLSEVKFLGHVISAKGVAMDPETVTAVTDWKQPKTVTQVRSFLGLAGYYRRFIENFSKIARPMTQLLKKEEKFVWSPQCEKAFQTLKEKLVSSLVLVLPDTRKDFMVYCDASRQGLGCVLMQDGHVVAYASRQLRPHEGNYPTHDLELAAVVHALKIWRHYLIGNRCEIYTDHKSLKYIFTQSDLNLRQRRWLELIKDYDVGIHYHPGKANVVADALSRKSHCNTLNVRGIPPELNQQMEALNLSIVGRGFLATLEAKPTLLDQIREAQKNDPDMRGLLKNMKQGKAAGFTEDEHGALWNGNRRVKAEHQRPAGLLQPLQVPEWKWDEIGMDFITGLPKTQGGYDSIWVVVDRLTKVARFIPVKTTYGGNKLAELYFARIVSLHGVPKKIVSDRGSQFTSHFWKKLQEELGTRLNFSTAYHPQTDGQTERLNQILEDMLRACVLDFGKTWDKSLPYAEFSYNNSYQASIQMAPYEALYGRKCRTPLLWDQVGESQVFGTDILREAEAKVRTIRDNLKVAQPRQKSYADNRRRNLEFAVDDFVYLRITPLRGVHRFRTKGKLAPRFVGPFRIIARRGEVAYQLELPASLGNVHDVFHVSQLKKCLRVPSEQADSEQIEVREDLTYVERPVKILDTMERRTRNRVIRFCKVQWSNHAEEEATWEREDELKAAHPDLFASSSESRGRDSV

SEQ ID NO: 107823 - protein, 1866 aa, Oryza sativa
  unsure (1)..(1866): unsure at all Xaa locations
  Clone ID: PAT_MRT4530_12137C.1.pep
MEMDEVGGRWTXSRTNEGYTSCGPVVEMSWHRAGVLLLGAXFCLPVPGVPAVGGVGSMYTSDQSIIYSNSRAPGYGQAEQCTQMASSINRRGLDLTGFVLELRGMCVVLGYPHGVDYQGKQLLEQEGDDAEPHAAWEVTAVILTGSPERTSLAVTAGGDSFSVACQNAALLAIGTLHQRYPDELQHSPYRYHPRRGGARDYATFRDASLEDDATIVHLARMVEAYDAARIDFHQMVRRGLVENNMKILELRQENLQLKMDLDTVDAQLRQLKIAQGEVCRPKRRRVCRSLKITARKSTSRPELVRQSLAWTCFVETPRAESAPVVPQEEGASGVGXHGGCAAAHLPSWLVAAVDEQLVGLRMVTTRRSAATGECSHPEGSNHNNHGSPPPPPSPPPPPPPDTNAILTQILAXQANMMAAFLHHIQNPPQHNAPPPPPQHSKLAEFLRIRPPTFSSSNNPVDALDWLHAVGKKLDTVQCSDEEKVIFGAHQLQGPASLWWDHFQATQPEGQPITWARFTAAFRRTHVPAGVMALKKREFRELKQGNRSVMEYLHEFNNLARYAPEDVREDEEKQEKFLAGMDPELSVRLVSGDYPDFQRLVDKSIRLEAKHKELESHKRRLANFRNQQGANQRVRYTNPYPGXSSSQQQQQQQPRSVPRPQFVVRVPQPQQQQSQQGTRAPRPPTLAVQPGQVRRDVQGQQRLCFNCFEPGHFADKCPKPRRQQGQAPPRSNNGGKDVIRGRVNHVTAEDVLTTPDVIVGTFLIHSIPATILFDSGASHSFISMPFVGRNQLGVERLRNPLLITTPGGVMTAKXYSPAVPIEIQGIPFPSDLILLDTKNLDVILGMNWLAQFQGVVDCARRTVTLYRGPEQPVVFFAPPTSVGSSELHQIGMSEIPIVREFGDMFPEELPGMPPKREIEFRIDLAPGTTPQYKRPYRMASNELAEVKKQLGELKEKGYIRPSTSPWGAPVIFVEKKDMTKRMCVDNRALNEVTIKNKYPLPRIDDLFDQLKGATVFSKIDLRSGYHQLRIREEDIPKTAFTTRYGLYEFTVMSFGLTNAPAFFMNLMNKVFMEYLDKFVVVFIDDILVYSQSEEDHQQHLRLVLGKLREHQLYAKLSKCEFWLSEVKFLGHMISAKGVAVDPETVTAVTDWKQPKTVTQVRSFLGLAEYYRRFIKNFSKIARPMTQLLKKEEKFVWSPQCEKAFQTLKEKLVSSPVLILPDTRKDFLVYCDASRQGLGCVLMQEGHMVAYASQQLRPHEGNYPTHDLELAAVVHALKIWRHYLIGNRCEIYTDHKSLKYIFTQSDLNLRQRRWLELIKDXDVGIHYHPGKTNVVADALSRKSRCNTLGVRGIPPKLHQQMEALNLSIVGRGFLATLEAKPTLLDQIREAQKNDPDMHGILKNMKQGKAAGFTEDEHGTLWNGNRVCVPDDRELKQLILQEAHESPYSIHPGSTKMYLDLKEKYWWVSMKREIAEFVALYDVCQRVKAEHQRPAGLLQPLQVLEWKWDEIGMDFITGLPKTQGGYDSIWVVVDRLTKVARFIPVKTTYGGNKLAELYFARIVSLHGVPKKIVSDRGSQFTSHFWKKLQEELGTRLNFSTAYHPQTDGQTECLNQILEDMLRACILDFGKTWDKSLPYAEFSYNNSYQASIQMAPYEALYGRKCRTPLLXDQVGESQVFGTDILREAEAKVRTIRDNLKVAQSRQESYADNRRRNLEFAVDDFVYLRVTPLRGVHRFQTKGKLASRFVGPFRIIARRGEVAYQLELPASLGNVHDVFHVSQLKKCLRVLSEQADSEQIEVRENLTYMERPVKILDTMERRTRNRVIRFCKVQWSNHAEEEATWERENELKAAHPDLFASSSESRGRDSV

SEQ ID NO: 107824 - protein, 1786 aa, Oryza sativa
  Clone ID: PAT_MRT4530_12138C.1.pep
MDEVGGRWTFSRANEGYTSCGPMAGSVTRRGLDMTGFVLELRGMCVVLGYPHGVDYQARPLPEQEGEDAEPHAGWEVTAVILSGSPERTSLAVTAGGDSSPAACQNAALLAIGTLHQRYPDELQHSPYRYHPRRGGARDFATFRDASLEDDATVVHLARMVEAYDAARIDFHQMVRRGMVENNLKILELRQENLQLKKDLDALEAQLHQLKIAQGEDSRPKRRRVCRSQKITARKSTSRPELVRQSLAWTCFVETPRAEPAPVVPQEGEASGVGSTEDALLLTFRPGPSQRRNVSTGEGNQPEGSNPNPQGNPPPPPPPDTNAILTQILAQQANMMTAFLHHLQNPPQQNAPPPPPQHSKLAEFLRIRPPTFSSSNNPVDALDWLHAVGKKLDTVQCSDEEKVIFAAHQLQGPASLWWDHFQATQPEGQPITWARFTAAFRRTHVPAGVVALKKREFRELKQGNRSVMEYLHEFNSLARYAPEDVREDEEKQEKFLAGMDPELSVRLVSGDYPDFQRLVDKSIRLEAKHKELETHKRRLANFRNQQGANQRVRYTNPYPGGSSSQQQQQQQQPRSAPRPQFVVRVPQPQQQQSQQGTRVARPPTPVVQPVQGRRDAQGQQRLCFNCFEPGHFADKCPKPRRQQGQAPPRSNNGGKDVIRGRVNHVTAEDVLTTPDVIVGTFLVHSIPATILFDSGASHSFISVPFVGKNQLGVERLRNPLLITTPGGVMTAKYYSPAVPIEIQGIPFPSDLILLDTKNLDVILGMNWLAQFQGVVDCARRTVTLYRGPEQPVVFFAPPTSVRSSKLHQIELSEIPIVREFGDVFPEELPGMPPKREIEFRIDLAPGTTPLHKRPYRMAANELAEVKKQLEELKEKGYIRPSTSPWGAPVIFVEKKDKTKRMCVDYRALNEVTIKNKYPLPRIDDLFDQLKGATVFSKIDLRSGYHQLRIREEDIPKTAFTTRYGLYEFTVMSFGLTNAPAFFMNLMNKVFMEYLDKFVVVFIDDILIYSQSEEDHQHHLRLVLGKLREHQLYAKLSKCEFWLSEVKFLGHVISAKGVAVDPETVTAVTEWKQPKTVTQIRSFLGLAGYYRRFIENFSKIARPMTQLLKKEEKFVWSPQCEKAFQTLKEKLVSSPVLILPDTRKDFMVYCDASRQGLGCVLMQDGHVVAYASRQLRPHEGNYPTHDLELAAVVHALKIWRHYLIGNRCEIYTDHKSLKYIFTQSDLNLRQRRWLELIKDYDVGIHYHPGKANVVADALSRKSHCNTLNVRGIPPELNQQMEALNLSIVGRGFLAALEAKPTLLDQIREAQKNDPDMHGLLKNMRQGKAAGFTEDEHGTLWNGKRVCVPDSRELKQLILQEAHESPYSIHPGSTKMYLDLKEKYWWVSMKREIAEFVALCDVCQRVKAEHQRPAGLLQPLQVPEWKWDEIGMDFITGLPKTQGGYDSIWVIVDRLTKVARFIPVKTTYGGNKLAELYFARIVSLHGIPKKIVSDRGSQFTSHFWKKLQEELGTRLNFSTAYHPQTDGQTERLNQILEDMLRACVLDFGKTWDKSLPYAEFSYNNSYQASIQMAPYEALYGRKCRTPLLWDQVGESQVFGTDILREAEAKVRIIRDNLKVAQSRQKSYADNRRRDLEFAVDDFVYLRVTPLRGVHRFQTKGKLAPRYVGPFRIIARRGEVAYQLELPASLGNVHDVFHVSQLKRCLRVPSEQADSEQIEVREDLTYVERPVKILDTRERRTRNRVIRFCKVQWSNHAEEEATWEREDELKAAHPDLFASSSESRGRDSV

SEQ ID NO: 107825 - protein, 59 aa, Oryza sativa
  unsure (1)..(59): unsure at all Xaa locations
  Clone ID: PAT_MRT4530_12139C.1.pep
EHPSLSQPRSPCVHPGWQTPDSRSTRRYRRPPEHRLAPNCAVGVERPITAPSRXASRTR

SEQ ID NO: 107826 - protein, 109 aa, Oryza sativa
  Clone ID: PAT_MRT4530_1213C.1.pep
MLDEQVDTQDDLQWVRNKLNARGAKPIDFVQTAASYDPSCQASNPSITVHCRNPQTESFLQLLNLPYLLDSSNSYGVSRNESSSQTGQALDSDDIELPDDEDDPADDDD

SEQ ID NO: 107827 - protein, 1731 aa, Oryza sativa
  unsure (1)..(1731): unsure at all Xaa locations
  Clone ID: PAT_MRT4530_12140C.1.pep
MSWHRAGVLLLGAQSCLPVPGVPAMAGSVTRRGLDMTGFVLELRGMCVARPLPEQEGDDAEPHAGWEVTAVILSGSPERTSLAVTAGGDSFPAACQNAALLAIGTLHQRYPDELQHSPYRYHPRRGGARDYATFRDASSEDDATIVHLARMVEAYDAARIDFHQMVRRGMVENNMKILELRQENLQLKKDLDAVEAQLHQLKIAQGEVCRPKRRRVCRSQKITARKSTSRPELVRQSLAWTCFVETPRAEPAPVVPQEGEASGVGSTEDALLLTFRSGPSQRRNAATGDGNQPEGSNHNHQGNPPPPPPPPPPPPPDTNAILTQILAQQANMMTAFLHHLQNPPQHNAPPPPPQHSKLAEFLRIRPPTFSSSNNPVDALDWLHAVGKKLDTVQCSDEEKVIFAAHQLQGPASLWWDHCQATQPEGQPITWARFTAAFRRTHVPAGVVALKKREFRELKQGNRSVMEYLHEFNNLARYAPEDVREDEEKQEKFLAGMDPELSVRLVSGDYPDFQRLVDKSIRLEAKHKELESHKRRLANFRNQQGANQRVRYTNPYPGESSSQQQQQQQQPRSAPRPQFVVRVPQPQQQQSQQGTRAPRPPTPTVQPGQGRRDAQGQQRLCFNCFEPGHFADKXSKPRRQQGQAPPRSNNGGKDVIRGRVNHVTAEDVLTTPDVIVGTFLIHSIPATILFDSGASHSFISVPFVGRNQLGVERLRNPLLITTPGGVLTAKYYSPAVPIEIQGIPFPSDLILLDTKNLDVILGMNWLAQFQGVVDCARRTVTLYRGPEQPVVFFAPPTSVSSSELHQVGLSEIPIVREFGDVFPEELPGMPPKRETEFRIDLAPGTTPLHKRPYRMAANELAEVKKQLEELKEKGYIRPSTSPWDAPVIFVEKKDKTKRMCVDYRALNEVTIKNKYPLPRIDDLFDQLKGATVFSKIDLRSGYHQLRIREEDIPKTAFTTRYGLYEFTVMSFGLTNAPAFFMNLMNKVFMEYLDKFVVVFIDDILIYSQSEEDHQHHLRLVLGKLREHQLYAKLSKCEFWLSEVKFLGHVISAKGVAVDPETVTAVTDWKQPKTVTQIRSFLGLAGYYRRFIENFSKIARPMTQLLKKEEKFVWSPQCEKAFQTLKEKLVSSPVLILPDTRKDFMVYCDASRQGLGCVLMQDGHVVAYASRQLRPHEGNYPTHDLELAAVVHALKIWRHYLIGNRCEIYTDHKSLKYIFTQSDLNLRQRRWLELIKDYDVGIHYHPGKANVVADALSRKSYCNTLNVRGIPPELNQQMEALNLSIVGRGFLAALEAKPTLLDQIREAQKNDPDMHGLLKNMKQGKAAGFTEDEHGTLWNGKREKYWWVSMKREIAEFVALCDVCQRVKAEHQRPAGLLQPLQVPEWKWDEIGMDFITGLPKTQGGYDSIWVIVDRLTKVARFIPVKTTYGGNKLAELYFARIVSLHGIPKKIVSDRGSQFTSHFWKKLQEELGTRLNFSTAYHPQTDGQTERLNQILEDMLRACVLDFGKTWDKSLPYAEFSYNNSYQASIQMAPYEALYGRKCRTPLLWDQVGESQVFGTDILREAEAKVRIIRDNLKVAQSRQKSYADNRRRDLEFAVDDFVYLRVTPLRGVHRFRTKGKLAPRYVGPFRITARRGEVAYQLELPASLGNVHDVFHVSQLKKCLRVPSEQADSEQIEVREDLTYVERPVKVLDTMERRTRNRVIRFCKVQWSNHAEEEATWEREDEMKATH

SEQ ID NO: 107828 - protein, 1866 aa, Oryza sativa
  unsure (1)..(1866): unsure at all Xaa locations
  Clone ID: PAT_MRT4530_12141C.1.pep
MDEVGGRWTFSRANEGYTSCGPVVEMSNSXRVGALLLGAQFRLPVPGVPAVGGIGSMYTSDQSIIYSNSRALGYGQAEQCTQMAGSVTRRGLDMTGFVLELRGMCVVLGYPHGVDYQARPLPDQEGDDAEPHAGWEVTAVILSGSPERTSLAVTAGGDSFPAACQNAALLAIGTLHQRYPDELQHSPYRYHPRRGGARDYATFRDASSEDDATIVHLARMVEAYDAARIDFHQMVRRGMIENNMKILELRQENLQLKKDLDAVEAQLHQLKIAQGEDCRPKRRRVCRSQKITARKSTSRPELVRQSLAWTCFVETPRAEPAPVVPQEGEASGVGXHGGCAVAHLPSWPVAAVDEQLVGLRMVTTRRNAVTGEGNQPEGSNHNHQGNPPPPPPPPPPPPPDTNAILTQILAQQANMMTAFLHHLQNPPQHNAPPPPPQHSKLAEFLRIRPPTFSSSNNPVDALDWLHAVGKKLDTVQCSDEEKVIFAAHQLQGPASLWWDHFQATQPEGQPITWARFTAAFRRTHVPAGVVALKKREFRELKQGNRSVMEYLHEFNNLARYAPEDVREDEEKQEKFLAGMDPELSVRLVSGDYPDFQRLVDKSIRLEAKHKELESHKRRLANFRNQQGANQRVRYTNPYPRGSSSQQQQQQQQPRSAPRPQFVVRVPQPQQQQNQQGTRAPRPPTPAVQPVQGRRDASGPQRLCFNCFEPGHFADKCPKPRRQQGQAPPRSNNGGKDVIRGRVNHVTAEDVLTTPDVIVGTFLVHSIPATILFDSGASHSFISVPFVGRNQLGVERLRNPLLITTPGGVMTAKYYSPAVPIEIQGIPFPSDLILLDTQNLDVILGMNWLAQFQGVVDCARRTVTLYRGPEQPVVSFASPTSVRSSELHQIGLSEIPIVKEFGDVFPEELPGMPPKREIEFRIDLAPGTTPLHKRPYRMAANELAEVKKQLEGLKEKGYIRPSTSPWGAPVIFVEKKDKTKRMCVDYRALNEVTIKNKYPLPRIDDLFDQLKGATVFSKIDLRSGYHQLRIREEDIPKTAFTTRYGLYEFTVMSFGLTNAPAFFMNLMNKVFMEYLDKFVVAFIDDILIYSQSEEDHQHHLRLVLGKLREHQLYAKLSKCEFWMSEVKFLGHVISAKGVAVDPETVTAVTDWKQPKTVTQIRSFLGLAGYYRRFIENFSKIAQPMTQLLKKEEKFLWSPQCEKAFQTLKEKLVSSPVLILPDTRKDFMVYCDASRQGLGCVLMQDGHVVAYASRQLRPHEGNYPTHDLELAAVVHALKIWRHYLIGNRCEIYTDHKSLKYIFTQSDLNLRQRRWLELIKDYDVGIHYHPGKANVVADALSRKSHCNTLNVRGIPPELNQQMEALNLSIVGRGFLAALEAKPTLLDQIREAQKNDPDMHGLLKNMKQGKAAGFTEDEHGTLWNGKRVCVPDNRELKQLILQEAHESPYSIHPGSTKMYLDLKEKYWWVSMKREIAEFVALCDVCQRVKAEHQRPAGLLQPLQVPEWKWDEIGMDFITGLPKTQGGYDSIWVVVDRLTKVARFIPVKTTYGGNKLAELYFARIVSLHGIPKKIVSDRGSQFTSHFWKKLQEELGTRLNFSTAYHPQTDGQTERLNQILEDMLRACVLDFGKTWDKSLPYAEFSYNNSYQASIQMAPYEALYGRKCRTPLLWDQVGESQVFGTDILREAEAKVRTIRDNLKVAQSRQKSYADNRRRDLEFAVDDFVYLRVTPLQGVHRFQTKGKLAPRYVGPFRIIARRGEVAYQLELPASLGNVHDVFHVLQLKKCLRVPSEQADSEQIEVREDLTYVERPVKILHTMERRTRNRVIRFCKVQWSNHAEEEATWEREDELKAAHPDLFASSSESRGRDSV

SEQ ID NO: 107829 - protein, 1825 aa, Oryza sativa
  Clone ID: PAT_MRT4530_12142C.1.pep
MSWHRAGVLLLGAQSCLPVPGVPAVGGIGSVLLSMARMGWKLCHVFRLYTVVMAGSVTRRGLGMTGFVLELRGMCVALGYPHGVDYQARPLPEQEGDDAEPRAAWEVTAVILAGSSERTSLTVTAGGDSFPAACQSAALLAIGTLHQRYPDELQHSPYRYHPRRGGARDYATFRDASSEDDATIVHLARMVEAYDAARIDFHQMVRRGMVENNMKILELRQENLQLKKDLDAVEAQLHQLKIAQGEVCRPKRRRVCRSQKITARKSTSRPELVRQSLAWTCFVETPRAEPAPVVPQEGEASGVGSTEALSVAGSVWGFQMVTTRRNAVTGDGNQPEGSNHNHQGNPPPPPPPPPPPPPDTNAILTQILAQQANMMTAFLHHLQNPPQHNAPPPPPQHSKLAEFLRIRPPTFSSSNNPVDALDWLHAVGKKLDTVQCSDEEKVIFAAHQLQGPASLWWDHFQATQPEGQPITWARFTAAFRRTHVPAGVVALKKREFRELKQGNRSVMEYLHEFNNLARYAPEDVREDEEKQEKFLAGMDPELSVRLVSGDYPDFQRLVDKSIRLEAKHKELESHKRRLANFRNQQGANQRVRYTNPYPGGSSSQQQQQQQQPRSAPRPQFVVRVPQPQQQQGQQGTRAPRPPTPTVQPGQGRRDAQGQQRLCFNLFEPGHFADKCPKPRGQQGQAPSRFNNGGKDVIRGRVNHVTAENVLTTPDVIVGTFLVHSIPATILFDSGASHSFISVSFVGRNQLGVERLRNPLLITTPGGVMTAKYYSPAVPIEIQGIPFPSDLILLDTKNLDVILGMNWLAQFQGVVDCARRTVTLYRGPEQPVVFFAPPTSVRSSELHQIGLSEIPIVREFGDVFPEELPGMPPKREIEFRIDLAPGTTPLHKRPYRMAANELAEVKKQLEELKEKGYIRPSTSPWGAPMIFVEKKDKTKRMCVDYRALNEVTIKNKYPLPRIDDLFDQLKGATVFSKIDLRSGYHQLRIREEDIPKTAFTTRYGLYEFTVMSFGLTNAPAFFMNLMNKVFMEYLDKFVVVFIDDILIYSQSEEDHQHHLRLVLGKLREHQLYAKLSKREFWLSEVKFLGHVISAKGVAVDPETVTAVTDWKQPKTVTQVRSFLGLAGYYRRFIENFSKIARPMTQLLKKEEKFVWSPQCEKAFQTLKEKLVSSPVLILPDTRKDFMVYCDASRQGLGCVLMQDGHVVAYASRQLRPHEGNYPTHDLELAAVIHDLKIWRHYLIGNRCEIYTDHKSLKYIFTQSDLNLRQRRWLELIKDYDVGIHYHPGKANVVADALSRKSHCNTLNVRSIPPELNQQMEALNLSIVSRGFLAALEAKPTLLDQIREAQKNDPDMHGLLKNMKQGKAAGFTEDEHGTLWNGNRVCVPDNRELKQLILQEAHESPYSIHPGSTKMYLDLKEKYWWVSMKREIAEFVALRDVCQRVKAEHQRPAGLLQPLQVPEWKWDEIGMDFITGLPKTQGGYDSIWVVVDRLTKVARFIPVKTTYGGNKLAELYFARIVSLHGVPKKIVSDRGSQFTSHFWKKLQEELGTRLNFSTAYHPQTDGQTERLNQILEDMLRACVLYFGKTWDKSLPYAEFSYNNSYQASIQMAPYEALYGRKCRTPLLWDQVGESQVFGTDILREAEAKVRIIRDNLKVAQSRQKSYADNRRRDLEFAVDDFVYLRVTPLRGVHRFQTKGKLAPRYVGPFRIIARRGEVAYQLELPASLGNVHDVFHVSQLKKCLRVPSEQADSEQIEVREDLTYVERPVKILDTMERRTRNRVIRFCKVQWSNHAEEKATWEREDELKAAHPDLFASSSESRGRDSV

SEQ ID NO: 107830 - protein, 113 aa, Oryza sativa
  unsure (1)..(113): unsure at all Xaa locations
  Clone ID: PAT_MRT4530_12143C.1.pep
KRKNKKKGERKRKKKEDKIKSKKKXKRKKKINSKKKNKRRKEKKKRERIRDREEKGRXIINRQKKKRRERKKETKREKRKENEKDKIYKKTSKELNKQGHDPTADYRSCQSPS

SEQ ID NO: 107831 - protein, 118 aa, Oryza sativa
  Clone ID: PAT_MRT4530_12144C.1.pep
MRGDGAYTGMTRENERERANGLDSPEGVRRWRIAAAATGGEKRGKRRRGHEGPIPGDAGQARQALSAAATGRDSSSHMYEVSLMAQSLLPVIILLMSASLQESPTQARNAPLGPSNTS

SEQ ID NO: 107832 - protein, 150 aa, Oryza sativa
  Clone ID: PAT_MRT4530_12145C.1.pep
PKKILEHQSIKGKIDQYYKAILTGDLTRNSISNRRNYYKTTPIAQGNQVLIIILDESTQTICRIGWFVDASIASVLDALDLVPRLLARVADHLDALHHRPLEVLQLLGPLLHLQIESAHPLPDRRRRRKRNLISSCYWAWRLCRAFEPAG

SEQ ID NO: 107833 - protein, 95 aa, Oryza sativa
  unsure (1)..(95): unsure at all Xaa locations
  Clone ID: PAT_MRT4530_12146C.1.pep
PTRSATPSPTPSKKGLLILTGGNTLSRNLTLLGLGCNLIVXCNQLKKLXFFGFQLFFLNQLPFGVASNIVVTGIGLVIVTRFLRRRRRRRSSPPP

SEQ ID NO: 107834 - protein, 770 aa, Oryza sativa
  Clone ID: PAT_MRT4530_12147C.1.pep
MNLSRPIWWAHTSPDFVQFGVATLTCGPHFYYGPHVSDTTASCTRVRRSRLREFARDRFRDPFNPDLRRREPRRRRRRRAPRRRRKAMMPVRTYHHHHHHNNSNNHRLRRIIPRVLLAVFAIYAVSFAAYLLRHQSPHPHPHPAADPERDAVDAAGGGGGGGAVDRVRVEAPSSQKPWPRLPSFLPWTSASVRPPPKHSCEGYFGNGFSRLVDVLPARGGGGGGWFRCHHSETLRSSICEGGRVRLDPGLIAMSRGGEPLDQVMGRAEEEELPKYEPGALQVEAAAKRTGPLVEAGFLDAYVPTGGIGMHTMRSLLDSGRVVPPGELHCSQWVEEPTLLVTRFEYANLFHTITDWYSAYVSSRVTDLPNRPNVVFVDGHCKAQLEQTWEALFSNVTYVKNFSGPVCFRHAILSPLGYETALFKGLSESFSCEGASAESLREKPDHQKTARLSEFGEMILASFDLLRDDILSSKTSNGLNVLFVRREDYLAHPRHSGKVESRLSNEKEVYDAIEGWAKGQKCKINVINGLFAHMNMKEQLRAIQEASVVIGAHGAGLTHLVSATPDTKVLEIISSMYRRPHFALISHWKSLEYHAINLPGSYARVTDVINELSNILKGGGQHKLRGRKRERKKKEWGGWLWARWFACLHASRRSTCLVAAAWGVKWAWLMMDASSLGIMPVSFSIYVGRRMELELAPVSAWLGGLDAVAWSGLWTAPRPSDAAVLPVVTGVLPQYMYSLGLMPLPIGKGVTFIDGGSNLEKRVLVDVMEKD

SEQ ID NO: 107835 - protein, 96 aa, Oryza sativa
  unsure (1)..(96): unsure at all Xaa locations
  Clone ID: PAT_MRT4530_12148C.1.pep
PTRPPTRPPGAVADAKRPSDEAASLMKNIYWKEFGLLAFVWMAFLVLQVTKNYTATCSSWYWILNLLQIPVSVGVTMYEALGLVSGKRXLFXKGNE

SEQ ID NO: 107836 - protein, 205 aa, Oryza sativa
  unsure (1)..(205): unsure at all Xaa locations
  Clone ID: PAT_MRT4530_12149C.1.pep
GVVFFFFFFFFFFFFGFFFFFFFFFFFFFFFPESNPPLFFWVKQKKPPTNGKGGGEKKGKEIIGRKEGRARGQGQKWGRKGRGPRGGGGQGGPRGGSRGRGKGRPAAPGKKACPAEGGAPTGARPCKAPTGPGGPQMAPPXPDGPENTGRHPGEPPGRPEGQPPGGPGHEGGGFHGALNRPGRSPPSLRKKGGGKHGHEKNGVWG

SEQ ID NO: 107837 - protein, 151 aa, Oryza sativa
  unsure (1)..(151): unsure at all Xaa locations
  Clone ID: PAT_MRT4530_1214C.1.pep
MVRPNPKTRLPVSPLAVMLRRRRATVSACAATTAXSDMRGDGDSSGRKHSDGGTSGVHDGSIEKCGDVCAAMVKPVHDHLLTAHFLDIKDLFDITCRKVFDMLKWVVAGFPLPCTAMAGGGHGASNAARQAMRRLPAQRRQELQGLPVRLV

SEQ ID NO: 107838 - protein, 136 aa, Oryza sativa
  Clone ID: PAT_MRT4530_12150C.1.pep
PSQNPRHLRPKNPRRRPAPPSSRGASSEHYSLHVAEPASQHCRLLALLAGDPVSLRHRRASWAAPFPWSHCSAPPPVEPTSAVVFSWSQWSALPPNISSMAISSLPVTAACRLLHTSPIVGILLLRLPLLCSLYSN

SEQ ID NO: 107839 - protein, 309 aa, Oryza sativa
  unsure (1)..(309): unsure at all Xaa locations
  Clone ID: PAT_MRT4530_12151C.1.pep
MPADARAAPPSCPFPTIRSHGAAVARSHAYDWLALLLLVAVDGLLNAIEPFHRFVGAGMMTDLRYPMKRNTVPIWAVPIVAVIGPMIVFTVVYFRRRNVYDLHHAVLGILFSVLITGVLTDAIKDAVGRPRPNFFWRCFPDGIAVFDNVTTGVICHGDASVIKEGHKSFPSGHTSWSFAGLGFLSWYLAGKITVFDRRGHVAKLCVVLAPLLVAAMVAISRVDDYWHHWQDVCTGGVLENRSCCHAPRLLQPWASGGLIIELXSAPSSIERGEARTQRSKPPNHWTPWKPVGEANEQGASKTNLVYIRP

SEQ ID NO: 107840 - protein, 115 aa, Oryza sativa
  Clone ID: PAT_MRT4530_12152C.1.pep
KIWVLFSVYVPMAGPGLFHLSRKIRKGSFFGPKDFFAPLGGYFCLPFLKPGPPPFRDSPPPFNFKNGWFFPNQDPVVCFYVFPAPIFGSFWNFPSPKKIPIFFFPIWGIKWANPS

SEQ ID NO: 107841 - protein, 801 aa, Oryza sativa
  Clone ID: PAT_MRT4530_12153C.1.pep
MPRRGASSASTSRGRRRPREEEEEEDEEEVVGDVASDDSADSDFVADTEEEEAADDEYDYASDGKDGAGPAAAAAAAPAAVAPPPPQPKRLQGGRKKGAGGHGKLPLPWEEWEEANEKWLDEREAAAKGEEPPDPEVPPAVAAGVPTAEPAPEVLLPLLRFQKEWLAWALAQEASPSRGGILADEMGMGKTIQGISLVITARRLRPPAPPPRRRAASSSQGQPKRWVGCTLVVCPVVAVIQWAQEIERHTAKDSVRVLVYHGGRRGAQKYDFNKYDFVITTYSTIEADYRKHIMPPKTRCCYCDKLFYPNKLKVHLRYYCGPDAQRTEKQAKQESRKWGSKKGTSKRRVQKKKNDSDGEDFEERDGGSGSQSRGQSPLHSVRWERIILDEAHFIKDRRCNTAKAIFALESEYKWALSGTPLQNRVGELYSLIRFLQIFPYSNYFCKDCNCEILDTLLKKQCDCGHSSVRHFCWWNKVTLRRDSFDKNEMEFYEALYTQSRTQFDSYVDAGTLMNNYAHIFDLLTRLRQAVDHPYLVAFSKTAELSDRSKNEGNENMESQCVPLTVDLTTRSSGEKVTPNLKGGKRSGILSRLQNLADFKTSTKIDALFLAYMFLLIELHNDVNGDVNDENTLVNLREEIRNMVEHDGSAKGIVFSQFTSFLDLIEFSLQKSGIKCVQLNGKMNIVEKGKAIDTFTNDPDCRIFLMSLKAGGVALNLTVASHVFLMDPWWNPAVESQAQDRIHRIGQFKPIRSMRFVIKDTVEERILQLQEKKRLVFEGTVGDSPEAMSKLTEADLKFLFQN

SEQ ID NO: 107842 - protein, 57 aa, Oryza sativa
  Clone ID: PAT_MRT4530_12154C.1.pep
TCQRNFQEEEEKRAASEERRKLIWENLERNASFRPVTGDIGFSVLPASAPLVAPPMT

SEQ ID NO: 107843 - protein, 173 aa, Oryza sativa
  Clone ID: PAT_MRT4530_12155C.1.pep
MSGHSGGNEVEERIGGRERRYQNHVRPLEPIRRLTNVGTARYRNADGRSLLQIHLRQSYTAVASRPFLHLHSPPASPLPKSPGQIRPPSTLGQRIWTRTATGISPRARGQANNDHNEDAAPRRRAQPAYAADPWVTVTSGWWADVGDAATSQMAAVAAIGQNLLTTLPWSPHY

SEQ ID NO: 107844 - protein, 1261 aa, Oryza sativa
  unsure (1)..(1261): unsure at all Xaa locations
  Clone ID: PAT_MRT4530_12156C.1.pep
MDISRTNEGYTSCGPVVEMSWHRAGVLLLGPQSCLPVPEVPAVGGVGSVLLSMARMGWKLCHVFRPYTVVVCDTWLHVRKIVTTGNNPTGVPDVRALILVPGGKAQHTQRQTRNSGRLGRRPQAQQQQNQQGTRAPRPPTPTVQPGQGRRDAQGQQRLCFNCFEPGHFADKCPKPRRQQGQAPPRPNNGGKDVIRGRVNHVTAEDVLTTPDVIVGTFLIHSIPATILFDSGASHSFISVPFVGKNQLGVERLRNPLLITTPGGVMIAKYYSPAVPIEIQGIPFPSDLILLDTKNLDVILGMNWEFGEVFPEELPGMPPKREIEFRIDLAPGTTPLHKRPYRMAANELAEVKKQLEELKEKGYIRPSTSPWGAPVIFVEKKDKTKRMCVDYRALNEVTIKNKYPLPRIDDLFDQLKGATVFSKIDLRSGYHQLRIREEDIPKTAFTTRYGLYEFTVMSFGLTNAPAFFMNLMNKVFMEYLDKFVVVFIDDILIYSQSEEDHQHHLRLVLGKLREHQLYAKLSKCEFWLSEVKFLGHVISAKGVAVDPETVTAVTDWKPPKTVTQVRSFLGLEGYYRRFIENFSKIARPMTQLLKKEEKFVWSPQCENAFQTLKEKLVSSPVLILPDTRXDFMVYCDASRQGLGXYASRQLRPHEGNYPTHDLELAAVVHALKIWRHYLIGNRCEIYTDHKSLKYIFTQSDLNLRQRRWLELIKDYDVGIHYHPGKANVVADALSRKSHCNTLNVRGIPPELNQQMEALNLSIVGRGFVAALEAKPILLDQIREAQKNDPDMHGLLKNMKQGKAAGFTEDEHGTLWNGNRVCVPDSRELKQLILLEAHESPYSIHPGSTKMYLDLKEKYWWVSMKREIAEFVALCDVCQRVKAEHQRPAGLLQPLQVPEWKWDEIGMDFITGLPKTQGGYDSIWVVVDRLTKVARFIPVKTTYGGNKLAELYFARIVSLHGVPKKIVSDRGSQFTSHFWKKLQEELGTRLNFSTAYHPQTDGQTERLNQILEDMLRACVLDFGKTWDKSLPYAEFSYNNSYQASIQMAPYEALYGRKCRTPLLWDQVGESQVFGTDILREAEAKVRIIRDNLKVAQSRQKSYADNRRRDLEFAVGDFVYLRVTPLRGVHRFQTKGKLAPRYVGPFRINARRGEVAYQLELPASLGNVHDVFHVSQLKKCLRVPSEQADSEQIEVREDLTYVERPVKILDTMERRTRNRVIRFCKVQWSNHAEEEATWEREDELKAAHPDLFASSSESRGRDSV

SEQ ID NO: 107845 - protein, 1400 aa, Oryza sativa
  Clone ID: PAT_MRT4530_12157C.1.pep
MDISRINEGYTSCGPVVEMSWHRAGVLLLGAQSCLPVPRVPAVGGIGSVLLSMARMGWKLCHVFRPYTVVMAGSISRRGLDLTGFVLELRGMCVVLGYPHGVDYQGRPLPEQEGDDAEPHAAWEVTAVILTGSPERTSLAVTAGGDSFPAACQNAALLAIGTLHQRYPDELQHSPYRYHPRRGGARDFATFRDASSEDDATIMHLARMVEAYDAARIDFHQMVRRGMVENNMKILELRQENLQLKKELDAVEAQLHQLKIAQGEVCRPKRRRVCRSQKITARKSTSRPELVRQSLAWTCFVETPRAEPAPVVPQEGEASGVGSTEDALLLTFRPGPSQRRSANTGDGNQPEGSNHNNHGSPPPPPPPPPPPPPDTNAILTQILAQQANMMTAFLHHLQNPPQQNAPPPPPQHCKLAEFLRIRPPTFSSSNNPVDALDWLHAVGKKLDTVQCSDEEKVIFAAHQLQGPASLWWDHFQATQPEGQPITWARFTAAFRRTHVPAGVVALKKREFRELKQGNRSVMEYLHEFNNLARYALEDVREDEEKQEKFLAGMDPELSVRLVSGDYPDFQRLVDKSIRLEAKHKELESHKRRLANVRNQQGANQRVRYTNPYPGGSSSQQQQQQQPRSAPRPQFVVRVPQPQQQQSQQGTRVPRPPTPAAQSGQGRRDASGPQRLCFNCFEPGHFADKCPKPRRQQGQAPPRSNNGGKDVIRGRVNHVTAEDVLTTPDVIVGTFLIHSIPATILFDSGASHSFISVPFVGRNQLGVERLRNPLLITTPGGVMTAKYYSPAVPIEIQGIPFPSDLILLDTKNLDVILGMNWMAQFQGVVDCARRTVTLYRGPEQSVVFFAPPTSVSSSELHQIGLSEIPIVREFGDVFPEELPGMPPKREIEFRIDLAPGTTPLYKRPYRMAANELAEVKKQLEELKEKGALNEVTIKNKYPLPRIDDLFDQLKGATVFSKIDLRSGYHQLRIREEDIPKTAFTTRYGLYEFTVMSFGLTNAPAFFMNLMNKVFMEYLDKFVVVFIDDILVYSQSEEDHQHHLRLVLGKLREHQLYAKLSKCEFWLSEVKFLGHVISAKGVAVDPETVTAVTDWKQPKTVTQVRSFLGFAGYYRRFIENFSKIARPMTQLLKKEEKFVWSPQCEKAFQTLKEKLVSSPVLTLPDTRKDFMVYCDASRQGLGCVLMQDGHVVAYASRQLRPHEGNYPTHDLELAAVVHALKIWRHYLIGNRSEIYTDHKSLKYIFTQSDLNLRQRRWLELIKDYDVGIHYHPGKANVVADALSRKSHCNTLNVRGIPPELNQQMEALNLSIVGRGFLVALEAKPTLLDQIREAQCRDRENCLFPNASVLIPVPGKAGTGTTETNGEGTASAAILGQRRDAAGTRLDDAEPRTEARTGLQRLA

SEQ ID NO: 107846 - protein, 79 aa, Oryza sativa
  Clone ID: PAT_MRT4530_12158C.1.pep
KLTLRGQDNRTQIKIASRQNNLLKFISTKFKRKGDKTLSSKTSNYLVPRILLCQTLRLICWQHDEGECPTFQSFDLTIQ

SEQ ID NO: 107847 - protein, 113 aa, Oryza sativa
  Clone ID: PAT_MRT4530_12159C.1.pep
SPTDLKGSKKKKKNPWAKKPSQTPQKGKGNRLKKKKAKFSTSLKKRLASKRNGFKPLGESQKTGGAPKNSPFWANPGGPWVWGGPGGKKPPRTGKKKPQWSPKRRQPGPKKGN

SEQ ID NO: 107848 - protein, 462 aa, Oryza sativa
  unsure (1)..(462): unsure at all Xaa locations
  Clone ID: PAT_MRT4530_1215C.1.pep
MAQDTGDAVLPSSCITADRHLSLPCKIMPGGAVVRAGESRPWPRYPERSVHLLSFAMVGLIPLFSRFFHEVLDFYEIHALHLAPNAVMTLAIFADLCEMFIGVRPTIWWFQAFFIPQLLQGVEVGGCYFQPRPGTAGQYIESHLHKKWEDXKKDWFYTALPDHPRLRVPAGPPERSAAWLATSELGEEYDAVWDRLRGLRSLGLTGAMVFGDYFRRRIAPLQERSRGAWEYTGPNDPMRTHVGDRWDWGEEDTKRVIRRVLGLDSAEPTLIPDGILPLCCNRDRESILAVMSTVGAGRSRFYAILRMSIAFEIRPDVVTPMVVRAFPRRSLGEWGSCRRNTRQLVSNCVVASGHVPELKSVEVAFHAPYLADPGPTRQPLGAPEGGHAGAVGERRRGGAAAKRGEGRGKGGDGPRLTPGRRRRRRRRLERREAMARLGSTGTAALRRSATETERWTRSARMR

SEQ ID NO: 107849 - protein, 1496 aa, Oryza sativa
  unsure (1)..(1496): unsure at all Xaa locations
  Clone ID: PAT_MRT4530_12160C.1.pep
MRCCSPSMVTTRRNAATSDGNQPEGSNHNNHGSPPPPPPPPPPPPPPPDTNAILTQILAQQANMMTAFLHHLQNPPQHNAPPPPPQHSKLAEFLRIRPPTFSSSNNPVDALDWLHAVGKKLDTVQCSDEEKVIFAAHQLQGPASLWWDHFQATQPEGQPITWARFTAAFRRTHVPAGVVALKKREFRELKQGNRSVMEYLHEFNNLARYAPEDVREDEEKQEKFLAGMDPELSVRLVSVDYPDFQCLVDKSIRLEAKHKELESHKRRLANFRNQQGANQRVRYTNPYPGGSSSQQQQQQQQPRSAPRPQFMVRVPQPQQQQSQQGTRAPRPPTPTVQPGQGRRDVQGPQRLCFNCFEPGHFADKCPKPRRQQGQVPPRSNNGGKDVIRGRVNHVTAEDVLTTPDVIVGTFLIHSIPATILFDSGASHSFISVPFVGRNQLGVERLRNPLLITTPGGVMTAKYYSPAVPIEIQGIPFPSDLILLDTKNLDVILGMNWLAQFQGVVDCARRTVTLYRGPEQPVVFFAPPTSVRSSELHQIGLSEIPIVREFGDVFPEELPGMPPKREIEFRIDLAPGTIPLYKRPYRMAANELAEVKKQLEELTEKGYIRPSTSPWGAPVIFVEKKDKTKRMCVDYRALNEVTIKNKYPLPRIDDLFDQLKGATVFSKIDLRSGYHQLRIREEDIPKTAFTTRYGLYEFTVMSFGLTNAPAFFMNLMNKVFMEYLDKFVVVFIDDILIYSQSEEDHQHHLRLVLGKLREHQLYAKLSKCEFWLSEVKFLGHVISAKGVAVDPETVTAVTDWKQSKTVTQVRSFLGLAGYYRRFIENFSKIARPMTQLLKKEEKFVWSPQCEKAFKTLKEKLVASPVLILPDTRKDFMVYCDASRQGLGCVLMQDGHVVAYASRQLRPHEGNYPTHDLELAAVVHALKIWRHYLIGNRCEIYTDHKSLKYIFTQSDLNLRQRRWLELIKDYDVGIHYHPGKANVVADALSRKSHCNTLNICGIPPELNQQMAARNLSIVSRGFLAALEAKPTLLDQIREAQKNDPDMHGLLKNMKQGKAAGFTEDEHGTLWNGNRVCVPNNRELKQLILQEAHESPYSIHPGSTKMYLDLKEKYWWVSMKREIAEFVALCDVCQRVKQEHNGRAGLLQPLQVPEWKWDELGWDFITGLPXTQGGYDSIWVVVDRLTKVARFIPVKTTYGGTKLAELYFARIVSLHGVPKKIVSDRGSQFTSHFWKKLQEELGXNQILEDMLRACVLDFGKTWDKSLPYAEFSYNNSYQASIQMAPYEALYGRKCRTPLLWDQVGESQVFGTDILREAEAKVRTIRDNLKVAQSRQKSYADNRRRDLEFAVGDFVYLRVTPLRGVHRFQTKGKLAPRYVGPFRIIARRGEVAYQLELPASLGNVHDVFHVSQLKKCLRVPSEQADSAQIEVREDLTYVERPVKILDTMERRTRNRVIRFCKVQWSNHAEEEATWEREDELKAAHPDLFASSSESRGRDSV

SEQ ID NO: 107850 - protein, 45 aa, Oryza sativa
  Clone ID: PAT_MRT4530_12161C.1.pep
GDFYIDRNLAQAQTLLAFNFPSTNGIYPRYNSAPGSITPLGGVLY

SEQ ID NO: 107851 - protein, 1774 aa, Oryza sativa
  unsure (1)..(1774): unsure at all Xaa locations
  Clone ID: PAT_MRT4530_12162C.1.pep
MSWHRAGVLLLGXSVLPACPGGSGRRRNGWPGLAWDELGPRVGLPVRSESSQMAGSISRRGLDLTGFVLELXGHGRPLPEQEGDDAEPHAAWEVTAVILTSSPERTSLAVTAGGDSFSAACQNAALLAIGTLHQRYPDELQHSPYRYHPRHGGARDFATFRDASSEDDATIMHLARMVEAYDATCIDFHQMVRRGMVENNMKILEPRQENLQLKKDLDAVEAQLHQLKIAQGEVCRPKRRRVCRSQKITARKSTSRPELVRQSLAWTCFVQTPRAEPAPVVPQEGEASGVGSTEDALLLTFRPGPSQRRSANTGDGNQPEGSNHNNHGSPPPPPPPPPPPPPDTNAILTQILAQQAYMMTAFLHHLQNPPQQNAPPPPPQHSKLAEFLRIRPPTFSSSNNPVDALDWLHAVGKKLDTVQCSDEEKVVFAAHRLQGPASLWWDHFQATQPEGQPITWARFTAAFRRTHVPAEVMALKKREFRELKQGNRSVMEYLHEFNNLARYAPEDVREDEEKQEKFLAGMDPELSVRLVSGDYPDFQRLVDKSIRLEAKHKELESHKRRLANFRNQQGANQRVRYTNPYPGGSSSQQQQQQQPRSAPRPQFVVRVPQPQQQQSQQGTRATRPPMPAVQPGQGRRDVQGPQRLCFNCFEPGHFADKCPKPRRQQGQPPPRSNNGGKDVIRDRVNHVTAEDVLTTPDVIVGTFLIHSIPATILFDSGASHSFISVPFVGRNQLGVERLRNPLLITTPGGVMTAKYYSPAVPIEIQGIPFPSDLILLDTKNLDVILGMNWLAQFQGIVDCARRTVTLYRGPEQPVVFFAPPTSISSSELHQIGLSEIPIVREFGDVFPEELPGMPPKREIEFRIDLSPGTTPLYKRPYRMAANELAKVKKQLEELKEKGYIRPSTSPWGAPVIFVEKKDKTKRMCVDYRALNEVTIKNKYPLPRIDDLFDQLKGATVFSKIDLRSGYHQLRIREEDIPKTAFTTRYGLYEFTVMSFGLTNAPAFFMNLMKKVFMEYLDKFVVVFIDDILVYSQSEEDHKHHLRLVLGKLREHQLYAKLSKCEFWLSEVKFLGHVISAKGVAVDPETVTAVTDWKQPKTVTQIRSFLGLAGYYRRFIENFSKIARPMTQLLKKEEKFVWSPQCEKAFQTLKEKLVSSPVLILQDTRKDFMVYCDASRQGLGCVLMHDGHVVAYASRQLRPHEGNYPTHDLELAAVVHALKIWRHYLIGNHCEIYTDHKSLKYIFTQSDLNLRQRRWLELIKDYDVGIHYHPGKANVVADALSRKSHCNTLNVRGIPPELNQQMEALNLSINMKQGKAAGFTEDEHGTLWNGNRVCVPDNRELKQLILQEAHESPYSIHPGSTKMYLDLKEKYWWVSMKREIAEFVALCDVCQRVKAEHQRPAGLLQPLQVPEWKWDEIGMDFITGLPKTQGGYDSIWVVVDRLTKVARFIPVKTTYGGNKLAELYFARIVSLHGVPKKIVSDRGSQFTSHFWKKLQEELGTRLNFSTAYHPQTDGQTEHLNQILEDMLRACVLDFGKTWDKSLPYAEFSYNNSYQASIQMAPYEALYGRKCRTPLLWDQVGESQVFGTDILRKAEAKVRTIRDNLKVAQSRQKSYADNRRRDLEFAVDDFVYLRVTPLRGVHRFQTKGKLAPRFVGPFRIIARRGEVAYQLELPASLGNVHDVFHVSQLKKCLRVPSEQADSEQIEVREDLTYVERPVKILDTMERRTRNRVIRFCKVQWSNHAEEEATWEREDELKAAHPDLFASSSESRGRDSV

SEQ ID NO: 107852 - protein, 196 aa, Oryza sativa
  Clone ID: PAT_MRT4530_12163C.1.pep
MTNAGSTPTIDDGYGGVGMEAEGDVEEEMMACGGGGEKKRRLSVEQVRALERSFEVENKLEPERKARLARDLGLQPRQVAVWFQNRRARWKTKQTLASDSSAVLNDVDAAGAAPAATDALAPEACTFLGAPPAAGAGAGAAAAASHEEVFFHGNFLKVEEDETGFLDDDEPCGGFFADDQPPPLSSWWAEPTEHWN

SEQ ID NO: 107853 - protein, 1769 aa, Oryza sativa
  unsure (1)..(1769): unsure at all Xaa locations
  Clone ID: PAT_MRT4530_12164C.1.pep
MSSGTNEGYTSYGPVVEMSWHRAGVLLLGXSVLPACPGGSGRRXGIGSMYTSDQSIIYSNSRALGYGQAEQCTQMAGSISRRGLDLTGFVLELRGMCVVLGYPHGVDYQGRPLPEQEGDDAEPHAAWEVTAVILTGSPERTSLAVTAGGDSFPAACQNAALLAIGTLHQRYPDELQHSPYRYHPRRGGARDFATFRDASSEDDATIMHLARMVEAYDAARIDFHQMVRRGMVENNMKILELRQENLQLKKELDAVEAQLHQLKIAQGEVCRPKRRRVCRSQKITARKSTSRPELVRQSLAWTCFVETPRAEPAPVVPQEGEASGVGSTEDALLLTFHXTTRRSANTGDGNQPEGSNHNNHGSPPPPPPPPPPPPPDTNAILTQILAQQANMMTAFLHHLQNPPQQNAPPPPPQHCKLAEFLRIRPPTFSSSNNPVDALDWLHAVGKKLDTVQCSDEEKVIFAAHQLQGPASLWWDHFQATQPEGQPITWARFTAAFRRTHVPAGVMALKKREFRELKQGNRSVMEYLHEFNNLARYAPEDVREDEEKQEKFLAGMDPELSVRLVSGDYPDFQRLVDKSIRLEAKHKELESHKRRLANFRNQQGANQRIRYTNPYPGGSSSQQQQQQQPRSAPRPQFVVRVPQPQQQQSQQGTRAPRPPTPAAQSGQGRRDAXQGPQRLCFNCFEPGHFADKCPKPRRQQGQAPPRSNNGGKDVIWGRVNHVTAEDVLTTPDVIVGTFLIHSIPATILFDSGASHSFISVPFMGRNQLGVERLRNPLLITTPGGVMTAKYYSPAVPIEIQGIPFPSDLILLDTKNLDVILGMNWLAQFQGVVDCARRTVTLYRGPEQPVVFFAPPTSVSSSELHQIGLSEIPIVREFGDVFPEELPGMPPKREIEFRIDLAPGTTPLYKRPYRMAANELAEVKKQLEELKEKGYIRPSTSPWGAPVIFVEKKDKTKRMCVDYRALNEVTIKNKYPLPRIDDLFDQLKGATVFSKIDLRSGYHQLRIREEDIPKTAFTTRYGLYEFTVMSFGLTNAPAFFMNLMNKVFMEYLDKFVVVFIDDILVYSQSEEDHQHHLRLVLGKLREHQLYAKLSKCEFWLSEVKFLGHVISAKGVAVDPETVTAVTDWKQPKTVTQIRSFLGLAGYYRRFIENFSKIARPMTQLLKKEEKFVWSPQCEKAFQTLKEKLVSSPVLIMPDTRKDFTVYCDASRQGLGCVLMQDGHVVAYASRQLRPHEGNYPTHDLELAAVVHALKIWRHYLIGNRCEIYTDHKSLKYIFTQSDLNLRQRRWLELIKDYDVGIHYHPGKANVVADALSRKSHCNTLNVRGIPPELNQQMEALNLSIVGRGFLAALEAKPTLLDQIREAQKNDPDMRGLLKNMKQGKAAGFTEDEHGTLWNGNRVCVPDNREHKELILQEAHESPYSIHPGSTKMYLDLKEKYWWVSMKREIAEFVALCDVCQRVKAEHQRPAGLLQPLQVPEWKWDEIGMDFITGLSKTQGGYDSIWVVVDRLTKVARFIPVKTTYGGNKLAELYFARIVSLHGVPKKIVSDRGSQFTSHFWKKLQEELGTRLNFSTTYHPQTDGQTERLNQILEDMLRACVLDFGKTWDKSLPYAEFSYNNSYQASILMAPYEALYGRKCRTPLLWDQVGESQVFGTDILREAEAKVRTIRDNLKVAQSRQKSYADNRRRDLEFAVDDFVYLRVTSLRGVHRFQTKGKLAPRFVGPFRIIARRGEVAYQLELPASLGNVHDVFHVSQLKKCLRVPSEKADSE

SEQ ID NO: 107854 - protein, 277 aa, Oryza sativa
  Clone ID: PAT_MRT4530_12165C.1.pep
MKRPGGAGGGGGSPSLVTMANSSDDGYGGVGMEAEGDVEEEMMACGGGGEKKRRLSVEQVRALERSFEVENKLEPERKARLARDLGLQPRQVAVWFQNRRARWKTKQLERDYAALRHSYDSLRLDHDALRRDKDALLAEIKELKAKLGDEEAAASFTSVKEEPAASDGPPAAGFGSSDSDSSAVLNDVDAAGAAPAATDALAPEACTFLGAPPAAGAGAGAAAAASHEEVFFHGNFLKVEEDETGFLDDDEPCGGFFADDQPPPLSSWWAEPTEHWN

SEQ ID NO: 107855 - protein, 41 aa, Oryza sativa
  Clone ID: PAT_MRT4530_12166C.1.pep
VFVFFFFFFFIFFFFFFFFFFFFFLFFIFLIYILFKFLIFF

SEQ ID NO: 107856 - protein, 389 aa, Oryza sativa
  Clone ID: PAT_MRT4530_12167C.1.pep
MRRTIAISRKQNLQKAKGMEVVDLVSSDSESEEEDEARVHSPDRKRAACEADPRTESESFLERERMARLLHRHPHPHPPPSQEVKKGKEKVGEGEMLERAVSAPVDPLIGSRGCTLGAGGESKPGDGGNGGSISAPQDESDSKGLQEGHGQHGLLHSGSGTPDDKWKGILGARPADPAVDKLSHSRDNGKREDEVPMHEPSSVATNEVTGAGDVSMEDGSSTWLSRIKGLNYPLLDENQLRTRQIESDEEFARRLQEQLNKEQPGSQNLEEVDTTLAWTLQEEDVEHARNAVREGQSSSRMAILDSLEEAFGNFGEEFMSESDDDDYESLIRLDDNNHHRGASDIQINNLPLSVVELGIFSEYLPSLPQCIDKWLRMRISCPVCKSEVI

SEQ ID NO: 107857 - protein, 349 aa, Oryza sativa
  unsure (1)..(349): unsure at all Xaa locations
  Clone ID: PAT_MRT4530_12168C.1.pep
MGFIVTYSCLSKLAWSIILSRISLSAPSKIISLQFLEITAFVGVYLNLIVYLQDVLHGDTASNVATSADCVPATLSQELVFFTGIIYLCALGIGGAKAVLIAFGPEQLDDGGGGGEKERKASYFSWYYAVANVGMLTAGTLLVWVEDKVSWGLGYGLCASFVAVAVAVLAATAPMYRILPPAAPASSPLKSVLQVLVVAFSHKAKLTLPDDPTELYEDDGVKKTRTRCCIRCLDKAAIVGDEDLEDGDTRAXRLCTVTQVEEMKILLRLIPIWLTSAGRGARRCSSWGSGTRRRPSRRAWPRAPRRAGCARPWASPSRGCCHSTSRWPPPTRRSPSDSWSSSTASRRRR

SEQ ID NO: 107858 - protein, 1710 aa, Oryza sativa
  Clone ID: PAT_MRT4530_12169C.1.pep
RRRRSSGGLRRWRSGGRGWRRLCEPDGGDGDRRRRLQRRRRLGLRGGGARRDGRLRQRRRRKAGSVTRRGLDMTGFVLELRGMCVVLGYPHGVDYQARPLPEQEGDDAEPHAGWEVTAVILSGSPERTSLAVTAGGDSFPAACQSAALLAIGTLHQRYPDELQHSPYRYHPRRGGARDYATFRDASSKDDATIMHLARMVEAYDAARIDFHQMVRRGMVENNMKIQELRQENLQLKKDLDAVEAQLHQLKIAQGEVCRPKRRRVCRSQKITARKSTSRPELVRQSLAWTCFVETPRAEPAPVVPQEGEASGVGSTEDALLLTFRPGPSQRRSANTGDGNQPEGSNHHHQGSPPPPPPPPPPPPPDTNAILTQILAQQANMMTAFLHHLQNPPQHNAPPPPPQHSKLAEFLRIRPPTFSSSNNPVDALDWLHAVGKKLDTVQCSDEEKVIFAAHQLQGLASLWWDHFQATQPEGQPITWARFTAAFRRTHVPAGVVALKKREFRELKQGNRSVMEYLHEFNNLARYAPEDVREDEEKQEKFLAGMDPELSGANQRVRYTNPYPGGSSSQQQQQQQQPRSAPRPQFVVRVPQPQQQQNQQGTRAPRPPTPTVQPGQGRRDAQGPQRLCFNCFEPGHFADKCPKPRRQQGQAPPRSNNGGKDVIRGRVNHVTAEDVLTTPDVIVGTFLVHSIPATILFDSGASHSFISVPFVGRNQLGVERLRNPLLITTPGGVMTAKYYSPAVPIEIQGIPFPSDLILLDTKNLDVILGMNWLAQFQGVVDCARRTVTLYRGPEQPVVFFAPPTSVSSSELHQIGLSEIPIVREFGDVFPEELPVMPPKREIEFRIDLAPGTTPLYKRPYRMAANELAEVKKQLEELKEKGYIRPSTSPWGAPVIFVEKKDKTKRMCVDYRALNEVTIKNKYPLPRIDDLFDQLKGATVFSKIDLRSGYHQLRIREEDILKTAFTTRYGLYEFTVMSFGLTNAPAFFMNLMNKVFMEYLDKFVVVFIDDILVYSQSEEDHQHHLRLVLGKLREHQLYAKLSKCEFWLSEVKFLGHVISAKGVAVDPETVTAVTDWKQPKTVTQVRSFLGLAGYYRRFIENFSKIARPMTQLLKKEEKFVWSPQCEKAFQTLKEKLVSSPVLILPDTRKDFMVYCDASRQGLGCVLMQDGHVVAYASRQLRLHEGNYPTHDLELAAVVHALKIWRHYLIGNRCEIYTDHKSLKYIFTQSDLNLRQRRWLELIKDYDVGIHYHPGKANVVADALSRKSHCNTLNLRGIPPELNQQMAALNLSIVSRGFLAALEAKPALLDQIREAQKNDPDMHGLLKNMKQGKAAGFTEDEHGTLWNGNRVCVPDNRELKQLILQEAHESPYSIHPGSTKMYLDLKEKYWWVSMKREIAEFVALCDVCQRVKAEHQRPAGLLQPLQVPEWKWDEIGMDFITGLPKTQGGYDSIWVVVDRLTKVARFIPVKTTYGGNKLAELYFDRIVSLHGVPKKIVSDRGSQFTSHFWKKLQEELGTRLNFSTAYHPQTDGQTERLNQILEDMLRACVLDFGKTWDKSLPYAEFSYNNSYQASIQMAPYEALYGRKCRTPLLWDQVGESQVFGTDILREAEAKVRTIRDNLKVAQSRQKSYADNRRRNLEFAVGDLVYLRVTPLRGVHRFRTKGKLAPRYVGPFRIVARRGEVAYQLELPASLGNVHDVFHVSQLKKCLRVPS

SEQ ID NO: 107859 - protein, 489 aa, Oryza sativa
  Clone ID: PAT_MRT4530_1216C.1.pep
KRSDLFGNFPGAKEGRAHACARRRWRHFCVFGGKPITLEELWKPDNGMDKLGTDADAYKDICLSFSLCHLLQRRFFGFSCAESDRPETRSFVLEGLLQPNYERAFKVIEVELAFMYDYIYSSNAFVHYYEAGACTAWAIASILTTCFLCVAVALQQKEAIIASSAVTMLDSEVISTTMTPDIVITLVILVSLASLQVLQLVNSLSSNWARVSLVCHLFRRNANNLEPSMGLKLRLFLSRIKLLDKYQWQNKLGQYESSSWLKKALGFVSFKIGQCCYKPVFHFMLYCVRCMMRWPTICCPCYVVCSPLCNWVFKTSYHGGSASTIIPESKGNQASIILTWHAATGCYDKDYEQRKKMKATTESPLQHRQYRVVATALSKYCMYLVAYVPQLLPGQQSYTTSVYNDFVRSPSYILQSGTQLKDELCEAVVEDELRWKVLADFWVEMLLYLAPSDNVTAHIEQLAQGGEFITHLWALLFHAGILYRPYKEE

SEQ ID NO: 107860 - protein, 617 aa, Oryza sativa
  Clone ID: PAT_MRT4530_12170C.1.pep
MDADHERRRPEQGALRRPLLADDETCGHRTAECRGVFPFIDFCSAEDCEASSSNQSLVSQEDRGQEVAEVQKVESCSNKALIIILSLQFLEITAFYGVYLNLIVYLQDVLHGDSASNVATVSSWVGTAYLMPILGAAVADSCWGKYTTVLAGFSIALVGMVTITASATLPSLRPPSCGQSAYCVPATLSQKLVFFTGIYLCALGIGGAKAVLIAFGPEQLDDDDGGGKNERVRERKASYFSWYYAVANVGMLTAGTMLVWFEDNVSWGFGYGLCASFVAVAVVVLAATAPMYRILPPAGSPLKSVIQVLVAFSHKAKLTLPDDPTELYEDDGVKNSLQHPVHERLEHTNQFRCLDKAAIVSDEDLEDGDRWRLCTVSQVEEVKILLRLIPIWLTSAVYFIANTQAQTTFVQQGTKTDGRIARGAFSVPAASLSSFQMAFVAVFVTLYNRAVMPAARRCLGRAVAFTPLQLMGFGHATAVVAVGVAACTEARRLHAARAGAPAMGIAWLLPQYLVMAASDASLTVGQLEFFYDQSPETMRSASTAFYFLAISLGNLLNSQLVTLVAKVTAVWGNAGWFPLDLDDGHLDYFFLLIVAITAVNFAVYVALAKNYTPKKVR

SEQ ID NO: 107861 - protein, 2010 aa, Oryza sativa
  unsure (1)..(2010): unsure at all Xaa locations
  Clone ID: PAT_MRT4530_12171C.1.pep
MDEVGGRWTFSRANEGYTSCGPVVEMSWHRAGVLLLGAQSCLPVPGVPAVGGIGSMYTSDQSIIYSNSRALGYGQAEQCTQMAGSVTRRGLHMTGFVLELRGMCVVLGYPHGVDYQARPLPEQEGDDAEPHAGWEVTAVILSGSPERTSLAVTAGGDSFPAACQNVALLAIGTLHQRYPDELQHSPYRYHPRRGGARDYATFRDASSEDDATIVHLARMVEAYDAARIDFHQMVPRGMVENNMKILELRQENLQLKKDLDAVEAQLHQLKIAQGEVCRPKRRRVCRSQKITARKSTSRPELVRQSLAWTCFVETPRAEPAPVVPQEGEASGVGXHGGCAVAHLPSWPVAAVDEQLVGLRMVTTRRNAATGDGNQPEGSNHNHQGNPPPPSPSPSPPPPDTNAILTQILAQQANMMTAFLHHLQNPPQQNAPPPPPQHSKLAEFLRIRPPTFSSSNNPVDALDWLHAVGKKLDTAQCSDEEKVIFAAHQLQGPASLWWDHFQATQPEGQPITWARFTAAFRRTHVPAGVVALKKREFRELKQGNRSVMEYLHEFNNLARYAPEDVREDEEKQEKFLAGMDLELSVRLVSGDYPDFQRLVDKSIRLEAKHKELESHKRRLANFRNQQCANQRVRYTNPYPGGSSSQQQQQQQQPRSAPRPQFVVRVPQPQQQQNQQGTRAPRPPTPTVQPGQGRRDAQGQQRLCFNCFEPGHFADKCPKPRRQQGQAPPRSNNGGKDVIRGRVNHVTAEDVLTTPDVIVGTFLVHPIPATILFDSGASHSFISVPFVGRNQLGVERLRNPLLITTPGGVMTAKYYSPAVPIEIQGIPFPSDLILLDTKNLDVILGMNWLAQFQGVVDCARRTVTLYRGPEQPVVFFAPPTSVSSSELHQIGLSEIPIVREFGDVFPEELPGMPPKREIEFRIDHAPGTTPLHKRPYRMAANELAEVKKQLEELKEKGYIRPSTSPWGAPVIFVEKKDKTKRMCVDYRALNEVTIKNKYPLPRIDDLFDQLKGATVFSKIDLRSGYHQLRIREEDIPKTAFTTRYGLYEFTGMSFGLTNAPAFFMNLMNKVFMEYLDKFVVVFIDDILIYSQSEGDHQHHLRLVLGKLREHQLYAKLSKCEFWLSEVKFLGHVISAKGVSVDPETVTTVTDWKQPKTVTQVRSFLGLAGYYRRFIENFSKIARPMTQLLKKEEKFVWSPQCEKAFQTLKEKLVSSPVLILPDTRKDFLVYCDASRQGLGCVLMQDGHVVAYASRQLRPHEGNYPTHDLELAAVVHALKIWRHYLIGNRCEIYTDHKSLKYIFTQSDLNLRQRRWLELIKDYDVGIHYHPGKANVVADALSRKGHCNTLNVRGIPPELNQQMEALNLSIVGRGFLAALEAKPTLLDQIRKAQKNDPDMHGLLKNMKQGKAAGFTEDEHGTLWNGKRVCVPDNRELKQLILQEAHESPYSIHPGSTKMYLDLKEKYWWVSMKREIAEFVALCDVCQRVKAEHQRPAGLLQPLQVPEWKWDEIGMDFITGLPKTQGGYDSIWVVVDRLTKVARFIPVKTTYGGNKLAELYFARIVSLHGVPKKIVSDRGSQFTSHFWKKLQEELGTRLNFSTAYHPQTDGQTEHLNQILEDMLRACVLDFGKTWDKSLPYAEFSYNNSYQASIQMAPYEALYGRKCRTPLLWDQVGESQVFGTDILREAEAKVRIIRDNLKVAQSRQKSYADNRRRDLEFAVGDFVYLRVTPLRGVHRFQTKGKLAPRVHTHMPRYKPEYLFGVEGFVQELRTMSFVIGFGTAPFYAQIPHDRHEEKCRVKVTLNSNSEEVPSVMFEAGGRNYIHACQEVARIAIGELRDRYSDQLADTEYRYHPRQPQGSDRGSYLETEGIENDATTRHLVEMLWAMDESRAETVLAAQDREDRNRGKICKLEDKVDRLEKELAALKGEAPPQKARIRLTARKRALFVPRYQLAPKVRVVEKEVAPADPPVIIISSDEDEESKRTHSKIEWVATQDDEDEPNEPSIDLRCSEELE

SEQ ID NO: 107862 - protein, 1828 aa, Oryza sativa
  Clone ID: PAT_MRT4530_12172C.1.pep
MSWHRAGVLLLGAQSCLPVPVVPAVGGVGSVLLSKARMGWKLCHVFRLYTVVMAGSVTRRGLHMTGFVLELRGMCVVLGYPHGVDYQARPLPEQEGEDAEPHAGWEVTAVILSGSPERTSLAVTAGGDSFPAACQNAALLAIGTLHQRYPDELQHSPYRYHPRRGGARDYATFRDASSEDDATVVHLARMVEAYDAARIDFHQMVRRGMVENNMKILELRQENLQLKKDLDALEAQLHQLKIAQGEDSRPKRRRVCRSQKITARKSTSRPELVRQSLAWTCFVETPRAEPAPVVPQEGEASGVGSSEVLIVSSPSLFAGSVRGFQMVTTRRNVNTGEGNQPEGSNPNHQGNPPPPPPPPPPPDTNAILTQILAQQANLMNAFLHHLQNPPQHNAPPPPPQHSKLAEFLRIRPPTFSSSNNPVDALDWLHAVGKKLDTVQCSDEEKVIFAAHQLQGPASLWWDHFQATQPEGQPITWTRFTAAFRRTHVPAGVVALKKREFRELKQGNRSVMEYLHEFHNLARYAPEDVREDEEKQEKFLAGMDPELSVRLVSWDYPDFQRLVDKSIRLEAKHKELESHKRRLANFRNQQGANQRVRYTNPYPGGSSSQQQQQQQPRSAPRPQFVVRVPQQQQQQNQQGTRAPRPPTPTVQPVQGRRDAQGQQRLCFNCFEPGHFADKCPKPRRQQGQAPPRSNNGGKDVLRGRVNHVTAEDVLTTPDVIVGTFLVHSIPATILFDSGASHSFISVPFVGKSQLGVERLRNPLLITTPGGVMTAKYYSPAVPIEIQGIPFPSDLILLDTKNLDVILGMNWLAQFQGVVDCARRTVTLYRGPEQPVVFFAPPTSVRSSELHQIGLSEIPIVREFGDVFPEELPGMPPKREIEFRIDLAPGTTPLHKRPYRMAANELAEVKTQLEELKEEGYIRPSTSPWGAPVIFVEKKDKTKRMCVDYRALNEVTIKNKYPLPRIDDLFDQLKGATVFSKIDLRSGYHQLRIREEDIPKTAFTTRYGLYEFTVMSFGLTNAPAFFMNLMNKVFMEYLDKFVVVFIDDILIYSQSEEDHQHHLRLVLGKLREHQLYAKLSKCEFWLSEVKFLGHVISAKGVAVDPETVTAVTDWKQPKTVTQIRSFLGLAGYYRRFIENFSKIARPMTQLLKKEEKFVWSPQCEKAFQTLKEKLVSSPVLILPDTRKDFMVYCDASRQGLGCVLMQDGHVVAYASRQLRPHEGNYPTHDLELAAVVHALKIWRHYLIGNRCEIYTDHKSLKYIFTQSDLNLRQRRWLELIKDYDVGIHYHPGKANVVADALSRKSHCNTLNVRGIPPELNQQMEALNLNIVGRGFLAALEAQPTLLDQIREAQKNDPDMHGLLKNMKQGKAAGFTEDEHGTLWNGKRVCVPDSRELKQLILQEAHESPYSIHPGSTKMYLDLKEKYWWVSMKREIAEFVALCDVCQRVKAEHQRPAGLLQPLQVPEWKWDEIGMDFITGLPKTQGGYDSIWVIVDRLTKVARFIPVKTTYGGNKLAELYFARIVSLHGVPKKIVSDRGSQFTSHFWKKLQEELGTRLNFSTAYHPQTDGQTERLNQILEDMLRACVLDFGKTWDKSLPYAEFSYNNSYQASIQRAPYEALYGRKCRTPLLWDQVGESQVFGTDILREAEAKVRIIRDNLKVAQSRQKSYADNRRRDLEFAVYDFVYLRVTPLRGVHRFQTKGKLAPRYVGPIRITARRGEVAYQLELPASLGNVHDVFHVSQLKKCLRVPSEQADSEQIEVREDLTYVEKPVKILDAMERRTRNRVIRFCKVQWSNHAEEEATWEREDELKAAHPDLFASSSESRGRDSV

SEQ ID NO: 107863 - protein, 166 aa, Oryza sativa
  Clone ID: PAT_MRT4530_12173C.1.pep
LVEISKVLGFKLVTDCLELRAWFYLALEEYEAAVRDIRAILTLDPSYMMFHGKVHGEQLIEILRGYVQQWDMADCWMQLYDRWSEVDDIGSLAVVQQMLTREPGNSSLRFRQSLLLLRLNCQKAAMRSLRFARNCSAHEHERLVYEGWILYDTGHRDEALAKAEHS

SEQ ID NO: 107864 - protein, 1827 aa, Oryza sativa
  unsure (1)..(1827): unsure at all Xaa locations
  Clone ID: PAT_MRT4530_12174C.1.pep
MEVDEVGGRWTFSRANEGYTSCGPVVEMSWHRAGVLLLGXSVLPACPGGSGRRXGIGSVLLSMARMGWKLCHSFRLYTVVMAGSVTRRGLDMTGFVLELRGMCVVLGYPHGVDYQARPLPEQEGEDAEPHAGWEVTAVILSGSPERTSLAVTAGGDSFPAACQNAALLAIGTLHQRYPDELQHSPYRYHPRRGGARDYATFRDASSEDDATIVHLARMVEAYDAARIDFHQMVRRGMVENNMKILELRQENLQLKKDLDAVEAQLQQLKIAQGEDCRPKRRRVCRSQKITARKSTSRPELVRQSLAWTCFVETPRAEPAPVVPQEGEASGVGSTEDALLLTFRPGPSQRRNANTGDGNQPEGSNHNRQGNPPPPPPPPPPPPPDTNAILTQILAQQANMMTAFLHHLQNPPQHNAPPPPPQHSKLAEFLRIRPPTFSSSNNPVDALDWLHAVGKKLDTVQCSDEEKVVFAAHQLQGPASLWWDHFQATQPEGQPITWARFTAAFRRTHVPAGVVALKKREFRELKQGNRSVMEYLHEFNNLARYAPEDVREDEEKQEKFLAGLDPELSVRLVSGDYPDFQRLVDKSIRLEAKHKELESHKRRLANFRNQQGANQRVRYTNPYPGGSSSQQQQQQQQPRSAPRPQFVVRVPQPQQQQNQQGTRAPRPPTPTVQPGQGRRDAQGQQRLCFNCFEPGHFADKCPKPRRQQGQAPPRSNNGGKDVIRGRVNHVTAEDVLTTPDVIVGTFLVHSIPATILFDSGASHSFISVPFVGRNQLGVERLRNPLLITTPGGVMTAKYYSPAVPIEIQGIPFPSDLILLDTKNLDVILGMNWLAQFQGVVDCARRTVTLYRGPEQPVVFFAPPTSVSSSELHQIGLSEIPIVREFIDVFPEELPGMPPKREIEFRIDLAPGTTPLHKRPYRMAANELAEVKKQLEELKEKGYIRPSTSPWGAPVIFVEKKDKTKRMCVDYRALNEVTIKNKYPLPRIDDLFDQLKGATVFSKIDLRSGYHQLRIREEDIPKTAFTTRYGLYEFTVMSFGLTNAPAFFMNLMNKVFMEYLDKFVVVFIDDILIYSQSEEDHQHHLRLVLGKLREHQLYAKLSKCEFWLSEVKFLGHVISAKGVAVDPETVTAVADWKQPKTVTQVRSFLGLAGYYRRFIENFSKIARPMTQLLKKEEKFVWSPQCEKAFQTLKEKLVSSPVLILPDTRKDFMVYCDASRQGLGCVLMQDGHVVAYASRQLRPHEGNYPTHDLELAAVVHALKIWRHYLIGNRCEIYTDHKSLKYIFTQSDLNLRQRRWLELIKDYDVGIHYHPGKANVVADALSRKGHCNTLNVLGIPPELNQQMEALNLSVVGRGFLAALEAKPTLLDQIREAQKNDPDMHGLLKNMKQDNRELKQLILQEAHESPYSIHPGSTKMYLDLKEKYWWVSMKREIAEFVALCDVCQRVKAEHQRPAGLLQPLQVPEWKWDEIGMDFITGLPKTQGGYDSIWVVVDRLTKVARFIPMKTTYGGNKLAELYFARIVSLHGVPKKIVSDRGSQFTSHFWKKLQEELGTRLNFSTAYHPQTDGQTERLNQILEDMLRACVLDFGKTWDKSLPYAEFSYNNSYQASIQMAPYEALYGRKCRTPLLWDQVGESQVFGTDILREAEAKVRIIRDNLKVAQSRQKSYADNRRRDLEFVVDDFVYLRVTPLRGVHRFQTKGKLAPRYVGPFRIVARRGEVAYQLELPASLGNVHDVFHVSQLKKCLRVPSEQADSEQIEVREDLTYVERPVKILDTMERRTRNRVIRFCKVQWSNHAEEEATWEREDELKAAHPDLFTSSSESRGRDSV

SEQ ID NO: 107865 - protein, 515 aa, Oryza sativa
  unsure (1)..(515): unsure at all Xaa locations
  Clone ID: PAT_MRT4530_12175C.1.pep
MPPEDKALFVSRLPAPSVCNADMRKFIAALRLALAAAAHLLLTLPPAQCYWLNPEIYDAGGLSRRAFPEGFVFGTAASAYQVEGMAKQGGRGPSIWDAFIEKPGTIPNNATADVTVDEYHRYKEDVNIMKNMGFDAYRFSISWSRIFPNGTGMVNQEGVDYYNRLIDYMVKKGIKPYANLYHYDLPLALHEQYLGWLSPNIVEAFADYADFCFQTFGDRVKDWFTFNEPRCVAALGYDNGFHAPGRCSGCDAGGNSTTEPYLAAHHLILSHAAAVKRYREKYQLYQKGRIGILLDFVWYEPFSDSNADRAAAQRARDFHLGWFLDPIIHGLPIFPMLEIVKDRMPTFSDEESRMVKDSIIYDGIKHYTSFYMKDPGPWNLTRTSYYDARYLPFACCRRDAILRTEAAFSKTIWLIGLQPRGQEYCTSDGCLSPSSFVGTNXILDTVNASMPTFSXIDDGAKVIGYFAWSLLDNFEWRLGYTSRFGIVYVDYKTLKRYPKDSAFWFKNMLSSKKRN

SEQ ID NO: 107866 - protein, 752 aa, Oryza sativa
  Clone ID: PAT_MRT4530_12176C.1.pep
LRKCEFWLSEVKFLGHVISAKGVAVDPETVTAVTDWKQPKTVTQVRSFLGLAGYYRRFIENFSKIARPMTQLLKKEEKFVWSPQCEKAFQTLKEKLVSSPVLVLPDTRKDFMVYCDASRQGLGCVLMQDGHVVAYASRQLRPHEGNYPTHDLELAAVVHALKIWRHYLIGNRCEIYTDHKSLKYIFTQSDLNLRQRRWLELIKDYDVGIHYHPGKANVVADALSRKSHCNNLNVRGIPPELNQQMEALNLSIVGRGFLATLEAKPTLLDQIREAQKNDPDMHGLLKNMKQGKAVGFTEDEHGTLWNGNRVCVPDNRELKQLILQEAHESPYSIHPGSTKMYLDLKEKYWWVSMKREIAEFVALCDVCQRVKAEHQRPAGLLQPLQVPEWKWDEIGMDFITGLPKTQGGYDSIWVVVDRLTKVARFIPVKTTYGGNKLAELYFARIVSLHGVPKKIVSDRGSQFTSHFWKKLQEELGTRLNFSTAYHPQTDGQTERLNQILEDMLRACVLDFGKTWDKSLPYAEFSYNNSYQASIQMAPYEALYGRKCRTPLLWDQVGESQVFGTDILREAEAKVRTIRDNLKVAQSRQKSYADNRRRDLEFAVDDFVYLRVTPLRGVHRFQTKGKLAPRYVGPFRIIARRGEVAYQLELPASLGNVHDVFHVLQLKKCLRVPSEQADSEQIEVREDLTYVEKPVKILDTMERRTRNRVIRFCKVQWSNHAEEEATWEREDELKAAHPDLFASSSESRGRDSV

SEQ ID NO: 107867 - protein, 119 aa, Oryza sativa
  Clone ID: PAT_MRT4530_12177C.1.pep
PPGGFLCELSDSSPSPRCVNPLALAPPVVGVLVAIHLAPAPPLPSAGVVFLGRAFVAGFFARWLASLHGDVFFLFIAGDSAGGNIVQNKLMNTATNTKKKNKKTKKKQKKKKKKKKKNK

SEQ ID NO: 107868 - protein, 646 aa, Oryza sativa
  Clone ID: PAT_MRT4530_12178C.1.pep
MVEPVGAGGGGSGWGAEGLALLASAPPARDKGLRRRRRPRMTAHGRDIDDGQLFVRVPVHGTEAVCVNASEGATEQLEMKMSTGENLQAGLLSRTPPFGLRLWVVLGISIWAAILFVLGCICFFLIYWRKRGNRFGDTAEPEIPDITKEIAVDEARNRVAAENVQRQESYTLSLKERQTNKGSRKMLAHFLSCKSSGSHNLVGCSSMYQNDKAQCSYSSDEGTSGHNEREYSQYATMSTSPQIGLPEFSHLGWGYWFTLRDLEDATNGFSDDNIIGEGGYGVVYHGRLINGTDVAIKRLFNNIGQAEKEFKVEVESIGHVRHKNLVRLLGYCIEGSYRKLYIFLAVTATICPLAVTQPSMSQVNYNLRKKQNVQVWQLDMVYSKTSLGFSRCRMLVYEYINNGNLDQWLHGARSQHGVLTWEARMKIILDIAKALAYLHEGIEPKVIHRDIKSSNILIDKDFTGKLSDFGLSKLLRAGKSHITTRVMGTFGYVAPEYANTGQLNEKSDVYSFGVLLLEAVTGRDPVNYGRPTDEVHLLEWIKLMASSRRAEEVVDPAMEAKPTKRQLRRALVAALKCVDPKADKRPTMGSVVRMLEADDVALSSRQQLWKGLLLKRLSRNSSWVKPGLFPGGISSPEVPQLNREIF

SEQ ID NO: 107869 - protein, 122 aa, Oryza sativa
  Clone ID: PAT_MRT4530_12179C.1.pep
GYPLEGPAGACKATSSSRWRSSARLACFCRVAEIRSTGLSSARWSSGRSTGRSHVLILQDEGIPMTFTKIDSLEKVDDIRAEAYCTGVFNNVLEHRIGHDLMVYDGTEGGSCLRCCLGCPCF

SEQ ID NO: 107870 - protein, 1031 aa, Oryza sativa
  Clone ID: PAT_MRT4530_1217C.1.pep
MEEDEVEDENIPDWAQYAGFEGNQTGEVDRDADDNDAADDLGQMLQDAKEECKSEKEAHKLERTLEDNRTSLYPGCEQGHKKLDTTLEFLQWKAKNGLEVQKIHACPNDCILYRGEEYENLEACPVCKALRYKIRRDDPGEVDGQPTKKRIPAKDRRHPADGSQWGNIDRTFKDFGKDARNIRFGLSTDGMNPFGEISSGRSTWPVTMCIYNLPPWLCMKGKYIMMPIIIQGPKQPDNDIDVYLRTLIEDLKLLWKKEGVPMWDEDKQEEFNLRALMFVTINDWPALSNLSGQSNKGYKACTHCMDETESTYLKHCRKVVYMGHRRFLAANHPVRKKGKHFEHKADHRTKPKHRSGNTVFAMVKDLEVVFGKGPGVCGKSKDTLEARNDLKHMEQCGDLHPEPKEKGSHYLSPASYTLSKTEKERMFECLESIKKYVRNCARPEASIAKGYGTEEVNEFCVQFIEDLHPIGVPESCHEGRLRGMGTLGRKAIMTVDNNLLVAPYIEEHLALVHAKNIDAAAAADAAATTAATTADTATDTAVAAVAAAEPRHCRCRTTPLPRHATTAAAAPRRCRRATSPPLSTPKPPLPLLTPSPPLPNMADRDDEQILYNIIAEGSSQYWNDEEENEDPNQYLNEEVNEEGNVEEGNEEGNKEEPSGMEASSQGTFRPDREKDELSLALQTPEHPGRIRGKGVVPWKIGFKEDIHTYRSQMRSKRDTEVKIVYLEYRVSSYELSMQEEVARKVDERMVAHQCQDPQPYIPPVIVSPSGNRSSCASTGQVGSQSMDAMQTQDETTCPIDEITRRTPCELHIPFKNLSIKVASGMAIPTDPSGTYHCRPIPAGYSRVEVELVEAAYKDLELDYPGGDGETHLRDTSHAIILWRKRYIILPGQQATSPAPSPPSPPYLRHLLLHHHLRLLRLLLRRRLLQLHHVHLHLPRQGEVKKELKPRSPEKKIPVDPSVKNFFKKMSTTNKEALKLSDYDRTLKKAYYKKSKPVPQLGEQPNQEVEPLVTGEEIGITEFIFDTGLTVD

SEQ ID NO: 107871 - protein, 220 aa, Oryza sativa
  Clone ID: PAT_MRT4530_12180C.1.pep
MASTTAAAEDHKGKRPLPPEEADEAAAAPPPAAAEEEGEKLVLVSDDGVEVLASVAAARVSKTLRGMIEDECATGAIPIAGVHSDVLALLVEYCERHAPHYDPEASDRDRYPFPPFPVELPPTASSIKPVTFVDPDADPHGLKAFDKKFLDVDNSTLFEIIMAANYLNIEELLDDACTAVADKMRGKKPEEIRDIFEIENDYTPEQEAEVRRENAWAFED

SEQ ID NO: 107872 - protein, 1322 aa, Oryza sativa
  unsure (1)..(1322): unsure at all Xaa locations
  Clone ID: PAT_MRT4530_12181C.1.pep
MSPSPTWRPTDLRYKRDPXGRTQGIESYRQHIDHSLHDPRTSVPQYPLYPVYGYPPLTVARQVGAFGAQGSTTMSSSFVDNSVNPGFNQGVSTSTMLVWTQVGEIVFPVYTSVPISTGPSMAGSENAVVTTLDDSMSKDPPAEVENGTSTTSKPEKDPSAAKXCPSDKNHEPTRTTSEVTGSXCPIHKTRKHTLQACWVFLNVQAEIRACKERGIQRTSSTRDVYCPIHKTKNHDLSSCKVLLSAMKTSPPKVQQLQISLRDEDKEXGATLVSDRFVGVIDIDPHEPSVLHLLEEXGSSSTSTPRDVFAIDGTSTSARANVEAENQVVTPAQHIRAINTILRETPYDPVLNDDLAQWTEXLHESVANLSNAFEEAAARAQLEQPTAGGADGEPPEQRTSPQXATPPPRGTGNLNDHLNGRREARRVQDNENRSRHRISSRCHENEERGDDCHDHDDHEQQMPGDTGXGRRHNDDDGGDRCRDNNGGRRQDSRDPELHPRNRTPEPSDSSSSSSSSSSSSSDRHPRRTYDRXQPTAPSVGCRAFSRSLRDVRWPERFXREQKYDGSTDPEEFLQVYSMVLYAAGADDNVLANYLPTALKGSARSWLIHLSPYSISSWADLWXQFVANFLVTYKRHAIEDDLHALTQNPGESLRDYVRCFNECRNTIPEITDASVIRAFKSGVRDRYTTQELATRRITTTRRIFEIVDRCAHVDDALRRKNDKPKAGGEKKPAKEAPESSKKKSHKSGKRKAQAEVLASEYXDNEAWTMAFDGTLNSQGAGAGFILTSPSGDQGKHAIHLNFRATNNTAEYEGLLAGIRAAAAPGVKRLIVKGDSKLVANQVHKDYKCSNPELSKYLAEVRKLEKXFDGIEVRHIYRKDNIEPDDLARRASRWEPLEPGTFLDVLTKPSVKQANDEDSPVIPDVSSGAIEAERAVADIETTDDXRTPLIKFISSDELPEDDAEAEKITRQAKIYCMIGDDLYKKAPSGVLLKCVSSDDGKHLLLDIHEGICGSHAASRTLVGKAFXQGFFWATALKDVCEMXTHKATSTSADHPSYLAVLVLGARHTRTIPMRTGRLQVPIXVAIDKFTKWIEATPTGEIKADNVIKFIKGIFYRYGLPHRIITDNGSQFISIDFQDYCIRLGVKICFASVSSPQSNRLVERANGISLQGIKTLLWAVRTTLTTSNKETHFFLVYGSEAMLPTELRHQSTRLQKYSDEDQEEQRNDDVNLLEEHRERVAVRAASYQQALHRYPEKRIRARTLSIGDYVLRRVQSQAGRNKLSPKWEGPYTITQVLRPGAFKIVDSDGRELVNSWNIDQLRKFYV

SEQ ID NO: 107873 - protein, 91 aa, Oryza sativa
  unsure (1)..(91): unsure at all Xaa locations
  Clone ID: PAT_MRT4530_12182C.1.pep
RSRLGSGHSAQIEQRRRVGTHGVARGRVVGGGAGHGPRATGAGEECAXAAGLWRRGLTERAXEAAGCGEEGAPSPVHPPTSFAPLPITMMT

SEQ ID NO: 107874 - protein, 225 aa, Oryza sativa
  unsure (1)..(225): unsure at all Xaa locations
  Clone ID: PAT_MRT4530_12183C.1.pep
GGGGGGGAHGLPFLVLARTAFGVRSTHLLAVISVLIGCGWFGIESWIGGRAVFLLLPSRLKSYQPLLAPVPGLGXAPLEFACFLAFWAAQLGVIMHGMEGISKLEKYLDHHDQHSRQRGGAGKRARQLEPAEVHVRQGGAGHCVASHRLPAMAAVRLQRELHLHMPGRALLRHQRPLGSPATYNSDAHEGKGEELPPRRHRRRCLRRARRWLTAGVGRRARLPLL

SEQ ID NO: 107875 - protein, 538 aa, Oryza sativa
  Clone ID: PAT_MRT4530_12184C.1.pep
MAMSMAMSRALAARHRSHLGHRIEVKSHHASPPRLPLLPRSPGLTLASRPRMLPARPRMSSSESDLSPTPPSERTMTAWDLASLWVGLVVGVPSYYLAGSLVDLGMSALQGVATVAFANLVVLVSLVLTAAPAVTHGLPFPVLARAAFGVRGAHLPAVIRALVGCGWFGIESWIGGRAVFLLLPSRLKSYQPLLAPVPGLGAAPLEFACFLAFWAAQLGVIMHGMEGIRKLEKYSAPVLIVLTSALLAWAYVSAGGFGRILSLPPRLTRAEFWKVFFPSLTANISFWATVAINIPDFARYARSQADQVLGQAGLPVFMGMFTFAGLAVTSATEAIFGHVISDPIELLGRIGGPVTTVLAIVGISLATITTNIAANVVAPANALVSMSPRKFTFAKGALVTALLGIAFQPWRLLSSSESFVYTWLLGYSALMGPIGGIILADHYIVRRTALDVDALYSEDSHGPYYFQGGFNVAAMAAMAAGVAPIVPGFLHNVGVLPSVSKAFETAYNNAWFVSFFVAGAVYCLLCRRNRNELKHQHD

SEQ ID NO: 107876 - protein, 86 aa, Oryza sativa
  Clone ID: PAT_MRT4530_12185C.1.pep
MDVTCLTMELRKQMRRTHIVIDTVTPVDEKKEKEEKEKKEKEEKEKKEKEEKEKKKKEEEQNNPKIVCTPYYVHMVDEPSPSCCQM

SEQ ID NO: 107877 - protein, 313 aa, Oryza sativa
  unsure (1)..(313): unsure at all Xaa locations
  Clone ID: PAT_MRT4530_12186C.1.pep
AFGVRSTHLLAVISVLIGCGWFGIESWIGGRAVFLLLPSRLKSYQPLLAPVPGLGLRRWSSRASSLSGPRSSASSCTAWRASASSRSTWTITTNIPANVVVPANALVSLSPRKFTFAKVALVTALLGIAFQPWRLFGSSESFIYTWPFELSSGTSGRSAPRRPITLTAMRARSCTCIVEDGGGGSSRDRAHRRARRRRHVRRWRRHVAPAGHVAAAARRGWVDVGDQEVTVLVIVVDLQGEELXSSSPSSSLSPASSKVAYGWRWPSXRDFHSSTLSCRGGARGASPGEEAAGGVGLLAEEEERMVGRRMGGR

SEQ ID NO: 107878 - protein, 76 aa, Oryza sativa
  unsure (1)..(76): unsure at all Xaa locations
  Clone ID: PAT_MRT4530_12187C.1.pep
FFFFFFFFXAAYYSMYYTNLKNTSSCNLQHTTWHFWLHKPAVYNXNXGRLKRXXNXLGFNSRHRPKMXNNXKKKTN

SEQ ID NO: 107879 - protein, 166 aa, Oryza sativa
  Clone ID: PAT_MRT4530_12188C.1.pep
MALEARFFLAAVFAVAATCLCLSAVASAFAVPSVAFDEGYSPLFGDDNLVRSSDDKSVRLLLDRRSGSGFISSDYYLHGFFSASIKLPKAYTAGVVVAFYLSNGDVYEKTHDELDFEFLGSRWGGQWRVQTNAYGNGSTARDLLGSRRGGQWRVQTNAYGNGSTAR

SEQ ID NO: 107880 - protein, 50 aa, Oryza sativa
  unsure (1)..(50): unsure at all Xaa locations
  Clone ID: PAT_MRT4530_12189C.1.pep
VVVLGXXFWGYIFFLVCQTGKPTRDLRGEPQNEFKLXPKNKPIPKNPPLS

SEQ ID NO: 107881 - protein, 950 aa, Oryza sativa
  unsure (1)..(950): unsure at all Xaa locations
  Clone ID: PAT_MRT4530_1218C.1.pep
MEEDEVEDENIPDWAQYAGFEGNQTGEVDRDADDNDAADDLGQMLQDAKEECKSEKEAHKLERTLEDNRTSLYPGCEQGHKKLDTTLEFLQWKAKNGPKQPDNDIDVYLRTLIEDLKLLWKKEGVPMWDEDKQEEFNLRALMFVTINDWPALSNLSGQSNKGYKACTHCMDETESTYLKHCRKVVYMGHRRFLAANHPVRKKGKHFEHKADHRTKPKHRSGNTVFAMVKDLEVVFGKGPGSHPIEREDGHAAMWKKNSIFWELPYWEFLDVRHAIDVMHLTKNLCVNLLGFLGVCGKSKDTLEARNDLKHMEQCGDLHPEPKEKGSHYLSPASYTLSKTEKERMFECLESIKKYVRNCARPEASIAKGYGTEEVNEFCVQFIEDLHPIGVPESCHEGRLRGMGTLGRKAIMTVDNNLLVAPYIEEHLALVHAKNIDAAAAADAAATTAATTADTATDTAVAAVAAAEPRHCRCRTTPLPRHATTAAAAPRRCRRATSPPLSTPKPPLPLLTPSPPLPNMADRDDEQILYNIIAEGSSQYWNDEEENEDPNQYLNEEVNEEGNVEEGNEEGNKEEPSGMEASSQGTFRPDREKDELSLALQTPEHPGRIRGKGVVPWKIGFKEDIHTYRSQMRSKRDTEVKIVYLEYRVSSYELSMQEEVARKVDERMVAHQCQDPQPYIPPVIVSPSGNRSSCASTGQVGSQSMDAMQTQDETTCPIDEITRRTPCELHIPFKNLSIKVASGMAIPTDPSGTYHCRPIPAGYSRVEVELVEAAYKDLELDYPGGDGETHLRDTSHAIILWRKRYIILPGQQATSPAPSPPSPPXPPPPPPAPSPPAPPPPPSPPXLLQLHHVHLHLPRQGEVKKELKPRSPEKKIPVDPSVKNFFKKMSTTNKEALKLSDYDRTLKKAYYKKSKPVPQLGEQPNQEVEPLVTGEEIGITEFIFDTGLTVD

SEQ ID NO: 107882 - protein, 76 aa, Oryza sativa
  unsure (1)..(76): unsure at all Xaa locations
  Clone ID: PAT_MRT4530_12190C.1.pep
MASINRPKVFLHSLAWFLLCDGSLXQQLLGQSTNQWEXSFRRGKPKRXEFDRLQAFEPIRSVRSQAGTTRVFDVLM

SEQ ID NO: 107883 - protein, 115 aa, Oryza sativa
  Clone ID: PAT_MRT4530_12191C.1.pep
MPQLSLTTNVPVDAVVAADIIKDCSKALARIIGKPESYVMVSISGSVPMSFAASEEPAAYGELMSIGGIGPGVNGKLSAALAEILETKLSVSRSRFYVKFDDVKGFNLGFNGSTF

SEQ ID NO: 107884 - protein, 167 aa, Oryza sativa
  Clone ID: PAT_MRT4530_12192C.1.pep
MKAGRKNLRRACSEGAVTLGEGESIMQVLALRGSNVIEVMDAKGVKSLALFPAKFQKSFWIKNGNFVVVDASGRDQALESGSKIACVVSQVLFHDQVRAMEKSEEWPAIFKSTSKEGSEAGTQEGTRPQIEEEPDSDEDDDLPPLEANTNRQRPFELYADSESDSDS

SEQ ID NO: 107885 - protein, 99 aa, Oryza sativa
  Clone ID: PAT_MRT4530_12193C.1.pep
MMTGRPWVIAPRMGACNLGKWRARLATSGIIASRRIGRASVRCAKRDYRWARLATSEIIARLTSVTPLSAALNAGHGRSGTSGASGTSGRENQGGGSSD

SEQ ID NO: 107886 - protein, 181 aa, Oryza sativa
  Clone ID: PAT_MRT4530_12194C.1.pep
MAMAARAAYLAATRAALAALERNALPDAVTRRLTRLLLAQRLRLGYLPSSSSSAPLHLHHLLLFAHALEEMPIAIETEKAKDQHYELPTTFFKLVLGRNLKYSSCYFPDESSTLEDAEVAMLELYCERAQLQDGQTILDVGCGWGSLSLYIAKKYSKCSITGICNSTTHKPGYEEDDNSLV

SEQ ID NO: 107887 - protein, 1804 aa, Oryza sativa
  Clone ID: PAT_MRT4530_12195C.1.pep
MDEVGGRWTFSRANEGYTSCGPMAGSVTRRGLDMTGFVLELRGMCVVLGYPHGVDYQVRPLPEQEGEDAEPHAAWEVTAVILSGSPERTSLTVTAGGDSFPAACQNAALLAIGTLHQRYPDELQHSPYRYHPRRGGARDYATFRDASSEDDATVVHLARMVEAYDAARIDFHQMVRRGMVENNMKILELRQENLQLKKDLDALEAQLHQLKIAQGEISRPKRRRVCRSQKITARKSTSRPELVRQSLAWTCFVETPCAEPAPVVPQEGEASGVGSSEGALLLTFRPGPSQRSSSLFAGSVWGFQMVTTRRNVNTGGGNQPEGSNPNPQGNPPPPPPPDTNAILTQILAQQANMMNAFLHHLQNSPQQNAPPPPPQHSKLAEFLRIRPPTFSSSNNPVDALDWLHAVGKKLDTVQCSDEEKVIFAAHQLQGPASLWWDHFQATQPEGQPITWTRFTAAFRRTHVPAGVVALKKREFRELKQGNRSVMEYLHEFNNLARYAPEDVREDEEKQEKFLAGMDPELSVRLVSGDYPDFQRLVDKSIRLEAKHKELESHKRRLANFRNQQGANQRVRYTNPYPGGSSSQQQQQQQQPRSAPRPQFVVRVPQQQQQQNQQGTRAPRPPTPTVQPVQGRRDASGPQRLCFNCFEPGHFADKCPKPRRQQGQAPPRSNNGGKDVIRGRVNHVTAEDVLTTPDVIVGTFLVHSIPATILFDSGASHSFISVPFVGRNQLGVERLRNPLLITTPGGVMTAKYYSPAVPIEIQGIPFPSDLILLDTKNLDVILGMNWLAQFQGVVDCARRTVTLYRGPEQPVVFFAPPTSVRSSELHQIGLSEIPIVREFGDVFPEELPGMPPKREIEFRIDLAPGTTPLYKRPYRMAANELAEVKKQLEELKEKGYIRPSTSPWGAPVIFVEKKDKTKRMCVDYRALNEVTIKNKYPLPRIDDLFDQLKGATVFSKIDLRSGYHQLRIREEDIPKTAFTTRYGLYEFTVMSFGLTNAPAFFMNLMNKVFMEYLDKFVVVFIDDILIYSQSEEDHQHHLRLVLGKLREHQLYAKLSKCEFWLSEVKFLGHVISAKGVAVDPETVTAVTDWKQPKTVTQIRSFLGLAGYYRRFIENFSKIARPMTQLLKKEEKFVWSPQCEKAFQTLKEKLVSSPVLILPDTRKDFMVYCDASRQGLGCVLMQDGHVVAYASRQLRPHEGNYPTHDLELAAVVHALKIWRHYLIGNRCEIYTDHKSLKYIFTQSDLNLRQRRWLELIKDYDVGIHYHPGKANVVADALSRKSHCNTLNVRGIPPELNQQMEALNLSIVGRGCLAALEAKPTLLDQIREAQKNDPDMHGLLKNMKQGKAAGFTEDEHGTLWNGKRVCVPDSRELKQLILQEAHESPYSIHPGSTKMYLDLKEKYWWVSMKREIAEFVALCDVCQRVKAEHQRPAGLLQPLQVPEWKWDEIGMDFITGLPKTQGGYDSIWVIVDRLTKVARFIPVKTTYGGNKLAELYFARIVSLHGVPKKIVSDRGSQFTSHFWKKLQEELGTRLNFSTAYHPQTDGQTERLNQILEDMLRACVLDFGKTWDKSLPYAEFSYNNSYQASIQMAPYEALYGRKCRTPLLWDQVGESQVFGTDILREAEAKVRIIRDNLKVAQSRQKSYADNRRRDLEFAVDDFVYLRVTPLRGVHRFQTKGKLAPRYVGPFRIIARRGEVAYQLELPASLGNVHDVFHVSQLKKCLRVPSEQADSEQIEVREDLTYVEKPVKILDTMERRTRNRVIRFCKVQWSNHAKEEATWEREDELKAAHPGLFASSSESRGRDSV

SEQ ID NO: 107888 - protein, 737 aa, Oryza sativa
  Clone ID: PAT_MRT4530_12196C.1.pep
MGCAQSNEDGEGPVARCRERKHLLRDAVAARHALAGAHAGHAAALKNVGAALSDYASGEGEAHAGGALRSGSADSSAAAAALVTASSDGKPVLAILPPPPPELPPPPPPPPLPPHGDVEAAPLARSMSAPDLHLQQPIKKKPSGEAPIMEEEDDEGGDGGDAGGRRGDDDAELKPPPPLPSQRPPPSRSPPPLPPENDHKVDTPGGFISSLFDSMPPPTLDTAAAEPSSSASAERREPPPPAPDEHQPSAAAREVAEGKRPAAAEAATTRRAMTQKAARKGKAKAVMLVAPPQPQPAKLGVGDILRALDEHFLKASQSAHEVSKLLEAARMHYHSNFAETRGFVDHSARVMQVITWNRSFKGIPQPENVRNEMDDDEWETHATTLDKLLAWEKKLYHEVKDFEVIRREYQQKLAVLNKKKQRGVTSSSLEKTKSVVSHLHTKYVVDLQTMESTVAEINRLRDQQLYPKLLELVKGMWHMWDAMYLHHKTQLKIILELKSLDISVAPRETSEQHHDRTVQLWNVVHEWHTQFDKFMTYQKQYVGSLYTWIKLNVIPIDTNLKPNSSQPHETTPPIKRVLHAWHEILGKLPDEAAKKAINTFAEIVKTILVHQEDELKLRMKIEDTRRDYGKKRRQFDDWAQKYIHQTAGILPEDRNPDGARPDPMAERKAAMEKLELSMKELEEMYVKQCRVVREKSLSLLRTNLPELFRVVSDFSLQSAGMFKGVWSIAHTNDQLDE

SEQ ID NO: 107889 - protein, 1855 aa, Oryza sativa
  unsure (1)..(1855): unsure at all Xaa locations
  Clone ID: PAT_MRT4530_12197C.1.pep
MDEVGGRWTFSRANEGYTSCGPVVEMSWQRVGALLLGAQSCLPVPEVPAVGGIGSMYTSDQSIIYSNSRALGYGQAEQCTQMAGSINRRGLDLTGFVLELRGMCVVLGYPHGVDXQGKQLPEQEGADAEPHAAWEVTAVILTGSPERTSLAVTAGGDSFSAACQNAALLAIGTLHQRYPDELQHSPYRYHPRRGGARDYATFRDASSEDDATIMHQARMVEAYDVARIDFHQMMHRGLVENNMKILELRQENLQLKKDLDAVEAQLRQLKIAQGEVCRPKRRRVCRSQKITARKSTSRTCFVETPRAERAPVVPQEDGASGVGSTEDALMLTFRPGPSQLXGEQLVGLRMVTTRRSAATGEGSHPEGSXPHNHGSPPPPPPPPPPPPPDTNAILTQILAQQANMMAAFLHHIQNPPPHNAPPPPPQHSKLAEFLRIRPPTFSSSNNPVDALDWLHAVGKKLDTVQCSDEEKVIFAAHQLQGPASLWWDHFQATQPEGQPITWARFTAAFWRTHVPAGVMALKKREFRELKQGNRSVMEYLHEFNNLARYAPEDVREDEEKQEKFLAGMDPELSVRLVSGDYPDFQRLVDKSIRLEAKHKELESHKRRLASFRNQQGANQRVRYTNPYPGGSSSQQQQQQQQPRSAPRPQFVVRVPQPQQQQSQQGTRAPRPPTPAVQPGQGRRDVQGPQRLCFNCFEPGHFADKCPKPRRQQGQAPPRSNNGGKDVIRGRVNHVTAEDVLTTPDVIVGTFLIHSIPATILFDSGASHSFISVPFVGRNQLGVERLRNPLLITTPGGVMTAKYYSPAVPIEIXGIPFLSDLILLDTKNLDVILGMNWLAQFQGVVDCARRTVTLYRGPEQPVVFFAPPTSVGSSELHQIRLSEIPIVREFGDVFXEELPGMPPKREIEFRIDLAPGTTPLYKRPYRMAANELAEVKKQLEELKGKGYIRPSTSPWGAPVIFVEKKDKTKRMCVDYRALNEVTIKNKYPLPRIDDLFDQLKGATVFSKIDLRSGYHQLRIREEDIPKTAFTTQYGLYEFTVMSFGLTNAPAFFMNLMNKVFMEYLDKFVVVFIDDILVYSQSEEDHQHHLRLVLGKLREHQLYAKLSKCEFWLSEVKFLGHVISAKGVAVDPETVTAVTDWRQPKTVTQIRSFLGLAGYYRRFIENFSKIARPMTQLLKKEEKFVWSPQCEKAFQTLKEKLVSSPVLILPDTRKDFMVYCDASRQGLGCVLMQEGHVVAYASRQLRPHEGNYPTHDLELAAVVHALKIWRHYLIGNRCEVYTDHKSLKYIFTQSDLNLRQRRWLELIKDYDVGIHYHPGKANMVADALSRKSHCNTLDVRGIPPELNQQMEALNLSIVGRGFLATLEAKPTLLDQIREAQKNDPDMRGLLKNMKQGKAAGFTEDEHRTLWNGNRVCVPDDRELKQLILQEAHESPYSIHPGSTKMYLDLKGKYWWVSMKREIAEFVALCDVCQRVKAEHQRPAGLLQPLQVPEWKWDEIGMDFITGLPKTQGGYDSIWVVVDRLTKVARFILVKTTYGGNKLAELYFARIVSLHGVPKKIVSDRGSQFTSHIWKKLQEELGTRLNFSTAYHPQTDGQTERLNQILEDMLRACVLDFGKTWDKSLPYAEFSYNNSYQASIQMAPYEALYGRKCQTPLLWDQVGESXVFGTDILREAEAKVRTIRDNLKVAQSRQKSYADNRRRNLEFAVDNFVYLWVTPLRGVHRFQMKGKLAPRFVGPFRIIARRGEVAYQLELPASLGNVHDVFHVSQLEKCLRVPSEXADSEQIEVREDLTYVERPVKILDTMERRTRNRVIRFCKVQWRNHAEEEATWEREDELKAAHPDLFARSSESRGRDSV

SEQ ID NO: 107890 - protein, 757 aa, Oryza sativa
  unsure (1)..(757): unsure at all Xaa locations
  Clone ID: PAT_MRT4530_12198C.1.pep
MDEVGGRWTFSRANEGYTSCGPVVEMSWHRVGALLXGAQSCLPVPEVPAVGGIGSLYTSDQSIIYSNSRALGYGQAEQCTQMAGSVTRRGLDMTGFVLELRGMCVVLGYPHGVDYQARPLPEQEGDDAEPHAGWEVTAVILSGSPERTSLAVTAGGDSFPAACQNAALLAIGTLHQRYPDELQHSPYRYHPRRGGARDYTTFRDASSEDDATIVHLARMVEAYDAARIDFHQMVRRGMVENNLKILELRQENLQLKKDLDAVEAQLHQLKIAQGEVCRPKRRRVCRSQKITARKSTSRPELVRQSLAWTCFVETPRAEPAPVVPQEGEASGVGSTEVVWGMVMPMVTTRRNANTGDGNQPECSNHNHQGNPPPPPPPPPPPPPDTNAILTQILAQQANMMTAFLHHLQNPPQQNAPPPPPQHSKLAEFLRIRPPTFSSSNNPVDALDWLHAVGKKLGTVQCSDEEKVIFAAHQLQGPASLWWDHFQATQPEGQPITWARFTAAFRRTHVPAGVVALKKREFRELKQGNRSVMEYLHEFNNLARYAPEDVREDEEKQEKFLAGMDPELSVRLVSGDYPDFQRLVDKSIRLEAKHKELESHKRRLANFRNQQGANQRVRYTNPYPGGSSSQQQQQQQQPRSAPRPQFVVRVPQPQQQQNQQGTRAPRPPTPTVQPGQGRRDAQGQQRLCFNCFEPGHFADKCPKPRRQQGQAPPRSNNGGRDVIRGRVNHVTAEDVLTTPDVIVGRSCGSLCLTSATTS

SEQ ID NO: 107891 - protein, 1822 aa, Oryza sativa
  Clone ID: PAT_MRT4530_12199C.1.pep
MSWHRAGVLLLGAQSCLPVPEVPAVGGIGSVLLSMARMGWKLCHVFRLYTVVMAGSVTRRGLDMTGFVLELRGMCVVLGYPHGVDYQARPLPEQEGDDAEPHAGWEVTAVILSGSPERTSLAVTAGGDSFPAACQSAALLAIGTLHQRYPDELQHSPYRYHPRRGGARDYATFRDASSEDDATIVHLARMVEAYDAARIDFHQMVRRGMVENNMKILELRQENLQLKKDLDAVEAQLHQLKIAQGEVCRPKRRRVCRSQKITARKSTSRPELVRQSLAWTCFVEIPRAEPAPVVPQEGEASGVGSTEDALLLTFRPGPSQRRSANTGDGNQPEGSNHHHQGSPPPPPPPPPPPPPDTNAILTQILAQQANMMTAFLHHLQNPPQHNAPPPPPQHSKLAEFLRIRPPTFSSSNNPVDALDWLHAVGKKLDTVQCSDEEKVIFAAHQLQGPASLWWDHFQATQPEGQPITWARFTAAFRRTHVPAGVVALKKREFRELKQGNRSVMEYLHEFNNLARYAPEDVREDEEKQEKFLAGMDPELSVRLVSGDYPDFQRLVDKSIRLEAKHKELESHKRRLANFRNQQGANQRVRYTNPYPGGSSSQQQQQQQQPRSAPRPQFVVRVPQPQQQQNQQGTRAPRPPTPTVQPGQGRRDAQGPQRLCFNCFEPGHFADKCPKPRRQQGQAPPRSNNGGKDVIRGRVNHVTAEDVLTTPDVIVGTFLIHSIPATILFDSGASHSFISVPFVGRNQLGVERLRNPLLITTPGGVMTAKYYSPAVPIEIQGIPFSSDLILLDTKNLDVILGMNWLAQFQGVVDCARRTVTLYRGPEQPVVFFAPPTSVSSSELHQIGLSEIPIVREFGDVFPEELPGMPPKREIEFRIDLAPGTTPLYKRPYRMAANELAEVKKQLEELKEKGYIRPSTSPWGAPVIFVEKKDKTKRMCVDYRALNEVTIKNKYPLPRIDDLFDQLKGATVFSKIDLRSGYHQLRIREEDIPKTAFTTRYGLYEFTVMSFGLTNAPAFFMNLMNKVFMEYLDKFVVVFIDDILIYSQSEEDHQYHLRLVLGKLREHQLYAKLSKCEFWLSEVKFLGHVISAKGVAVDPETVTAVTDWKQPKTVTQVRSFLGLAGYYRRFIENFSKIARPMTQLLKKEEKFVWSPQCEKAFKTLKEKLVSSPVLILPDTCKDFMVYCDASRQGLGCVLMQDGHVVAYASRQLRPHEGNYPTHDLELDAVVHALKIWRHYLIGNRCEIYTDHKSLKYIFTQSDLNLRQRRWLELIKDYDVGIHYHPGKANVVADALSRKSHCNTLNVRGIPLELSQQMEALNLSIVGRGFLAALEAKPTLLDQIREAQKNDPDMHGLLKNMKQGKAAGFTEDEHGTLWNGNRVCVPDNRELKQLILQEAHESPYSIHPGSTKMYLDLKEKYWWVSMKREIAEFVALCDVCQRVKAEHQRPAGLLQPLQVPEWKWDEIGMDFITGLRKTQGGYDSIWVVVDRLTKVARFIPVKTTYGGNKLAELYFARIVSLHGVPKKIVSDRGSQFTSHFWKKLQEELGTRLNFSTAYHPQTDGQTERLNQILEDMLRACVLDFGKTWDKSLPYAEFSYNNSYQASIQMAPYEALYGRKCRTPLLWDQVGESQVFGTDILREAEAKVRTIRDNLKVAQSRQKSYADNRRRDLEFAVDDFVYLRVTPLRGVHRFRTKGKLAPRYVGPFRIVARRGEVAYQLELPASLGNVHDVFHVSQLKKCLRVPSEQADSEQIEVREDLTYVERPVKILDTMERRTRNRVIRFCKVQWSNHVEEEATWEREDELKAAHPDLFASSSESRGRDSV

SEQ ID NO: 107892 - protein, 948 aa, Oryza sativa
  Clone ID: PAT_MRT4530_1219C.1.pep
MSATLSSFLLLLFSFLSSLPLQSERKAKQVEGSGRAATGKHDSGVEVDVIASTYYMRARERDAGAEADALREELWSVKAELELAKTKAVAAAAAAGALAEKAQEVYKRGREDVRNTIASYRSALLKMELFSRVLPPLGIAMGDSWSDTEIIMFLAERKTWDPLPQNILVGVDLTMIDPRDSPGTLWFLNWPDNQLCYDDENNVFRKAKNGYWKCVDACRIQTGTSILGVKLCLEFHEGQTPCGTRSGLMMYEYLIEQNDELNLPQAYKSLCRMFLQKDRKIVEDEHISLNLGVHHNFLGSYSQYLAEIQRQNMVMNSQAVSSDKKSIFIRELDERKSKKCSTKITRSSTRLYRQKIPHIWCLRHSVSRKWFRESMFRVIDKLAKLLESVLLDLATVRQKINKGKKRIWKMEGKLEKAQIQHLTDFNNKYGPSIRQSVETAEHNNCALRCLNNYLELMIEEPRFSSIAYVRLDSQVKKLDKENTSAMDLSSSLHQMLQKLNLRVQDEEVWVSQLGSNLQASFRKIMDTSSEIGKLEDEVLQLKVDIAEFAPGEVTSCAVYEMIKTLQIVELFMNNSTRHLKLIDGINSEMREFGSIFNGKVRCLVRFARYQQTIMEKSTQINLFQIINFLGDIRAKVDKMTQMYGLSEVVPIVSNQFIEGSFNADAYAFESLKEHSTDLCFSWRTRKFHNRLILPPVRQQTSGTRSYYATLSSVESLYKREYASYPTILKDKIGQPDEFLVNLSRAQLEDIVEDFYTRHKVKGSKRLNVCLDKMKNEGVISEESYMNPQAQSTERYKIKQYEELNLEIAMRERDKEEVSIVDKKCIGKKKKRRFRKKMRMKEHIFLTKIKKVIESHIMDGKVLIASFRVTTGYFRLLPHQIYKIPEEDPQYELNKKGNPCSHCVVVVGFGIRDGECYLIYLNSYGTSWGHDGFGRIYLDSVRKLFLAQV

SEQ ID NO: 107893 - protein, 90 aa, Oryza sativa
  Clone ID: PAT_MRT4530_121C.1.pep
GAQDAEVDPSRDDIPPQPLIDNLRKELQRSLGLRLFFFDMIREHEKKVGSYVIGITLFGGYRKMSGYEHIVLDFLLSLAHIKSKRLLIGT

SEQ ID NO: 107894 - protein, 1673 aa, Oryza sativa
  unsure (1)..(1673): unsure at all Xaa locations
  Clone ID: PAT_MRT4530_12200C.1.pep
MYTSDQSIIYSNSRALGYGQAEQCTQMAGSINRRGLDLTGFVLELRGMCVVLGYPHGVDYQGKRLPEQEGDDAEPHAAWEITAVILTGSPERTSLVVTVGGDSFSAACQNAALLAIGTLHQCYPNELQHSPYRYHPCRGGARDYATFRDASSEDDATIMHLARMVEAYDAAHIDFHQMVRRGLVENNMKILELRQENLQLKKDLDAVDAQLRQLKIAQGEVCRPKRRRVCRSLKITARKSTSRPELVRQSLAWTCFVETPRAEPAPVVPQEDGASGVGSTEDVLLLXSMVTTRRSAATGEGSHPEGSNHNNHGSPPPPPPPPPPPPPDTNSILTQILAXQANMMAAFLHHIQNPPQHNAPPPPPQHSKLAEFLRIRPPTFSSSNNPVDALDWLHAVGKKLDTVQCSDEEXVIFAAHQLQGPASLWWDHFQAMQPEGQPITWARFTAAFRRTHVPAGVMALKKREFRELKQGNRSVMEYLHEFNNLARYALEDVREDEEKQEKFLAGMDPELSVRLVSGDYLDFQRLVDKSIRLEAKHKELESHKRRLANFRNQQGANQKVRYTATXNPYPGRSSSQQQQQQQPRSAPRPQFVVRVPQPQQQQSQQGTRAPRPPTPAVQPGQGRRDVQGQQCLCFNCFEPGHFADKCPKPRCQQGQAPPRSNHGGKDVIRGRVNHVMAEDVLTTPDVIVGTFLIHSIPATILFDSGASHLFIFVPFVGRNQLGVERLRNPLLITTPGGVMTAKYYSPAVPIEIQGIPFSSDLILLDTKNLDVILGMNWLAQFQGVVDCARRTVTLYRGPEQPVVFFAPPTSVGSSELHQIRLSEIPIIREFGDVFPEELPGMPPKREIEFRIDLALGTTPLYKRPYRMAANELAEVKKQLEELKEKGYIRPSTSPWGAPVIFVEKKDKTKRMCVDYRALNEVTIKNKYPLPRIDDLFDQLKGATVFSKIDLRSGYHQLRIREEDIPKTAFTSRYGLYEFTVMSFGLTNAPAFFMNLMNKVFMEYLDMFVVVFIDDILVYSQSEEDHQHHLRLVLGKLREHQLYAKLSKCEFWLSEVKFLGHVISAKGVAVDPETVTAVTDWKQPKTVTQIRSFLGLAGYYRRFIENFSKIARPMTQLLKKEEKFVWSPQCEKAFQTLKERLVSSPVLILPDTRKDFMLYCDASRQGLGCVLMQEGHVVAYASRQLRPHEGNYPTHDLELAAVVHALKIWRHYLIGNRCEIYTDHKSLKYIFTQSDLNLRQRRWLELIKDYDVGIHYHPGKANVVADALSRKSHCNTLEVRGIPPELNQQMQALNLSIVGRGFLATLEAKPTLLDQIREAQKNDPDMRELLKNMKQGKAAGFTEDEHRTLWNGNRMCVPDDRELKQLILQEAHESPYSIHPGSTKMYLDLKGKYWWVSMKREIAEFVALCDVCQRVKAEHQRPAGLLQPLQVPEWKWDEIGMDFITGLPKTQGGYDSIWVVVDRLTKVARFIPVKTTYGGNKLAELYFARIVSLHGVPKKIVSDRGSQFTSHFWKKLQEELDFGKTWDKSLPYAEFSYNNSYQASIQMAHYEALYGRKCRTPLLWDQFGESQVFGTDILREAEAKVRTIRDNLKVAQSRQKSYADNRRRNLEFAVDDFVYLRVTPLRGVHRFQTKGKLAPRFVGPFRIIARRGEVAYQLELPASLGNVHDVFHVS

SEQ ID NO: 107895 - protein, 1341 aa, Oryza sativa
  unsure (1)..(1341): unsure at all Xaa locations
  Clone ID: PAT_MRT4530_12201C.1.pep
MSSGTNEGYTGCGSVVEMSWHRAGVLLLGAQSCLPVPGVPAVGGIGSMYTSDQSIIYSNSRALGYGQAEQCTQMAGSVSRRGLDMTGFVLELRGMCVVLGYPHGVDYQARPLPEQDCDDAEPHAGWEVTAVILSGSPERTSLAVTTGGDSFPAACQSAALLAIGTLHQRYPDELQHSPYRYHPRRGGARDYATFRDASSEDDATLVHLACMVEAYDAARIDFHQMVRRGMVENNMKILELRQENLQLKKDLDAVEAQLHQLKIAQGEVCRPKRRRVCRSQKITARKSTSRPELVRQSLAWTCFVETPRAEPAPVVPQEGEASSVGSTEDALLLTFHXTTRRSANTGDGNQPEGSNHHHQGSPPSPSSSPSPPPPDTNAILTQILTQQANMMTAFLHHIQNPPQHNAPPPPPQHSKLAEFLRIRPPTFSSSNNPVDALDWLHAVGKKLDTVQCSDEEKVIFAAHQLQGPASLWWDHFQATQPEGQPITWTRFTAAFRRTHVPAGVVALKKREFRELKQGNRSVMEYLHDFNNLARYAPEDVREDEEKQEKFLAGMDPELSVRLVSGDYPDFQRLVDKSIRLEAKHKELEWHKRRLANFRNQQGANQRVRYTNPYPGGSSSQQQQQQQQPRSAPRPQFVVRVPQPQQQQSQQGTRAPRPPTPTVQPGQGRRDASGPQRLCFNCFEPGHFADKCPKPRRQQGQAPPRSNNGGKDVIRGRVNHVTAEKVLTTPDVIVGTFFIHSIPATILFDSGASHSFISVPFVGRNQLGIERLRNPLLITTPGGVMTAKYYSPAVPIEIQGIPFPSDLILLDTKNLDVILGMNWLAQFQGVVDCARRTVTLYRGPEQPIVFFAPPTSVRSSELHQIGLSEIPIVREFGDVFPEELPGMPPKREIEFRIDLAPGTTPLYKRPYRMAANELAEVKKQLEELKEKGYIGPSTSPWGAPVIFVEKKDKTKRMCVDYRALNEVTIKNKYPLPRIDDLFDQLKGATVFSKIDLRSGYHQLHIREEDIPKTAFTTRYGLYEFTVMSFGLTNAPAFFMNLMNKVFMEYLDKFVVVFIDDILIYSQSEEDHQHHLRLVLGKLREHQLYAKLSKCEFWLSEVKFLGHVISAKGVAVDPETVTAVTDWKQPKTVTQVRSFLGLAGYYRRFIENFSKIARPMTQLLKKEEKFVWSPQCEKAFKTLKEKLVSSPVLILPDTRKDFMVYCDASRQGLGCVLMQDGHVVAYASRQLRPHEGNYPTHDLELAAVVHALKIWRHYLIGNRCEIYTDHKSLKYIFTQSDLNLRQRRWLELIKDYDVGICHRPGSRDVMAQGRCPAAGGSVLPTCPGGSGRRWDWVGTLVYG

SEQ ID NO: 107896 - protein, 84 aa, Oryza sativa
  Clone ID: PAT_MRT4530_12202C.1.pep
PLGVERGFGLKPPPPEGPPVKIKVGPSFFLGGKGPPLGGVPRPMYKKRGFPPNHQEKIWPPGGVFVTTVWVWLENPGSFRPGIA

SEQ ID NO: 107897 - protein, 1746 aa, Oryza sativa
  unsure (1)..(1746): unsure at all Xaa locations
  Clone ID: PAT_MRT4530_12203C.1.pep
TAGPTWQPRGAPEGGLAGTADGRRRTRAPMVAAGDQRRDGAAPERGEGRGKXKQRSSAHPGTTRTAETTTGAEEGGGAVRIDEDGGAPTVGGRNGGADEVDEDAAKPMEVTPRREEVRGDDGGELKLGGDGGERGRRREHESDGESPFFPPSLLGRLGPLPSLSLLSPAAQSASSPPRAADGRARPPPSLTGGAHPHARKERPLVILAGSPERTSLTVTAGGDSFPAACQSAALLAIGTLHQRYPDELQHSPYRYHPRRGGARDYATFRDASSEDDATIMHLARMVEAYDAARIDFHQMVRHGMVENNMKILELRQENLQLKKDLDAVEAQLHQLKIAQGEVCRPKRRRVCRSQKITARKSTSRPELVRQSLAWTCFVETPRAEPAPVVPQEGEASGVGSTEDALLLTFRPGPSQQRNAATGDGNQPEGSNHNHQGSPPPPPPPPPPPPPPDTNAILTQILAQQANMMTAFLHHLQNPPQHNAPPPPPQHSKLAEFLRIRPPTFSSSNNPVDALDWLHAVGKKLDTVQCSDEEKVIFAANQLQGPASLWXDHFQATQPEGQPITWARFTAAFRRTHVPAGVVALKKREFRELKQGNRSVTEYLHEFNNLARYAPEDVREDEEKQEKFLVGMDPELSVRLVSGDYPDFQRLVDKSIRLEAKHKELESHKRRLANFRNQQGANQRVRYTNPYPGGSSSQQQQQQQQPRSAPRPQFVVRVPQPQQQQNQQGTRAPHPPTPTVQPGQGSRHAQGPQRLCFNCFEPGHFADKCPNPRRQQGQAPPRSNNGGKDVIRGRVNHVTAEDMLTTPDVIVGTFLIHSIPATILFDSGASHSFISVPFVGRNQLGVERLRNPLLITTPGGVMTAKYYSPAVPIEIQGIPFPSDLILLDTKNLDVILGMNWLAQFQGVVDCARRTVTLYRGPEQPVVFFAPPTSVSSSELHQIGLSEIPIVREFGDVFPEELPGMPPKREIEFRIDLAPGTTPLYKRPYRMAANELAEVKKQLEELKEKGYIRPSTSPWGAPVIFVEKKDKTKRMCVDYRALNEVTIKNKYPLPRIDDLFDQLKGATLFSKIDLRSGYHQLRIREEDIPKTAFTTRYGLYEFTVMSFGLTNAPAFFMNLMNKVFMEYLDKFVVVFIDDILVYSQSEEDHQHHLRLVLGKLREHQLYAKLSKCEFWLSEVKFLGHVISAKGVAVDPETVTAVTDWKQPKTVTQVRSFLGLAGYYRRFIENFSKIARPMTQLLKKEEKFVWSPQCEKAFKTLKEKLVASPVLILPDTRKDFMVYCDASRQGLGCVLMQDGHVVAYDSRQLRPQEGNYPTHDLELAAVVHALKIWRHYLIGNRCEIYTDHKSLKYIFTQSDLNLRQRRWLELIKDYDVGIHYHPGKANVVADALSRKSHCNTLNVRGIPPELSQQMEAPDTXAIVGRGFLAAWRXXXXXXXXXXXXXXXXXXXXXXXXXXXXXXXXXXEFTEXXTLCDVCQRVKAEHQRPAGLLQPLQVPEWKWDEIGMDFITGLPKTQGGYDSIWVVVDRLTKVARFIPVKTTYGGNKLAELYFARIVSLHGVPKKIVSDRGSQFTSHFWKKLQEELGTRLNFSTAYHPQTDEQTERLNQILEDMLRACVLDFGKTXDKSLPYAEFSYNNSYQASIQMAPYEALYGRKCRTPLLWDQVGESQVFGTDILREAEAKVRTIRDNLKVAQSRQKSYADNRRRNLEFAVDDFVYLRVTPLRGXKGKLAPRFVDPFRIIARRGEV

SEQ ID NO: 107898 - protein, 77 aa, Oryza sativa
  Clone ID: PAT_MRT4530_12204C.1.pep
IVVHSFCFKTFIFRCYASCIHYMKKNLGHLLLSVKTLASHCMHKYFYMLAYSCSHFLISRLLFISCVFMALYDGFFF

SEQ ID NO: 107899 - protein, 95 aa, Oryza sativa
  Clone ID: PAT_MRT4530_12205C.1.pep
MADGYRRRALTVASTLVPATCGSAGGMPCVPAARGGGRSRSGYAAAAPLYTRELPGESMWTIAEELGSGAVRVARVQKQSSTAHGMQLRPYMQDN

SEQ ID NO: 107900 - protein, 62 aa, Oryza sativa
  Clone ID: PAT_MRT4530_12206C.1.pep
MACELVALDMETREFEVIVQGPPCRHGEGKMTVLELHGALCVACSDMVNCDAVTALGRSSTV

SEQ ID NO: 107901 - protein, 107 aa, Oryza sativa
  Clone ID: PAT_MRT4530_12207C.1.pep
MRTSLTYRPRQKLCSAPSSPSPSLRCNANRRAAADFRFPSIAPPNRCLQIDVASARHNRRQVIVVLRRIPTLPLRCILRLTVAHLYSPSPLIPCQNNCFPLSHRTPS

SEQ ID NO: 107902 - protein, 115 aa, Oryza sativa
  Clone ID: PAT_MRT4530_12208C.1.pep
MAAAQIRRQQPGQQRQRQERRTEGVVAARKDCPSQRAYVATEDGYNSTSDIEDGEKEEKKDEEEKALSIAPCMLEECSIDQAPVISEDEKKKVGLQEGKCCGFDYKDFRIQLYGH

SEQ ID NO: 107903 - protein, 53 aa, Oryza sativa
  Clone ID: PAT_MRT4530_12209C.1.pep
YHYSCTDCFEILLCCAIIYEIVNSKMCTCNYFQGSNGSYCELIMVLMMYPEIS

SEQ ID NO: 107904 - protein, 578 aa, Oryza sativa
  unsure (1)..(578): unsure at all Xaa locations
  Clone ID: PAT_MRT4530_1220C.1.pep
WRRHSPEFDSLLVAGPRLGPLKQAHARLVVAGHGXSLPLVTKLATLAVAAGAAPYAHLLAASHPACDSFLLSSLARAAAHRGLPGEAIAFYGRLLAAALPFSSFAFTAAAKACADLSALRTGMAVHAHSVLLGFGSDRFVQTALVVLYSKCGQLPVARKLFDAIRDRSVVAWNAMISGYEQNGLAERAIEVYREMQVAQVVPDSATFVATLSACAQAGALDLGREVERRIVSDQMDVSVFLGSALVNMYARCGLVSKARDWFDRLQERNVVTWTSMIAGYGMHGHGREAIKLFHLMRREGPTPNDVTFVAVLAACAHAGLVNEGRNAFDSMKRVYGLVPRAEHYCSMVDMYGRAGLLDDAMQFICDSIPEEPGPEVWTAMLGACKMHKNFNLGVEVAERLIALEPENPSHRVLLSNIYALSGKMNHVEKVRNVMIKRRLKKQIGYSLIELGGTSHLFRMGEKSHQQTREIYRYLEELIHRISDAGYVPETDSVLHELEEEEREVALRYHSEKLAVAYGLMMSSGSTAPIRVIKNLRICGDCHLAIKFMSSVESREIIVRDKHRFHHFKDGKCSCLEYW

SEQ ID NO: 107905 - protein, 378 aa, Oryza sativa
  unsure (1)..(378): unsure at all Xaa locations
  Clone ID: PAT_MRT4530_12210C.1.pep
MASGTDEKAKMEGLTSAAAFVEGGIQDACDDACSICLEAFCESDPSTLTGCKHEFHLQCILEWCQSVCQELLEAVXRERNVRTNQTRNTTIFHHPALGDFEVQHLPVVGNDAELEERILQHLAAAAAMGRSHHLGRREGHRGRSGSHGRPQFLVFSSHPNMPSAGSVSSSSVQGEVDNESSPVHTTGELSLHANTHEEAGNQSPGMLTYDADQDAVVSSGNSTPVSSPRFFNRRHSTGQSTPVNNDRAGPSDLQSFSDSLKSRLNAVSMKYKESITKSTRGWKERLFSRHSSVADLGSEVRREVNAGIASVSRMMERLETRGSNGRTSDGPAISTSEVIPSTESSNERVTENNPTTAATSSGNTSASSAPCVTTTGSN

SEQ ID NO: 107906 - protein, 92 aa, Oryza sativa
  Clone ID: PAT_MRT4530_12211C.1.pep
MCGTLSKGLFRLMSFSTIPFLGIVAKNVAMFSLLPNFSKYIRNPVKILAILPTYQNFGIAYQNLQGLFWLQSEQVLKVDIFSTKFTIMLFFC

SEQ ID NO: 107907 - protein, 67 aa, Oryza sativa
  Clone ID: PAT_MRT4530_12212C.1.pep
MAPEHQSVLFNCFKIGQSFDIKKKKKKKKKKKKKKKKKKKKKKKKKKKKKKKKKKKKKKKKKRGGPF

SEQ ID NO: 107908 - protein, 1554 aa, Oryza sativa
  Clone ID: PAT_MRT4530_12213C.1.pep
MASPGEMSVSNPLRFQGFPCNLGKRNGFIAARSSGLGRSRIAQQCFQQHHICYPGVRRASVPNVRMLPAPGALVSRGVDSSLVPKTGNASEAGVIQLYRIPYLQESETIELLRQVQAKVSSNIVGIKTEQCFNIQLDNALTPEKLATLQWLLAETYEPDKLQAQSFLEEEISRSPYSVIVEVGPRMTFSTAFSTNAVSICKSLSLMEVTRLERSRRYLLCLDPGNGPLDESQLNDFAALVHDRMTECVYPNKLTSFHSDVVPEPVRIVPVIERGREALEEINVKMGLAFDEQDIKYYTHLFRDDIKRNPTTVELFDIAQSNSEHSRHWFFNGKLVIDGETMPKTLFQLVKSPLKANPDNNSVIGFKDNSSAIKGYPANQLRPTIPGSTSPLSVMMRELDILFTAETHNFPCAVAPYPGAETGAGGRIRDTHATGKGSFVVASTAGYCVGNLRMEGSYAPWEDPSFSYPSNLASPLQILVDASDGASDYGNKFGEPLIQGFTRNFGMRLLNGERREWLKPIMFSGAIGQIDHAHISKGDPEIGMLVVKIGGPAYRIGMGGGAASSMVSGQNDAELDFNAVQRGDAEMAQKLYRVVRACAEMGESNPIISIHDQGAGGNCNVVKEIIYPKGAEIDIRSIVVGDHTLSVLEIWGAEYQEQDALLVKPESRSLLESLCERERVSMAVIGTIDGCGKIVLIDSAAMEHAKINGLPPPTPVEDLELEKVLGDMPQKTFEFKRVSLVSEPLDIAPGVTIMDALKRVLSLPSICSKRFLTTKVDRCVTGLVAQQQTVGPLQLPLADVAVIAQTYTDLTGGACAIGEQPAKGLLNPKAMARLAVGEALTNLVWAKVSSLSDVKASGNWMYAAKLDGEGADMYDAAVALADCMIQLGIAIDGGKDSLSMAAQCDGEVVKAPGNLVISAYVTCPDITLTVTPDLKLGNDGVLLHIDLGKGKRRLGGSALAQAFDQIGNDCPDIDDVPYLKKAFEAVQELLSQRLISAGHDISDGGLIVSVLEMAFAGNCGVKLNIDSEDSGLLQALFAEELGLLLEVHLKDLSVVKQKLEAGGISANVIGQVTASPDIELVVDGRLHLKEKTSDLRDIWEETSFQLEGLQRLKSCVRLEKEGLKHRTSPSWSLSFTPKFTDEKLLTASSKPKVAIIREEGSNGDREMAAAFYAAGFEPWDITMSDLLAGKSSLEEYRGIAFVGGFSYADVLDSAKGWAASIRFNQPLIQQFQNFYNRPDTFSLGVCNGCQLMALLGWVPGSDVGSSLGSGGDMSQPRFIHNESGRFECRFTSVSIGTSPAIMFKGMEGSTLGIWSAHGEGRAFFPDENVLASVVNSNLAPVRYCDDANNITEVYPFNPNGSPLGIAALCSPDGRHLAMMPHPERCFMMWQYPWYPKEWQLEKCGPSPWLRMFQNARECCLTYRDLIDGHMMTEAWSYGLFWILKPCIIFALSFAAGLKLGILFCYWIFVTAQQFAVLLLMNRIVEGVDLHLIVRLFTGYCQWLLGVLCCCLTTQPNTKRFHFTVRSIHMGIDTRELEKSKSFLSIWDELVIELVC

SEQ ID NO: 107909 - protein, 59 aa, Oryza sativa
  Clone ID: PAT_MRT4530_12214C.1.pep
EDLLQSRMLLPRDVPFCNLSIQLARIISKCPINMICLKPSCFSCSCRVIVDQLGASVQS

SEQ ID NO: 107910 - protein, 50 aa, Oryza sativa
  Clone ID: PAT_MRT4530_12215C.1.pep
SKLMIRKTSFLTIKYQLPQFDLVPIHSQSTSGRNRVCAKKAPIEVVCVNA

SEQ ID NO: 107911 - protein, 181 aa, Oryza sativa
  Clone ID: PAT_MRT4530_12216C.1.pep
MFVSTSPSVKPSTRWPRCSLFWRRRHGPPVWRHLGVVVVVPWRLHVERPALQPISRPPPADAAATTAAAAAGATAAFVLPLAGDGAQGGEAEAAAIAAAASLSGGGGEAEGGREAGGRGCSVKAVVSPLPSSADVKRPPAAESVPEPARAEEEAAVMQLVNRPGNMHRLIDRWSVLSTTET

SEQ ID NO: 107912 - protein, 100 aa, Oryza sativa
  Clone ID: PAT_MRT4530_12217C.1.pep
IKIESSCHYILGINKIPIKHKFTTKENYYIPLRNLILLRGQDLKQIIETASKWNLGLKLLRQNKRINCKKWESLVSNSFQTPSTPRYIHTGIAEMYVQIF

SEQ ID NO: 107913 - protein, 263 aa, Oryza sativa
  unsure (1)..(263): unsure at all Xaa locations
  Clone ID: PAT_MRT4530_12218C.1.pep
MPNYMESSYELTKGNKRLSSMNINDWNYCNERPNSLAPSLYMRINGNWAIDLHPVISTQAQLELDMLMTTLQSQQIHPERPDNRSCTLSPVGFTTTAYYELITYHGILWRPAHFIWIKAIPNTCKIFLWLAFRGRLNTNDNRVKKCWASDPHCAVCPAIETANHIILRCKLATEIWNKLNLLDQAIQSADILQFTEHVLGILPTQLKLGWPICFAACSHSLXKARNHRTFREEELSVTNVTHQIKDCLHLWKNRVKPHVSRHM

SEQ ID NO: 107914 - protein, 87 aa, Oryza sativa
  Clone ID: PAT_MRT4530_12219C.1.pep
TPPAAPPPLGVARGPPLATPSSALASPSAARRRQGRPEPPPCRSPRSFLLLSPLPTPIHHGRRRGRPLPPPPPPSSPPCTRGRPSSP

SEQ ID NO: 107915 - protein, 42 aa, Oryza sativa
  Clone ID: PAT_MRT4530_1221C.1.pep
GLPYGRFVLETHTIGHIVFGLGDYRSAWYSPPGLEIVATEAN

SEQ ID NO: 107916 - protein, 80 aa, Oryza sativa
  Clone ID: PAT_MRT4530_12220C.1.pep
MEMKPARRKGSSSSAAEVDNDGTASARSPSPSRSTSAIVLACCSRHLLADEVAEAQFLEMVTADFRPDLTIFCVRATAFQ

SEQ ID NO: 107917 - protein, 142 aa, Oryza sativa
  Clone ID: PAT_MRT4530_12221C.1.pep
MAEDDYNDMDMGYEDEPPEPEIEEGAEEEPENNNEDAVDDVVGAEDDKEQEKTARPRKTSKYMTKYERARILGTRALQISMNAPVMVELEGETDPLEIAMKELRARKIPFTIRRYLPDGSYEDWGVDELIVEDSWKRQVGGG

SEQ ID NO: 107918 - protein, 234 aa, Oryza sativa
  Clone ID: PAT_MRT4530_12222C.1.pep
MAMAAAAGDGDEHLLSLFASALSHRRFGDQELRLLDAALSAGADVPSLLHTRSSARCLLRKAAAQAFSSVPDLGTTLSTADFFARAFALAGDVESCLAMRYEALLLRQAEYSDDLHLQVSNEEWLTFAKDSLDNGFYTIASKAFANALVRIDPNHPEYLDSTNSILKKDKINDISGLQNLAKSLSALRSGEHFRAMGILILMSWMGIWDPETMRVSLASSTAVSLGTFIMHGTK

SEQ ID NO: 107919 - protein, 408 aa, Oryza sativa
  unsure (1)..(408): unsure at all Xaa locations
  Clone ID: PAT_MRT4530_12223C.1.pep
DSIPLHPQNLWIPPKPPPPSAKPAASSKVSPAKPRKPKAKAASVPPSSPPPVPLGPPPRXLPPPPPAPPPCALGPVGPPAAPPQPPAPEPTPSPCPARSTTPSAPAPPRXPPLPPPRRLPRRPTGKLIRRRRPSFLRGEMPCPPPPPAMPCPPPSPFPTHASLPPNLQSAAISPGIPNAGHGQPPPPLAAPPQPQXPRPPPPPPPGRGAPXPGGRCGSSSPPGYPPSVRRSCRCSAARSPPPPPPWPEAGTTRFPPPPPPSRPTSRRTGPPLTPPPARTPPRPVSAGDWRSPLELPFLWVGDLHPSLVTSLLRSLSPSPRLLAATDRVDRRIRAAVPSISDRLRRVQEAFISAEVSGAADVEAFLEELKDVALDANRLRRGVLSELVAAAGGYQAALFLEALSRFVLS

SEQ ID NO: 107920 - protein, 57 aa, Oryza sativa
  Clone ID: PAT_MRT4530_12224C.1.pep
MEKTERERREELELRVLARHKKEERAEYQARKLARAQRAKDAGSEAARKGKYPWCTQ

SEQ ID NO: 107921 - protein, 71 aa, Oryza sativa
  Clone ID: PAT_MRT4530_12225C.1.pep
AFQWTKWEQQNAKGGGGPKEPIHNNNGVLKLFSFTSKRNVLLFLSSYKGKRSLLGPMVGVVVKTMFCFHRQ

SEQ ID NO: 107922 - protein, 65 aa, Oryza sativa
  Clone ID: PAT_MRT4530_12226C.1.pep
TSYAIQALALRHSADSAKTTRAFSNNFFKWFNILLLLDDRRIKPKDNNVWLLTILKRFDQTMCSE

SEQ ID NO: 107923 - protein, 356 aa, Oryza sativa
  Clone ID: PAT_MRT4530_12227C.1.pep
MLSSSPSAAAPGIGGYQPQRGAAVFTAAQWAELEQQALIYKYLVAGVPVPGDLLLPIRPHSSAAATYSFANPAAAPFYHHHHHPSLSYYAYYGKKLDPEPWRCRRTDGKKWRCSKEAHPDSKYCERHMHRGRNRSRKPVESKTAAPAPQSQPQLSNVTTATHDTDAPLPSLTVGAKTHGLSLGGAGSSQFHVDAPSYGSKYSLGAKADVGELSFFSGASGNTRGFTIDSPTDSSWHSLPSSVPPYPMSKPRDSGLLPGAYSYSHLEPSQELGQVTIASLSQEQERRSFGGGAGGMLGNVKHENQPLRPFFDEWPGRRDSWSEMDEERSNQTSFSTTQLSISIPMPRCGSPIGPRLP

SEQ ID NO: 107924 - protein, 79 aa, Oryza sativa
  Clone ID: PAT_MRT4530_12228C.1.pep
LIQHYARRHATAVVSLASLSQPAARRILNNGWPTQAQAWGSAPGGIACPHQSISHASFVLGSCMHASSSNHHHIMLIII

SEQ ID NO: 107925 - protein, 78 aa, Oryza sativa
  Clone ID: PAT_MRT4530_12229C.1.pep
MARKSESQTRAGRVFELQEEEQGLHLLELVLQLKNQVRSITPSRRISCRRKRITSSRSSKMTESRSRNQTEKNQRSTK

SEQ ID NO: 107926 - protein, 88 aa, Oryza sativa
  Clone ID: PAT_MRT4530_1222C.1.pep
MDLNTAKSMMLDDSNISPRKKTFTTRKNTMLSISRNINPADQEMLKTYKRRRVNRASIPQLLDDTGGETIFGRSTRFHNSPGYIKNRD

SEQ ID NO: 107927 - protein, 161 aa, Oryza sativa
  Clone ID: PAT_MRT4530_12230C.1.pep
FLARYSRDKVERALLPLLAHVAGTGDACNLQDVFLRLTFDTTTTLVFGVDPGSVAIDLPEVPFARAMDDAMTMLLLRHIVPLSWWRLARRLGIGYERKMPVAWRTMDRFVADTIVKRRAEKARTGIDDSADLLSSYINDDEEDAGTVDAFLRDTTINLMLC

SEQ ID NO: 107928 - protein, 195 aa, Oryza sativa
  unsure (1)..(195): unsure at all Xaa locations
  Clone ID: PAT_MRT4530_12231C.1.pep
ARGKFIMASGILVKILLHTDVXEYLEFKVVDGSYVFMGGKVHKVPANDTEALKSDLMGLFEKRRAKNFFTLSQNYDVNNPKTHSGFPDLNKTTMKEIFAHFGLVDDTINFIGHSLALHRDDDYLTQPAKPTIEKCRLYAESLSRFGKSPYIYPLYGLGELPQGFARLSAIYGGTYMLNKPYEGVVFDENGRVSGV

SEQ ID NO: 107929 - protein, 138 aa, Oryza sativa
  unsure (1)..(138): unsure at all Xaa locations
  Clone ID: PAT_MRT4530_12232C.1.pep
EAFDSLRSTCLKLNPEKCVFGVPAGNLLGFMVLSRGIEANPEKXKLRDVQCVTGCMAALSRFISRLGERALSLFKLLKRSGPFVWTEEAEXALNQLKAYLTSPPILVAPRPEEPPLLYLAVTPHAVSAALVASINKDK

SEQ ID NO: 107930 - protein, 70 aa, Oryza sativa
  Clone ID: PAT_MRT4530_12233C.1.pep
ITSDSLLMHTGLKGFVDPLLKKSDIGGDPNINLEQLCRLLKTASIRSLFVLTPRSVHRSYLFIAVHSSQK

SEQ ID NO: 107931 - protein, 107 aa, Oryza sativa
  Clone ID: PAT_MRT4530_12234C.1.pep
SFELPVRRRKRGATRGRRRGNHELRSGARSGEAAGGSVRRGGGRRQVAGEARGAASASSRAGAATGQLDGKGRMLAKSVAHTWEHASQRQDQPSNRQAAAGQRLQNN

SEQ ID NO: 107932 - protein, 263 aa, Oryza sativa
  Clone ID: PAT_MRT4530_12235C.1.pep
MVMLRLGRVNTVVISTADAAREVMRDQDSAFASRPRLTVPRRLLYGCTDIAFAPHGAYWRAARRASVLHLLGPARVRGYRAVREEEVGELLQLVEVAASGGVMRLSELLSAFAKDVAVRNVLGIRGGVKTEDEQVGEVEPGGDEEDRELLALGRRPRHWQPAIPRCRSTTYPDKEDFSDLEGCHHLCAHLKRVGMTASEGEMSEVPSNRHQGCIWDVHAKPQPGWLRLWFGRTRGFGRTWARPIWPSLWPKSFPGNAGFGQQE

SEQ ID NO: 107933 - protein, 172 aa, Oryza sativa
  Clone ID: PAT_MRT4530_12236C.1.pep
MACGVATGGGLEQAGFAGMRDVVVSCRRGRLEWKSERAGAVGGGPVLAAAHAKEGVVASEWAPLAVTDTFLPQILSSVGLLFLSGGDSLETSQWLVLPAMSAASVISQWDPRVIGRRLISAGRAKSGTIQTLGFEIRVDPLSGSGDRPIGWSCGSARSRVITSFSEKKFCSA

SEQ ID NO: 107934 - protein, 211 aa, Oryza sativa
  unsure (1)..(211): unsure at all Xaa locations
  Clone ID: PAT_MRT4530_12237C.1.pep
TSFRPLPVSPWPFALARARFPSPGRNLGLGQKSGLALDPSWADFDPADSGRPISRVLIGRPSVEIEETNPPXSLSPRPXNPSPFPSLPSLFVALPSAPRCSLHLSQPSPEXAALAASAAPFPPSGGDGAPPLSSGGGALPPASGGDALPHHRQRRRRPVGVPTAATLSPPPDPAGGSRQRPTVPAAATATTSFDLFFFWIWIYLCTCFLRF

SEQ ID NO: 107935 - protein, 59 aa, Oryza sativa
  unsure (1)..(59): unsure at all Xaa locations
  Clone ID: PAT_MRT4530_12238C.1.pep
MAAAAAAASASHLLLPAHASTFPHAXEHVRRNWHRPQRQVRSXRAGASNGGHDRRCKTT

SEQ ID NO: 107936 - protein, 123 aa, Oryza sativa
  unsure (1)..(123): unsure at all Xaa locations
  Clone ID: PAT_MRT4530_12239C.1.pep
GILARIRIVSVYVKEIYHVIETESTDGRNPTRTRLGLYHIVRGPISPSSTWRSTDPRYIRDPLGXDLGHRILLPTHPPQPTEPERTGTKSPGDLVGPTRLRSRRSSYQRTPIPSISGLRVSPT

SEQ ID NO: 107937 - protein, 58 aa, Oryza sativa
  Clone ID: PAT_MRT4530_1223C.1.pep
GRQLHPVAECVVGSERFIRLHVPSPLVFDSIILASASPQSVPERENIGLTLPIRETNK

SEQ ID NO: 107938 - protein, 89 aa, Oryza sativa
  Clone ID: PAT_MRT4530_12240C.1.pep
MAGYTANAGSGYPYGGAGGYGAPAPSYGCSHGPFGPAYGAKPTKEGKTSCSAAPYYGGGGGYGAPTSTQPYSSGGGYSAPACTRRTARR

SEQ ID NO: 107939 - protein, 119 aa, Oryza sativa
  unsure (1)..(119): unsure at all Xaa locations
  Clone ID: PAT_MRT4530_12241C.1.pep
GTRLVLKIPDSSVGIFFVLQGLVSSHGYXNMYTRGHCKXSGSIQLLLAHRYPLYRGFYLSSGGIWHLTRGCIGSVXSPAKGXVLCSAGPGESIGYVGVVXGCIASISWIALVWLIYLPT

SEQ ID NO: 107940 - protein, 207 aa, Oryza sativa
  unsure (1)..(207): unsure at all Xaa locations
  Clone ID: PAT_MRT4530_12242C.1.pep
MSTSRRRTLLKVIVLGDSGVGKTSLMNQYVHKKFSQQYKATIGADFVTKEVLIEDRLVTLQIWDTAGQERFQSLGVAFYRGADCCVLVYDVNSKRSFDTLNTWHDEFLNQASPSDPKTFPFILLGNKIDIDAGNRRAIPEKKQXEWCVSKGNIPYFETSAKEDRNVDSAFLSVAKLALEHERDQDIYFQTVVPDPVPEAEQKSGCAC

SEQ ID NO: 107941 - protein, 319 aa, Oryza sativa
  Clone ID: PAT_MRT4530_12243C.1.pep
MSTSRRRTLLKVIVLGDSGFTAVVGTLICLTLVRYVHKKFSQQYKATIGADFVTKEVLIEDRLVTLQIWDTAGQERFQSLGVAFYRGADCCVLVYDVNSNRSFDTLNTWHDEFLNQEPGGFGRLISPHLKCFSLSHPLSTAISASDRLTASSELEDQFEIFEHIRVFNVTTVTSTNTKDETLLLWSGFLLKDEGEILAEFIENFTASPSDPKTFPFILLGNKIDVDGGKSRVVSEKKAMEWCSSKGNIPYFETSAKEDRNVDSAFLSVAKLALEHERDQDISSLIFFGYSPSFFLAFSYFQTVVPDPVPEAEQRSGCAC

SEQ ID NO: 107942 - protein, 937 aa, Oryza sativa
  Clone ID: PAT_MRT4530_12244C.1.pep
MATASAPLQLATASRPLPVGVGCGGGGGGGLHVGGARGGGAAPARRRLAVRSVASDRGVQGSVSPEEEISSVLNSIDSSTIASNIKHHAEFTPVFSPEHFSPLKAYHATAKSVLDTLIMNWNATYDYYDRTNVKQAYYLSMEFLQGRALTNAVGNLELTGQYAEALQQLGHSLEDVATQEPDAALGNGGLGRLASCFLDSLATLNYPAWGYGLRYKHGLFKANHTKDGQEEVAENWLEMGNPWEIVRTDVSYPVKFYGKVVEGTDGRMHWIGGENIKVVAHDIPIPGYKTKTTNNLRLWSTTVPSQDFDLEAFNAGDHASAYEAHLNAEKPHYRDIIARFERRAGDSLSWEDFPSKVAVQMNDTHPTLCIPELMRILIDVKGLSWNEAWSITERTVAYTNHTVLPEALEKWSLDIMQKLLPRHVEIIEKIDGELMNIIISKYGTEDTSLLKKKIKEMRILDNIDLPDSIAKLFVKPKEKKESPAKLKEKLLVKSLEPSVVVEEKTVSKVEINEDSEEVEVDSEEVVEAENEDSEDELDPFVKSDPKLPRVVRMANLCVVGGHSVNGVAAIHSEIVKEDVFNSFYEMWPAKFQNKTNGVTPRRWIRFCNPELSAIISKWIGSDDWVLNTDKLAELKKFADDEDLQSEWRAAKKANKVKVVSLIREKTGYIVSPDAMFDVQVKRIHEYKRQLLNILGIVYRYKKMKEMSAKDRINSFVPRAKRIVKFITDVAATVNHDPEIGDLLKVVFIPDYNVSVAEALIPASELSQHISTAGMEASGTSNMKFAMNGCILIGTLDGANVEIREEVGEENFFLFGAEAHEIAGLRKERAQGKFVPDPRFEEVKRFVRSGVFGTYNYDDLMGSLEGNEGYGRADYFLVGKDFPSYIECQEKVDKAYRDQKLWTRMSILNTASSSKFNSDRTIHEYAKDIWDIKPVILP

SEQ ID NO: 107943 - protein, 61 aa, Oryza sativa
  Clone ID: PAT_MRT4530_12245C.1.pep
FFFFFFWSGGTGISKKVGNYQKRAVYISSGSGTNQNQSTEYSQAQEKLRATISTEGEVKHI

SEQ ID NO: 107944 - protein, 282 aa, Oryza sativa
  Clone ID: PAT_MRT4530_12246C.1.pep
MSTFTVICALYEAVLRHVRRRGAPPLRLDGGAESLRIAGSARRLMCTGRSRTGMLHLDPAVYNNGSFSLLALLAGLRWVFSRWQIDDGCRELLHRVSLTEITRAPPHADDRKNDDSGDCDGDSGVIAILPVSREVSGKYVVLWPAHGRWLFTVELDTMEVVERKSATDEHLGDELNMIGDSIRCSLWIVGICITLNVGSTVVPVILVEESAIATCWPPAGDGTPICMFPIWDDQIRLAIACLGICSMVRIKWCGLEHIAVVREAYLAGGSGNRNGGGPMGSE

SEQ ID NO: 107945 - protein, 1006 aa, Oryza sativa
  Clone ID: PAT_MRT4530_12247C.1.pep
ARGSLSLSLALTHLTLHARARQGATASAPLQLATASRPLPVGVGCGGGGGGGGGGGGGLHVGGARGGGAAPARRRLAVRSVASDRGVQGSVSPEEEISSVLNSIDSSTIASNIKHHAEFTPVFSPEHFSPLKAYHATAKSVLDTLIMNWNATYDYYDRTNVKQAYYLSMEFLQGRALTNAVGNLELTGQYAEALQQLGHSLEDVATQEPDAALGNGGLGRLASCFLDSLATLNYPAWGYGLRYKHGLFKQIITKDGQEEVAENWLEMGNPWEIVRTDVSYPVKFYGKVVEGTDGRMHWIGGENIKVVAHDIPIPGYKTKTTNNLRLWSTTVPSQDFDLEAFNAGDHASAYEAHLNAEKICHVLYPGDESPEGKVLRLKQQYTLCSASLQDIIARFERRAGDSLSWEDFPSKVAVQMNDTHPTLCIPELMRILIDVKGLSWNEAWSITERTVAYTNHTVLPEALEKWSLDIMQKLLPRHVEIIEKIDGELMNIIISKYGTEDTSLLKKKIKEMRILDNIDLPDSIAKLFVKPKEKKESPAKLKEKLLVKSLEPSVVVEEKTVSKVEINEDSEEVEVDSEEVVEAENEDSEDELDPFVKSDPKLPRVVRMANLCVVGGHSVNGVAAIHSEIVKEDVFNSFYEMWPAKFQNKTNGVTPRRWIRFCNPELSAIISKWIGSDDWVLNTDKLAELKKFADDEDLQSEWRAAKKANKVKVVSLIREKTGYIVSPDAMFDVQVKRIREYKRQLLNILGIVYRYKKMKEMSAKDRINSFVPRVCIFGGKAFATYVQAKRIVKFITDVAATVNHDPEIGDLLKVVFIPDYNVSVAEALIPASELSQHISTAGMEASGTSNMKFAMNGCILIGTLDGANVEIREEVGEENFFLFGAEAHEIAGLRKERAQGKFVPDPRFEEVKRFVRSGVFGTYNYDDLMGSLEGNEGYGRADYFLVGKDFPSYIECQEKVDKAYRDQKLWTRMSILNTASSSKFNSDRTIHEYAKDIWDIKPVILP

SEQ ID NO: 107946 - protein, 283 aa, Oryza sativa
  Clone ID: PAT_MRT4530_12248C.1.pep
MSTFTVICALYEAVLRHVRRRGAPPWAASSTGMLHLDPAVYNNGSFSLLALLAGLRWVFSRWQIDDGCRELLHRVSLTEITRAPPHADDRKNDDSGDCDGDSGVIAILPVSREVSGKYVVLWPAHGRWLFTVELDTMEVVERKSATDEHLGGPWCMTDPSIDGVVLVISTKEADELNMIGDSIRCSLWIVGICITLNVGSTVVPVILVEESAIATCWPPAGDGTPICMFPIWDDQIRLAIACLGICSMVRIKWCGLEHIAVVREAYLAGGSGNRNGGGPMGSE

SEQ ID NO: 107947 - protein, 55 aa, Oryza sativa
  Clone ID: PAT_MRT4530_12249C.1.pep
LSLVNSSTSVGPSKRIAALSRLLLLLLTIDRNREIVDLVQILCHHITPVEISRRR

SEQ ID NO: 107948 - protein, 120 aa, Oryza sativa
  Clone ID: PAT_MRT4530_1224C.1.pep
QDGCAGIPLSAAAGTRLSVASSACGRPAGGVPAPMRRARMARGAQGGVAPQGSRWRIRAAESPIYAAARARWLWAPELPVSLCPIAHFQLLTLMGFILVGVGMYVHFISKARMFIGSLRK

SEQ ID NO: 107949 - protein, 64 aa, Oryza sativa
  Clone ID: PAT_MRT4530_12250C.1.pep
FLFFFFFFFFFFFQKVLRLFSKSPGQRAFGTTTLNMLTVTNTKFHRLCFTFEVHDRASVYDEVC

SEQ ID NO: 107950 - protein, 56 aa, Oryza sativa
  Clone ID: PAT_MRT4530_12251C.1.pep
SHIEIDLVQCYKAYRCQGHFLTFQLYGNLENHHSLLMQHGIIISIHHLVRGTLKIS

SEQ ID NO: 107951 - protein, 275 aa, Oryza sativa
  Clone ID: PAT_MRT4530_12252C.1.pep
MDPRGSACFVVFAAAAAASPGAGDGSPAPRRRPLPEEGTADDHPAQQRRVIPISLHRTSSLDDTPFNYEINKIKGYWTEIRSAKICYLYGQGRMLALTLLKRAKDAIGLASTIMTGAQLRAQTPSEISLNTIDQTVRMYVSTFVKTAEDTYHRKVDKATVLSFLCALQGLAAVSRILFEDALASVRSIQPDYSPKRDVEAINRNYQQEIQCLINKFGEASTTEALEILHCTVNDLAQKVSSYVTIMTTLRTSTLAHVPGRTIASCDAAPPDDRQN

SEQ ID NO: 107952 - protein, 86 aa, Oryza sativa
  Clone ID: PAT_MRT4530_12253C.1.pep
RLGRRLHGLLQAHGNQPLVGFVQFTTPQTPSSFNRRRSWGMEWHRAEDDQYWIHVLKKLVEARPSATTCGERLDRPVDDDGCRLRR

SEQ ID NO: 107953 - protein, 137 aa, Oryza sativa
  Clone ID: PAT_MRT4530_12254C.1.pep
MKPLIEAAVVDMFEAGLPARFGVADLDCASGPNALALISTAINAVHHHLLGPAPAAASRCDELTVLLNDLPTNDFTSAMTGLPLLRQKHSVVGSGVDYWPGVFVSVVPGTFYGRLFPERTMHLVCSSFSLHWLSKVC

SEQ ID NO: 107954 - protein, 206 aa, Oryza sativa
  Clone ID: PAT_MRT4530_12255C.1.pep
MGSEQIGGDCGSYTITTSSCYRRPPRTSLLASSTSTGYDILSPHTATSDELGVGQNGPDAESSSSSPASVEQSYGVGRWGQVVHLPGGSAERELQPRSSNRALWRRSRRPPPPLRFGGFIHVFLLLVTSSDPVALVKDVLRATSSMAMTPTTKQLRVASSSCSFAPSPRVTAFEQHRPRVAFERRWKERTTPAVGGWGGRAALNGG

SEQ ID NO: 107955 - protein, 107 aa, Oryza sativa
  Clone ID: PAT_MRT4530_12256C.1.pep
MDAWLSAAGDEEMRCRVAPAAAGCSRRKDELQARKMDSNVEREHGHYQQQESKFVSMVIGPWIALKCPRHNYATATFAMALPGAKTKETALWISVNTVDDGSLYTSV

SEQ ID NO: 107956 - protein, 105 aa, Oryza sativa
  Clone ID: PAT_MRT4530_12257C.1.pep
QHSQIQRWPNGPGQTGRPGHGRTCSRHGPARPATVTGRAGTARVAVPCLGRWPSPRAGMARHGYCSRPARHGPRHGTARFAGGPSGVDRAGGGRMGRRHVALTAI

SEQ ID NO: 107957 - protein, 445 aa, Oryza sativa
  Clone ID: PAT_MRT4530_12258C.1.pep
MVSSRRNTGGIQRDGSLGFISSSPDPPTAAAASAAGGGGGRRVRAPREAGRQWYNSASASYFHMSKRGPQRHTRSPERSKSRGLSCKTLACHLFVSFVVRSNIAVMLFFSVDVSLKILSEYGRVPFDEGAVDRGMVDGKVKELEIIVVEKEVDLIDESEVEESPPVPAMLDDEADFVESAPAIPDINDLDITVRKLLIIVTITTVRPQQAYYLNRLAHVLKTVQSPLLWLVVEWPDQSFQTAEILRSSGVMYRHLICRKNTTSVRKIAVCQRNTAIYHIKKHRLDGIMHFADEERSYMSDVFEEMRKIRRFGAWPVAIHTGIKYRVVLEGPICKGNRVTGWNTIQNIQKKSAVRRFPVGFSGFAFNSTMLWDPERWNRPPMDSVIVHSGGRGGLQESRFIEKLVKHERQIEGLPEDCNRVMVAMRLLSDAFLNKPHTGLHEVAVV

SEQ ID NO: 107958 - protein, 111 aa, Oryza sativa
  Clone ID: PAT_MRT4530_12259C.1.pep
DHIQYPVQILDPRIQKKGNKVVRQILVCWSNLPAVEAPWEDEEELKQRFPFALPWGQVSLQGVGFVSSNTASRELPLSDEAQENPISRPLKRATRIKKFNVRLSGPEWACK

SEQ ID NO: 107959 - protein, 144 aa, Oryza sativa
  unsure (1)..(144): unsure at all Xaa locations
  Clone ID: PAT_MRT4530_1225C.1.pep
RAAYCTGRNFLQARMAQKQIIYNLLIYVPISEGERGFHLRSIFRAVISTFAXKIPWQQYKIWRSLTIYIPTTNSQFMSTNISGRPCILHMSFHLHPPSEVGIQLVPAVLKLKTSPASDAMTTDRTRGSTREFRTGTMQAYQLSL

SEQ ID NO: 107960 - protein, 187 aa, Oryza sativa
  unsure (1)..(187): unsure at all Xaa locations
  Clone ID: PAT_MRT4530_12260C.1.pep
MVSSRRNTGGIQRDGSLRDWLKSAWAAILSQRHTRSPERSKSRGLSCKRLAFHLFVCFMVGIFIGFMPFFSVDVSQKIVSENGRLPFDEGAVDRGMVDGKVKELETIVVEKEVDIIDESEVEESPPVPAMLDDEADFVESAPAIPDINDLDITVRKLSDIVTITTVRPQQAYYLNRLAHVXETVQSP

SEQ ID NO: 107961 - protein, 124 aa, Oryza sativa
  Clone ID: PAT_MRT4530_12261C.1.pep
MAAHPASTSTLNYYATLFDGLQQSTTAPAERVLLGMEIRSVVACEGAERVERHEGMMSLRRTASRRRVTEPLRRPHGLQGPTESLEAIDPLEANKDSEDIKPLRANRLSANNGTPEAIPDSGVG

SEQ ID NO: 107962 - protein, 59 aa, Oryza sativa
  Clone ID: PAT_MRT4530_12262C.1.pep
GLQESRFIEKLVKHERQIEGLPEDCNRVMVWNFNLEPPLLNVPPGWSLHKNLDAVIPVT

SEQ ID NO: 107963 - protein, 432 aa, Oryza sativa
  Clone ID: PAT_MRT4530_12263C.1.pep
MKDERFREAARQVANAGGVYSTDVADYAVGLLFDVLGHVSVGDRYVRRGLWPERGDFVPLGSKIGGKRVGIIGLGNIGSAIARRLEAFGCVVSYHNRRLAAADADADADKKIEVKFLMTCISFGCDSFSLLLFLGRHGCQPKLVTDGGETKSLTFASVNFQVRSGLVEYFPARAANDRWATGWSQCWFYLDVGVDSGLASTNKIYFRHLPEVNADDEDLDPLHQSLRRMAKWLSMPDLTEEFVMLRIIPLWNGWVHDLTSGDEDKAGAYVGPVTSSTLLTPVSTAITEAEKILGKPVVKEKQERTERTSSWERTNRVAARFNLQLPALPSLSEAEVEAEVAEAAKSTGKRKGGGSGVAPGAEESSPPTPVTVPGSDGGNQGAVNTGATAAPESHGGELWTPAASDAPAAQVVLGPSPTHGARTEAHYRMYVI

SEQ ID NO: 107964 - protein, 968 aa, Oryza sativa
  Clone ID: PAT_MRT4530_12264C.1.pep
MGDEYLAEPEDEVAISMWPENIGDKHQKQFKMEKLGKDQDALEDANFQQKPSSVDLNRLMELANSEKGVSQMQYFVKHWEYKRANTARLLKEQIGLLCQQRKEIEQRKQQILEEQQFQDESYYAVKWQVPILDEVYKDEWKRPSKKNDDLSHNQELKIDAEYDSISYWKERAMQLEKTLEASLQRERSLEEKLEENIKNLQSHTPVEEFSGMLKRADYFLHLVLQSAPIVIAHQDADLRYRFIFNHFPTLADEDVIGKTDYEILSGEGIEEMNNVKKEVMASGKATKREFVFNTPLFGAKTFVTYIEPVFSKSGETIGVNYVAMDITDQVTRREKMADIRVREAVQKAKETELSKSLHITEETMRAKQMLATMSHEIRSPLSGVLSMAEILATTKLDKEQYQLLEVMLSSGDLVLQLINDILDLSKVESGAMKLEATTFRPREVVKHVLQTAAASLKKELILEGCIGDNVPLEVTGDVLRIRQILTNLISNAVKFTHEGKVGINLHVLDKQLPGCRIEGGQLHSKAHSAPAAAAEHFSASPRKCDNDTLGCSNHEDACQTGIPSNDNFGEHHEGDEVVWLRCDVYDTGIGIPEKSLPLLFKRYMQASDDHARKYGGTGLGLAICKQLVELMGGTLTVVSKENEGSTFSFVLPCKIPVKEDHSDDPDDMPSSGGDFTTSDIEGSFIFKPQARPYLLTSGVSVMNNTKLIGGNQFYDPPNILEDRKPFSNGFVLAEDHSTNSASTAHQSNGPSVSRTNKEQHDNAMVIELNRQAERVSSSRGDTTSVSGLIHDERGPCRVHEEKSLHKKSKCSPSSNKAKILLVEDNKVNIMVAKSMLEQLGHGIDIVNNGLEAIRAIQKRQYDIILMDVHMPEMDGLQATKFIRSFENTGCWDTSVKPEHDQIIAGSDNLSDCAHMKKQGKRVPIIAMTANSFSESAEECLAAGMDSYISKPVNFQNIKECLQQYLPPQ

SEQ ID NO: 107965 - protein, 328 aa, Oryza sativa
  unsure (1)..(328): unsure at all Xaa locations
  Clone ID: PAT_MRT4530_12265C.1.pep
ARVLRKFVQSSDVEIAEINSGSASSPSSISNGISSSSSSSSSSSNGSNNESNNMKRINNYLNFLNKTNGQTRTKNNNNNNNNNNNNNNNNNNNNNNNNNNNNNNNNNNKRSNGDADSSTTTTASXGMLSPWVAPLLSLASTARASLASPPPLPLPPLVARLPLANSAAAPPSSSSRRAVQHDAPFCPXTASSHKTSIXHTIVYPVHLQLHISNNNNNNNNNNNNNNNNNNNNNNNNNNNNNNNNNNNNTRHGSTTSTNNESDSSSQDASPVKPLNDCSSENDKDEYDGSLQDASPSEPPNDSNCESGKYENSDSLQNGVNATKNGVKT

SEQ ID NO: 107966 - protein, 92 aa, Oryza sativa
  Clone ID: PAT_MRT4530_12266C.1.pep
ESPPLPPHPEIQPVNYMPGDTLSRRSYLLRRSRGSSFVPFRRVNTQSNVSGVTPASRTPEGTSQPATELREAIASTRLRPLLIKYSSSPQVF

SEQ ID NO: 107967 - protein, 156 aa, Oryza sativa
  Clone ID: PAT_MRT4530_12267C.1.pep
KKKKKKKKKKKKKKKKKKKKGRRIIKKKKGAPIFRRGGLLFGGSRLAFPFLFGLCYLIEWPNFATWPLLNPGGFGNSLGCPTLLFWQLVLFSKGALRWRGPTIAPLARGLAPPLGRGIPPGAALYSPPLGRFPAGCPFPCPFPWPAFLCRLFLRFS

SEQ ID NO: 107968 - protein, 203 aa, Oryza sativa
  Clone ID: PAT_MRT4530_12268C.1.pep
MAATKRMSYSIAAVLMLLLIMSSTFSCYAELQLKKRWTKKLASSSAGQSKMEATSKAAIDRQEVRVSTTPIRAAIARDQRKDDFEVLVTVEAPKVVAPEKRAPIDLVAVLDVSGSMNKEEFVRGKHMSSRLDLLKIAMKYIIKLVRDADRLAIVSFNHAVVSEYGLTRNSADSRKKLENLVDKLKASGNTDFRPALKKAVEVF

SEQ ID NO: 107969 - protein, 103 aa, Oryza sativa
  Clone ID: PAT_MRT4530_12269C.1.pep
GRSGGNGAERGGNRRGSGAPTGGGGGSAGAGFCGTSGENGGGRGGDRAHVVGCELGCGRAPDFAATWAAMAVGVGRRETKRTNYIIKNEYIIHVGFRLISVLN

SEQ ID NO: 107970 - protein, 107 aa, Oryza sativa
  unsure (1)..(107): unsure at all Xaa locations
  Clone ID: PAT_MRT4530_1226C.1.pep
RPAQGARVYRQAALMVVGLLNTASVRVHHXMALVELLTAESMGPYLQGNVRLQLQTFLAVLQGAVGMSFMAKWESPLDASRCVASAICRIVTLRLSHSIIRCIHDAQ

SEQ ID NO: 107971 - protein, 93 aa, Oryza sativa
  Clone ID: PAT_MRT4530_12270C.1.pep
GGARGQGVECHPHQGVSAALLRLGPQALAANWRRRETVVRSDFPPGGVAPMGDSPQALSGLIAINVVCWNISIWNVVGNCLTKCGIVEGRKIF

SEQ ID NO: 107972 - protein, 55 aa, Oryza sativa
  Clone ID: PAT_MRT4530_12271C.1.pep
MASFFFGSETDRKKTGAFFSLKEPKATGSSDLGLCAQQIRVAGGEDTSHSCYRPL

SEQ ID NO: 107973 - protein, 448 aa, Oryza sativa
  Clone ID: PAT_MRT4530_12272C.1.pep
MARWPWRWRVLLPLLLLHSSPVFFVFAQEGQDNDPSTLFKRASEMMNLRKYDGSLGLLNAVLEVDPNHSEAYRQRASVLRHKCRYKEAEGDYSKYLELKPGSSSVEKELSQLLQAQNALESAYGQFESHDFSKVLEYINKIVLVFSPNCLKAKLLKAKALLALEDYSSVISETGFILKEDEDNLDALLLRGRAYYYLADHDVASRHYQKGLRLDPEHSELKKAYFGLKNLVKKTKSAEDNAAKGKLRVSAEDYKAALAMDPDHTSYNVHLYLGLCKVLVKLGRGKEAISSCTEALNIDGELVDALTQDMGIREALMRAEKQLKLSKRKDWYKILGISKTASAAEIKRAYKKLALQWHPDKNVDKREEAENMFREIAAAYEVLGDEDKRVRYDRGEDLDEMNMGGGGGGGFNPFGGGGQQYTFHYDGGFHGGGGFPGGGFPGGFQFNFG

SEQ ID NO: 107974 - protein, 60 aa, Oryza sativa
  Clone ID: PAT_MRT4530_12273C.1.pep
QVIITKKDSSCDSPPLKTKSTTAQSSATAIMNIIAQHISSRTGRIPTRQPSVRYNLLEFV

SEQ ID NO: 107975 - protein, 45 aa, Oryza sativa
  Clone ID: PAT_MRT4530_12274C.1.pep
TTSVIFPGLREKHGKNCGGDITAHPKFSSESSLDYSKSEKVKCAY

SEQ ID NO: 107976 - protein, 112 aa, Oryza sativa
  Clone ID: PAT_MRT4530_12275C.1.pep
MAATATLAAPSFLAHQSILSHKPLRKLGLSLELPRTRSVKIRAAKLPAGVEVPRKQPKLSEPFLGFTRTAEIWNSRACMIGLIGTFIVELVLNKGILQMIGVEVGKGLDLPL

SEQ ID NO: 107977 - protein, 174 aa, Oryza sativa
  Clone ID: PAT_MRT4530_12276C.1.pep
HASATRPEELQKKILSAKFNFNDFLKQTQAIAQMGSFSRIIGMIPGMNKVTPAQIREAEKNLKFMESMINVMTPEERERPELLAESRERRIRVAKESGKNERQVSQLVAQLFRMRAQMQKMMGAMQGQDTPDMEGLMDSIKAEEQAAAGTGKRRRKYGNLRRRDLDAMRGFRRR

SEQ ID NO: 107978 - protein, 130 aa, Oryza sativa
  unsure (1)..(130): unsure at all Xaa locations
  Clone ID: PAT_MRT4530_12277C.1.pep
WSSSDCEYIRMSSIHGVVGAREGGWTDAEELGEFRVLGRWCQLVTTGNHPTGIPDVRVLFLVPGGKAQHTQRQXRNSGRLGRRPQALDGRHELDTKAFIFKELLIWAWXKKLSKTEYNHRTQQDTPTNAE

SEQ ID NO: 107979 - protein, 987 aa, Oryza sativa
  unsure (1)..(987): unsure at all Xaa locations
  Clone ID: PAT_MRT4530_12278C.1.pep
GAVNFALMMSQMEGGCPVDYNTITDLFLQRNMIREATAFLLDVLKPNLPEHAFLQTKVLEINLVTYPNVADAILANGMFSHYDRPRVAQLCEKAGLYVRALQHVQGLHGDMLTVXDRELSEDLLVYFIEQGKKECFASCLFICYDLIRADXNLQIVVQAAKEYSEQLGVDACIKLFEQFKSYEGLYFFLGAYLSSSEDPDIHFKYIEAAARTGQIKEVERVTRESNFYDAEKTKNFLMEAKLPDARPLINVCDRFGFVPDLTHYLYTNNMLRYIEGYVQKVNPGNAPLVVGQLLDDECPEDFIKGLILSVRSLLPVEPLVDECEKRNRLRLLTQFLEHLVSEGSQDVHVHNALGKIIIDSNNNPEHFLTTNPFYDSRVVGKYCEKRDPTLAVVAYRRGQCDDELINVTNKNSLFKLQARLDNFDGPAVGEVAVEAQLFEEAFAIFKKFNLNVQAVNVLLDNIRSIERAEEFAFRVEEDAVWSQVAKAQLREGLVSEAIESFIRADDATHFLDVIRAAEEANVYDDLVKYLLMVRQKAREPKVDGELIFAYAKIDRLSDIEEFILMPNVANLQNVGDRLYDEELYEAAKIIYAFISNWAKLAVTLVKLKQFQGAVDAARKANSAKTWKEVCFACVDAEEFRLAQICGLNIIVQVDDLEEVSEYYQNRGCFNELISLMESGLGLERAHMGIFTELGVLYARYRPEKLMEHIKLFSTRLNIPKLIRACDEQQHWKELTYLYIQYDEFDNAATTIMNHSPDAWDHMQFKDVAVKVANVELYYKAVHFYLQEHPDLINDLLNVLALRLDHTRVVDIMRKAGQLHLVKPYMVAVQSNNVSAVNESLNELYVEEEDYERLRESVDMHDNFDQIGLAQKLEKHELLEMRRIAAYIYKKAGRWKQSIALSKKDNMYKDCMETCSQSGDRELSEDLLVYFIEQLAWMNNMVDFAFPYLLQFIREYTSKVDELVKDRIESQNEVRAKEKEEKDLVAQQ

SEQ ID NO: 107980 - protein, 106 aa, Oryza sativa
  unsure (1)..(106): unsure at all Xaa locations
  Clone ID: PAT_MRT4530_12279C.1.pep
RRDEQAGHMGVTVGYSDVCLLVSMTSVRXFSRRIGCGTMSEHLIKTRAASXSPLWKAAAQMLMAVGYAVMAAGMPGSLFGGSVVAGICYGVRLAGTVPTACELAGL

SEQ ID NO: 107981 - protein, 532 aa, Oryza sativa
  unsure (1)..(532): unsure at all Xaa locations
  Clone ID: PAT_MRT4530_1227C.1.pep
LVDPRAAGFSQFWVRTPHFNPHSGHRRLPPIPPPPTPDAASAQGVGSMEAGGTAAGTRGGGGXGAELCRQMAAQLAAYQRGMAVERERQASTSANYRAALLSSRSIAQELSGLNLQLRNLEDGLAEALSVKAGKESKYQLTKETISSTAAINEKLEGMVTDQRNKRDHHAAVISNHLEAVEALEAKFIEDETRMKKIEEAVIWYSKFLGFQVVGGEGVKFIFNKIDLQSPDKEYSVTLKLAKDRYNLLQCDPSIKDSEELMKDLNLTNDLFKFVRIVRERFQAEAATVNGGLLMSSVVCPDASSIPVSPPMLMPLDSRTENVLDKSLSQSKNKGRNLPSKRGAAALSAASPGSAALVNFAFRRFKTWESGGICKIATNQTSSIHRLVDCSLAIPSPPPPPPPPSEMRKTKPSKQSRAQAQQNGGAGHSKLARYFDPEASWDKDQLLDAVHWIRQVLGLACGLLWGAVPLVGAIWIALFVTISTGLVYWYYAYLLKIDEEDFGGHGALLQEGMFASFTLFLLSWTLIYSLVHF

SEQ ID NO: 107982 - protein, 129 aa, Oryza sativa
  Clone ID: PAT_MRT4530_12280C.1.pep
PKTCNELSECLIEKQSEASSFFRYYNAIDLTLQVVLSPGTMSSQGPFRKANPHGPRNGPLRVLMQRMKMNSDRYAQMHKGARIDSLIKKISNDLDLGHVIFTGLLKKIIYCILKKYVFFPQKTVFYCTV

SEQ ID NO: 107983 - protein, 88 aa, Oryza sativa
  Clone ID: PAT_MRT4530_12281C.1.pep
RRRLLRGPWWARPPLPPLLIRRFRGPLLRPCMLSMLFSAPSGRLPLHYDLLCKDDDVLVEFVGGSRGFFPNGRCYGRRGGLLFFGAMI

SEQ ID NO: 107984 - protein, 173 aa, Oryza sativa
  Clone ID: PAT_MRT4530_12282C.1.pep
GFDQGTRRISKEVHPIRSSAPLPPMLSFHSHCCKQSAASRAANPRHTLKPQSQSQKKKIITWPLKSPATVPKQSLVKKEGRAELPLARRGEEGGSGEREGKVYSREMALSTASCGGSSWPPGPAGLAQHRTNKEAEARRRAASSRASEAARGRGRREGAGSGRSARALHAIIL

SEQ ID NO: 107985 - protein, 174 aa, Oryza sativa
  Clone ID: PAT_MRT4530_12283C.1.pep
MSSPSLSLLLPFILLSLSLSHSSLGRLAGKWEGGRQVEVGEEKGIGGRQHNDGWHRRRGGRRHKGKPSSRGATRGAGRPVTSNGEGGDGSNEEGEEAGELARSSHHKSIHPPLQSAALLPIDRLSDGLRRPCPCYRVHCSRLPFSPLTACRMVSAAPVHATVSCPTQPCLGSNR

SEQ ID NO: 107986 - protein, 50 aa, Oryza sativa
  Clone ID: PAT_MRT4530_12284C.1.pep
NLLIHFLGFFFIFFFSFFIFIRPPEQTRKYHTRTMKHQSFTYRESFYTLA

SEQ ID NO: 107987 - protein, 580 aa, Oryza sativa
  Clone ID: PAT_MRT4530_12285C.1.pep
MAPAPSSSLATAGHGKTKSGRSSSSAVRPALLAIAVSVMVVLLMAVLFGARWTPSGGHGGGADTSWVSAGARVVLNAVSSQQGADPVVKVAQPHDRLLGGLLSPDFNDTSCLSRYRASLYRRRSLHVLSSHLVSALRRYESLHRLCGPGTSAYERAVARLRSPSSSNTTSDAPSECRYLVWTPHAGLGNRMLSITSAFLYALLTGRVLLFHRSGDDMKDLFCEPFPGATWVLPEKDFPIRGMERFGIRTRESLGNALGRGEGGRDPPPPWMYVHLRHDYTRPGASDRLFFCDDGQDALRRVGWVVLLSDNYFVPGLFLIPRYERELSRMFPRRDAVFHHLGRYLFHPSNTVWGMVMRYHGSYLAKAEERVGVQVRTFSWAPISTDELYGQIVSCAQGENILPRVRESSSGSDNATAIPGSGRQQQQRPARRKAVLVVSLHGEYYERIRDMYYEHGAAGGDAVSVFQPTHLGGQRSEERMHNQKALAEMMLLSFSDVALTSAASTFGYVSHGLAGLRPWVLMVPVRKKAPNPPCRLAATVEPCFHTPPHYDCQARTKGDNGKTVRHVRHCEDLKDGVQLVD

SEQ ID NO: 107988 - protein, 95 aa, Oryza sativa
  Clone ID: PAT_MRT4530_12286C.1.pep
NPRRCSLGQRLKGFISPNPPRKRSPSKLEWGLPNPSIPRFLPPGSKNQGLMRGPPPWFKLCKRLKAPFLNPQGRGDPCKPTPVPKRKIPGFVGKI

SEQ ID NO: 107989 - protein, 202 aa, Oryza sativa
  Clone ID: PAT_MRT4530_12287C.1.pep
MAGGEKVDYVFKVVLIGDSAVGKSQILARFARNEFSIDSKATIGVEFQTRTLLIDHKYRAVTSAYYRGALGALLVYDITKRQSFDHIPRWLEELRGHADKNIVIMLVGNKSDLEDERAVSTEDAKEFAEKENLFFLETSALQATNVENAFQTVLSEIFKIHSKKNMAADPKANGAAPSLAGKKVVVPGPAQEIPKSKCCSSM

SEQ ID NO: 107990 - protein, 110 aa, Oryza sativa
  unsure (1)..(110): unsure at all Xaa locations
  Clone ID: PAT_MRT4530_12288C.1.pep
MDEDNSPTSMRLAQMPCARSYVPAGFGHRTSHPLQPFEPLPTARLQAQDTVYFDEKNEQFQCTGTFGVRRDIESQGLLVPXYRNTPGMDYIIQXGRGSMGLTFPGCPADL

SEQ ID NO: 107991 - protein, 143 aa, Oryza sativa
  unsure (1)..(143): unsure at all Xaa locations
  Clone ID: PAT_MRT4530_12289C.1.pep
APRRNGRYTSSAADGRLPRPPARPPPLPPGLPPRPPARPAAAAAPAXGAAATARLAGAPACPATAAVRAGRRCSXGAAATARPAAAPDRGEGEERQGKXERKGMKGRGREGEGDINERGGDREEMARGSRGSLYSRWYKQPGH

SEQ ID NO: 107992 - protein, 42 aa, Oryza sativa
  unsure (1)..(42): unsure at all Xaa locations
  Clone ID: PAT_MRT4530_1228C.1.pep
GARTGRRFRRGLATSGCRPRFCAAAVXFPLTXRICHKRQLRH

SEQ ID NO: 107993 - protein, 92 aa, Oryza sativa
  Clone ID: PAT_MRT4530_12290C.1.pep
KKGHCLTCQWIVISSDLVVNGRWRMIASLRLWMRLQPPLIRSLRRFKKSRASCEDSVSLVKHQLLPKYQRFPILWPHSLPVTFLNVHSAPPS

SEQ ID NO: 107994 - protein, 101 aa, Oryza sativa
  Clone ID: PAT_MRT4530_12291C.1.pep
YEACSEQLSYITVSNYSPNRKIMNHETCSARARATACSFGSKSPVVKSLQEGTGRPGQPSESNSATEFSQTIAIKEGEVQQILIYAMISIELLNCYAGHTT

SEQ ID NO: 107995 - protein, 86 aa, Oryza sativa
  Clone ID: PAT_MRT4530_12292C.1.pep
RKPPRPPSPIPSAARAPRSLHRRRVVSACAPAAAWRRQVPAKPPPASSSPPLPQPRLHRARQASELHPRRQPEPASSSSSSPLPSL

SEQ ID NO: 107996 - protein, 330 aa, Oryza sativa
  unsure (1)..(330): unsure at all Xaa locations
  Clone ID: PAT_MRT4530_12293C.1.pep
TTGHTPLSPRLPGRSLSLSRVHAQAGGSAGEGGPAGRRXGGGARPGGRRLRRSSPGQPVXGSGGRRWRQRPTRRRHCPARVTASSRTTRASARRRGSRRWGRGCGSHRSRQGRGRHRSWRGCRWRPCRVSRTRCRGRGGGRRSWRRRTAALAPSPSPSXHRPAARAPRSPPPPAARARSASAAGCRVRLRHQSPKRGPHPPPAARFASATIRPCEARLRRWLPRRGPPPPLAAGFVSADRCPDEARLRRRLLGMPPPPTARARSASTAGCLPPPLTASLSERMRKREPDGRDWVEELVRQVAGARAVTGWGRAPVSTCRRAGEPEAGVPG

SEQ ID NO: 107997 - protein, 407 aa, Oryza sativa
  Clone ID: PAT_MRT4530_12294C.1.pep
MAVAEVETAALGDGGSGGGGGRRRGRGGGGRSGGGGARGRRRRSATWTGRGGGQGEGEGEAEAAREGAEAALGDVDGARGRGAEAAARGRKPVRSASTIIAGTESGQHLLKIDGYSHTKDKLPTPGSNVKSRSFRVGGHSWHISYYPSGNDSDKANCISIFLNLDDDVDVKAQFNGWGFVSFIRRDVLEKSEYLRDDCLTIVCDLTVFMELQTEDIDVDTATPPPPPPPTVVVPPSDLHRHLGGLLATGEGADVTFEVSGKTFAAHRLVLAARSPVFRAELFGPSKELGATTGGAVDHTAIRIDDMEARDFEALLRYMYTDSLPEPETTKGGGDAAAMLPDLVAAASRYKMERLRLVCEHKLCEYVNGRTVVSMLAFAREHHCDGLKEKCLRFLDDPVKVREIVKAR

SEQ ID NO: 107998 - protein, 36 aa, Oryza sativa
  Clone ID: PAT_MRT4530_12295C.1.pep
ARNTLTSAICPCRMSYWDRVALAHDLKIEDCFVKTM

SEQ ID NO: 107999 - protein, 112 aa, Oryza sativa
  unsure (1)..(112): unsure at all Xaa locations
  Clone ID: PAT_MRT4530_12296C.1.pep
MTCVLHIWLKALRIPWLANYIILSGESLKAFPLRSGTRQRSPLSLLLLSMVFEFLAIAIKQEXEIKGNKIGKEELRVIKNDMILFTENPDGIIKKLLDKRIQIGSLGLSDTT

SEQ ID NO: 108000 - protein, 207 aa, Oryza sativa
  Clone ID: PAT_MRT4530_12297C.1.pep
GYLKNFLSNEDPDLRAKACSAIGNMCRHSSYFYSSLATNKVIELVVDRCSDPEKRTRKFACFAVGNAAYHNDMLYEELRRSIPQLTKLLLAPEEDKTKGNAAGALSNLVRNSNILCEDIVSQGAIQALLKMVSSYSTVALSPSRKDVLTESPLKIVLFALRKMCDHAACRLFLRSSELLPVIVHLRQSPDPAISEYASAIATKACQP

SEQ ID NO: 108001 - protein, 730 aa, Oryza sativa
  Clone ID: PAT_MRT4530_12298C.1.pep
MRREFDNSSTEYYSRNNTQKPQFPLGNSASQQCKDLSSTRYKSKKSKKRKGDSSNLPGKTKGLEQNFPYAGSKRDFSESLALEGAENTLSNRNNGSSHLGHMQAGPNLGSDGKNTPLTKKISEESVFEESLVKKHDRCRPLAQVVQSSLKLPHSFQRDDDSGPVLIEEGNDPLTTIYQAQQGWSTYMPNDSGETNNHGDIPPTQITSMGAHFETEGYLKQPDSFSAEQKISEFAEKQRSDSCERECSETETEDDAELLQSRIFMNSKSPGQIYMYYFSMLILYKGYAKRQSPGSDACDPYSIQASKKSRHVDGDVADDMVAFSTGIPQQNVLKEEDGSSELGVSQWHMKGKRNQRSALKRPMGKTDGNISLDRSNSSLKGSLYRVNESNPNMESTGASSHQYFGRSFYQTQELDYDYDNADLTNKARGHAEVRYYGKDYPPSLTPTRDLEQSYTSFNNTETYCKTSPPNKNGDQMSSLGRKACLEGASLYRQNYSSQLGYMGPMLFNVDLNVQAGYQGEHVPLVSLMSRLNGKAIVGHPIQIEILEDGSTDHLVLASDDFLEHSTSASPAWRTGRRTAMPRIPRSNSTRVTLDDGDDEGLWDMNPPFSRSSTPFNQQFRLSKRSNTSFRSPLSHRSQKKPSNSKKGSSSSQKVRALSSISIGKRHHREGRQAKLHNILGDLIKPEGAIPLVTCVPAKVVFSRIMEAVGRPSLSIAHRARVASPAIRDAQR

SEQ ID NO: 108002 - protein, 363 aa, Oryza sativa
  Clone ID: PAT_MRT4530_12299C.1.pep
MMYKHVGDDARGSSAGVVCCVDVVDDDVDALLCGEDAGELEREGEPAQGSSPSSSLSCAAAAAAAADDDDEDEDEHGVHGEVVQVTPGGEEHCYDYDYDVDVPVGAELVMPACSPPRTAVHRPGWSESVSWILKVRSVHGFQPATAYLAVSYMDRFMSSRSLPDHGWASQLLCVACLSLAAKMEESSAPPLLDLQIEGTRFIFEPRTIQRMELIVLVELDWRLRSVTPFAFVDFFACKVGSSGRSSRILALRACQIILSAIHELEFLNHCASSMAAAAVLFAVNESPAAMSHRSSVSSESAASWCIGLTEERISSCYQLLQRALNATARKRKRHPMILAACSSVTSSSSRSKRRKLDGHFGED

SEQ ID NO: 108003 - protein, 519 aa, Oryza sativa
  Clone ID: PAT_MRT4530_1229C.1.pep
MEGGRLGGAAASASAAAAADARGGMSGFAAPQHAIVKHGPGSVTHCGGKWTFAELCQSEQIWVLDCYCMQWACKFATNATECHTNLNNVQPTQVTDFGALAQSAGFRIEDLANLSTNGLFNLKSNAHTIINDPLQFENYVKSISPSNITTPPAGSVVDPQTLVPQKGAQLNWVTIRTGNVENWGESTMADTSPRTDTSTDPDTDERNQMFEQGQLAAPTASDSSDRSKDKLDHKTLRRLAQNREAARKSRLRKKAYIQNLESSRLKLTQIEQELQRARQQGIFISTSSDQSHSASGNGALAFDMEYARWLEEHNKHINELRAAVNAHAGDNDLKSTVDSIMAHYNEIFKLKGVAAKADVFHVLSGMWKTPAERCFMWLGGFRSSELLKLLAGQLEPLTEQQLAGIANLQQSSQQAEDALSQGMEALQQSLAETLASGSLGPAGSSGNVANYMGQMAMAMGKLGTLENFLRQADNLRLQTLQQMQRILTTRQSARALLAISDYFSRLRALSSLWLARPRE

SEQ ID NO: 108004 - protein, 62 aa, Oryza sativa
  Clone ID: PAT_MRT4530_122C.1.pep
LYLYSFWLERERGGRGGYRKKTLSSASIIIIILIILSLENGKFSNAPCSLCHTMTSPAHYKS

SEQ ID NO: 108005 - protein, 121 aa, Oryza sativa
  Clone ID: PAT_MRT4530_12300C.1.pep
AYNGVDVNRGKDGLWPGCGMLLQIQPATGGNRLRFYCPTCPYVCPVKNKIVKKARLVKKEVEPIFSDSDAMKNAPKTTTTCPRCQNGDAYYRQMQIRSADEPMSTFYKCCREECQFDLRED

SEQ ID NO: 108006 - protein, 142 aa, Oryza sativa
  Clone ID: PAT_MRT4530_12301C.1.pep
MGKTRGMGAGRKLKTHRRNQRWADKAYKKSHLGNEWKKPFAGSSHAKGIVLEKIGIEAKQPNSAIRKCARVQLVKNGKKIAAFVPNDGCLNFIEENDEVLIAGFGRKGHAVGDIPGVRFKVVKVSGVSLLALFKEKKEKPRS

SEQ ID NO: 108007 - protein, 399 aa, Oryza sativa
  Clone ID: PAT_MRT4530_12302C.1.pep
MFAAICRRRLAALFPQIRGGGGGAYHVQSNPQAALLFHSYSSTAVTGGSDPEPCPDTVSYLVSCGLPPAVARHTAANTRGLRIRSTEKADAVRTLLRSYGFSDADVARIARSAPLLLTVDPDRIIRPKLEFFATMGFQPSKLSTAPLLLARSLEKHLVPTIQFLRSIIGSDDGIRRGFSRIPRALLVSLDNCMRPAVEALHRHGLTGREDVSKVLVLQMGVLMLSPVRIGEIFEDLKAMGMSITDGRFANSFRAMCSMRRATWLRKVALYRSFGLSESEVFEAFKKQPTALLGADETIKKNASFFRDALKLEMREVMVHPVVMAYSFEKTILPRCAVLSVLMREGKINPDIQLLHALLGSAKTFSGRYVDRFAADVPDVVEAYEGKIKFKGFKGQGQGV

SEQ ID NO: 108008 - protein, 104 aa, Oryza sativa
  Clone ID: PAT_MRT4530_12303C.1.pep
IEIQYELNSDRDPNRSPTGLGGPSDGSYIFVRGVTGGGIASPWEYGEENARGGEGRAGAIDYFLYIDVRYFARVPLTSQCLLPLRNTSSGNCNLCSSNNCTYYS

SEQ ID NO: 108009 - protein, 65 aa, Oryza sativa
  Clone ID: PAT_MRT4530_12304C.1.pep
RLPPYRRVAVTGPPAVFETLTEPAVVHMICSKCDQYCNSSCAGGMGGCSGACTDPASSSYSSLHA

SEQ ID NO: 108010 - protein, 164 aa, Oryza sativa
  unsure (1)..(164): unsure at all Xaa locations
  Clone ID: PAT_MRT4530_12305C.1.pep
CVAAGSDGDLAGARVVGREKGGHVHVEDDETNPTVLTTTTNDVGRRPATRGATAAARLTGGGGAPVAGGEGERAAELPHGLAHLKVMAASGGDGGEGCSARLQPGRRRRRMVSRGDGSTGHGRGRERGQTKEEDXGVLFIALDXRDRTPPARNRSGKSKTRFWR

SEQ ID NO: 108011 - protein, 212 aa, Oryza sativa
  unsure (1)..(212): unsure at all Xaa locations
  Clone ID: PAT_MRT4530_12306C.1.pep
MDSPATPVDFLPLLSLAHYNESRYTKGSDGDLAGARVVGREKGGHVHVEDDETNPTVLTTTTNDVGRRPATRGATAAARLTGGGGAPVAGDDREGAAGLALGHAHPPAARGGSGDGXGDGAARLHVDRRRRRLARRGDEATEHERARERGKTKEEDXGVLFIALDXRDRTPPAINRSGKSKTRFWRXTQKRVRFGXNTQQFAPILGGKDRGG

SEQ ID NO: 108012 - protein, 211 aa, Oryza sativa
  Clone ID: PAT_MRT4530_12307C.1.pep
MATSPAYPPPGSGEGFSKPPATDPCSSGHWSDLPVDLLHRILHSLELPEALAVADVCKSWCCAAIAAGVPRSCTPWLMSWSDKPPHELEYDVLLNNCKWQRPMGCEFHDLVNGHKTYEVNLPQVAWVGASHGWLAAADNLSNLLLYNPFTFTTIPLPPITDLGCVEAVYDSEGSIVRYRLGKHKESDAKFLGVWFYQKLVLSCAPSLGGDY

SEQ ID NO: 108013 - protein, 65 aa, Oryza sativa
  Clone ID: PAT_MRT4530_12308C.1.pep
MGWIGPAGGLAEHWLAPLAHSLLQDADIERAQVEAEIRGEEAAWRSAGGMDVVYTEGGGHRATQA

SEQ ID NO: 108014 - protein, 108 aa, Oryza sativa
  Clone ID: PAT_MRT4530_12309C.1.pep
MAVPSLQIDSSRVPDHVTTGDGLQVPVTNELVAAQGTGAGQDLPGRPATATATAPHDHEQLGSSPKFQASNVLAQSNPQPQVAVTAKLTTRVFDGVKGLIRGGFRGFF

SEQ ID NO: 108015 - protein, 189 aa, Oryza sativa
  unsure (1)..(189): unsure at all Xaa locations
  Clone ID: PAT_MRT4530_1230C.1.pep
LGPCELFVCNLPRAXDVDDLYELFKPYGTVLSVEISRDPETGLSRGCGFVTMRSLPEARTAMNALDGFDLDGREMLVKLSSDVVSKRRNINMTHTPPVKDHIFESPHKIYVGNIAWSVEPQELREYFSQCGTVVSTRLLTDRKGGRGRVYGFLSFASAEELEAALKLDNTHFHGRNILVRQAHEERQAH

SEQ ID NO: 108016 - protein, 1105 aa, Oryza sativa
  Clone ID: PAT_MRT4530_12310C.1.pep
MSSGGRGGKRRGAPPPGPSGAAAKRAHPGGTPQPPPPAATAAAPVAEEEDMMDEDVFLDETILAEDEEALLLLDRDEALASRLSRWRRPALPADLASGCSRNVAFQQLEIDYVIGESHKVLLPNSSGPAAILRIFGVTREGHSVCCQVHGFEPYFYISCPMGMGPDDISRFHQTLEGRMKDSNRNSNVPRFVKRIELVQKQTIMHYQPQQSQPFLKIVVALPTMVASCRGILERGITIEGLGSKSFLTYESNILFALRFMIDCNIVGGNWIEVPAGKYMKAARIMSYCQLELDCLYSDLVSHAAEGEHSKMAPFRILSFDIECAGRKGHFPEPTHDPVIQIANLVTLQGEGQPFVRNVMTLKSCSPIVGVDVMSFDTERDVLLAWRDFIREVDPDIIIGYNICKFDLPYLIERAEVLKIVEFPILGRIRNSRVRVRDTTFSSRQYGMRESKDVAVEGRVQFDLLQAMQRDYKLSSYSLNSVSAHFLGEQKEDVHHSIISDLQNGNSETRRRLAVYCLKDAYLPQRLLDKLMYIYNYVEMARVTGVPISFLLSRGQSIKVLSQLLRKAKQKNLVIHSYSGKQSGQDTFEGATVLEARAGFYEKPIATLDFASLYPSIMMAYNLCYCTLVPPEDARKLNLPPESVNKTPSGETFVKPDVQKGILPEILEELLAARKRAKADLKEAKDPFERAVLDGRQLALKISANSVYGFTGATVGQLPCLEISSSVTSYGRQMIEHTKKLVEDKFTTLGGYEHNAEVIYGDTDSVMVQFGVSTVEDAMKLGREAADYISGTFIKPIKLEFEKIYFPYLLISKKRYAGLYWTNPEKFDKMETKGGETVRRDNYLLVKNLVTECLQTILVDRDVPGAVQYVKNTISDLLMNRVDLSLLVITKGLTISGEDYAVKAAHVELAERMRKRDAATAPTVGDRVPYVIIKAAKGAKAYERSEDPIYVLDNNIPIDPQYYLENQISKPLLRIFEPILKNASRELLHGSHTRAVSISTPSNSGIMKFAKKQLTCLGCKAVISGSNQTLCFHCKGREAELYCKTVGNVSELEMLFGRLWTQCQECQGSLHQDVLCTSRDCPIFYRRRKAQKDMAEARVQLQRWDF

SEQ ID NO: 108017 - protein, 1107 aa, Oryza sativa
  Clone ID: PAT_MRT4530_12311C.1.pep
MSSGGRGGKRRGAPPPGPSGAAAKRAHPGGTPQPPPPAATAAAPVAEEEDMMDEDVFLDETILAEDEEALLLLDRDEALASRLSRWRRPALPADLASGCSRNVAFQQLEIDYVIGESHKVLLPNSSGPAAILRIFGVTREGHSVCCQVHGFEPYFYISCPMGMGPDDISRFHQTLEGRMKDSNRNSNVPRFVKRIELVQKQTIMHYQPQQSQPFLKIVVALPTMVASCRGLHFAPIGILERGITIEGLGSKSFLTYESNILFALRFMIDCNIVGGNWIEVPAGKYSDLVSHAAEGEHSKMAPFRILSFDIECAGRKGHFPEPTHDPVIQIANLVTLQGEGQPFVRNVMTLKSCSPIVGVDVMSFDTERDVLLAWRDFIREVDPDIIIGYNICKFDLPYLIERAEVLKIVEFPILGRIRNSRVRVRDTTFSSRQYGMRESKDVAVEGRVQFDLLQAMQRDYKLSSYSLNSVSAHFLGEQKEDVHHSIISDLQNGNSETRRRLAVYCLKVGLLDCQWLRYLPDAYLPQRLLDKLMYIYNYVEMARVTGVPISFLLSRGQSIKVLSQLLRKAKQKNLVIPNIKGQASGQDTFEGATVLEARAGFYEKPIATLDFASLYPSIMMAYNLCYCTLVPPEDARKLNLPPESVNKTPSGETFVKPDVQKGILPEILEELLAARKRAKADLKEAKDPFERAVLDGRQLALKISANSVYGFTGATVGQLPCLEISSSVTSYGRQMIEHTKKLVEDKFTTLGGYEHNAEVIYGDTDSVMVQFGVSTVEDAMKLGREAADYISGTFIKPIKLEFEKIYFPYLLISKKRYAGLYWTNPEKFDKMDTKGIETVRRDNCLLVKNLVTECLHKILVDRDVPGAVQYVKNTISDLLMNRVDLSLLVITKGLTKTGEDYAVKAAHVELAERMRKRDAATAPTVGDRVPYVIIKAAKGAKAYERSEDPIYVLDNNIPIDPQYYLENQISKPLLRIFEPILKNASRELLHGSHTRAVSISTPSNSGIMKFAKKQLTCLGCKAVISGSNQTLCFHCKGREAELYCKTVGNVSELEMLFGRLWTQCQECQGSLHQDVLCTSRDCPIFYRRRKAQKDMAEARVQLQRWDF

SEQ ID NO: 108018 - protein, 106 aa, Oryza sativa
  Clone ID: PAT_MRT4530_12312C.1.pep
MTPPICAREEGSQPRMVAAVAGRLNCKGGRERMYMDWRAHKSEQTDIFEGNSPCTVIKAHKTVNRAKIVEKGSESGSAEPLVRPIAPSFHVPLPQASPMVVIPDSR

SEQ ID NO: 108019 - protein, 1988 aa, Oryza sativa
  Clone ID: PAT_MRT4530_12313C.1.pep
MPTPSQTIVFGSITGLVKEKEDSYLEFSWWFREDFGGVNGLLLCSSGALHLGTNAADGAHLTEFAVQLPHFEGLHLKNTALYDGNQFMPAFGLAHCLSMRQQFTSMDRDIMADGNIVQRSIHLRRKRRDLPQTSSLPKFAENHELGSANIFMDPSFYTKATESSSTENKSSSKPPKFLGENSSRRPHHRTVGLPVQYSDFFITSLGEIDKRPSYHNSYQIWPVGFTSYWHDRITGSLFECEVCDGGNFGPLFKVRRISCSVFPLPDASTILSQNSTRKAETIETNENNTLLEDTANDTDDNILMLLSDSSETNQDLLSCFSNDMESKMTSLGCNDLHSSNRSVPTVPSHSGTDKIGEFTFEGTSPSSVWRMISCAMMEACEKMYKEHGHLVFFCTHGTEKHSFDSGSGFQDFNGPYTPLTRFCSSYGPSIPRIVEKENDVEPTYSLLKEWLYQDRIGFDLEFVQEIVESLPRSRACSNYQFLCNRAEFVSSLTVASGSLRVVHKNGQSNGDVMSYGRHGSVVTGLQDHTQPSGFRIRELPLGRPISNKLPPELAGEVLQIWEFLGRFSEIIGLKEIPSYEQLEDELIDPWPICADQKEKLSNDIHRDHTSPINSPANVSTSYSNGESGLTSNEEIVSLFIPVETSSMKKAAQDKSAAQTLGRCSGVVLPGVHLTLFRVLFGELLSKVAIFVDPNIDPKESKTRRGRKKDTENLISAKEFKFDMLTANKLTWPELARRYILAISSISGCMDLSDISSREGVKLFRCLQGDGGILCGALPGVAGMEKDALLLVEAENLICKSSVNEESKVFMMDQKDTDMVDSPEVSATDNKTLPDWAKSLEPVRKLPTNVGTRIRKCVYESLERKPPEWARKILEHSISKEVYKGNASGPTKKAVLSVLTEACRVKVPHNPEKPRKERNAISISEAILKKCRIALRSAISSDESKLFGNLLGTTLVNSNENEDEGILGFPGMVSRPLDFRTIDIRLAMGAYYGSWEAFLEDVQEVIRNLHTAFGDRPDVLEMVVALSQSFESLYKTEVLDLVEKFDKYLSDKNAGSEMHEELHDILTAANSLPKAPWEDGVCKVCGIDRDDDSVLLCDKCDSEYHTYCLNPPLARIPEGNWYCPSCMLGQTKAHHDQGVQDVKRQQKKFVGEEAHAFQEELNKLATAMEEKEYWDLNMQERIYLLKFLCDEMLNTALIREHLDQCSDKLGDLQQKFRASNFELKDLKYKEEMRTSYARQSRSSKTEQHFNNSSGPVENQQQCTPTALDHLEEAEQGNVGVNLNNPADGVPDGQLNVGKPYKSDKDISSASMVEERKSSGLSEQPSGMAIDQIDGDAIDEGSQSCEKRSLGAKSSTCDNLNLKDTEFSTPGRELPDERASTSFQDNLEASSTKSIELDADNNEMDTLSDDISKLQDSISLLESQINMASSRRECLGKDSIGRLYWVIGRPGKRPWLVADGSMLKPKERDISMVNSYPPSAFDCKGWNSASIFIYESDEEIQCLLDWLRDYDPREKELKDSILQWQRHFCHQSSSPLVDPPISGPKGEQLMELPNTKAAVILEQKYGLQLDQDTSDLPKKRGKKIKLSSEDRTYRCDCLEPVWPSRYHCLTCHETYLISTEFEGHNDGKCSKIHQSPDESRENDEPKVKVTKSDTKEKDSLECSSVIEPSSDRKLMQCPYDFEEICRKFVTNDSNKETVKQIGLNGSNGVPSFVPSPAFFLEPAIVQSQNRKDDELKDWTSSLEECNAMSAQKLVQEVSKSGQSCPGNVGDEKVQKSKKPTPDNTSGEEAHSTTGKPTRLLAVNGGLVPESSLRPLIGRNSHILKQQKINLLDIEAALPEEALRASKCQQIRRRSWRAFVKDAESISQMVLAANLLEGMIKAEFLKNDWWYWSSFTAAMKTSTVSSLALRVYTLDDCIIYSKDQVPSVEPADNTRFQKEELVLHVRAFDLDATMGGALGRCIDHLFDVSGKFATSDRNVDSSCDRYNFDCN

SEQ ID NO: 108020 - protein, 789 aa, Oryza sativa
  Clone ID: PAT_MRT4530_12314C.1.pep
MNITQILLSAQSADGNLRVVAEGNLKQFQEQNLPNFLLSLSVELSDNEKPPESRRLAGIILKNSLDAKDSAKKELLIQQWVSLDPSIKQKIKESLLITLGSSVHDARHTSSQVIAKVASIEIPRREWQELIAKLLGNMTQQGAPAPLKQATLEALGYVCEEISPEHLEQDQGMNQTELSPEVRLAAVKALYNALDFAESNFANEMERNYIMKIELQEEYEGSDDANSTVNYRFIEKALPSLVPMLLETLLKQEEDQDQDDNVWNISMSGGTCLGLIARTVGDAIVPLVMPFVEGNITKPDWHCREAATFAFGSILEGPSVEKLAPLVQAGFDFLLNTTKDPNSQVRDTTAWTLGRVFELLHSPASANPIITSANLTRIMTVLLESSKDVPNVAEKVCGAIYFLAQGYEDAESISSVLTPFLPNLIAALLSAADRADTTHFRLRASAYEALNEIVRVSNISETSGIIGQLLQEIMRRLNLTFDLHILSSGDKEKQSDLQALLCGVLQVIIQKLSSSDAKSIIAQTADQLMFLFLHVFACHSSTVHEEAMLAIGALAYATGTDFVKYMPEFFKYLEAGLQNYEEYQVCSISVGVVGDICRALEDKILPFCDGIMTVLLKDLSNSMLNRSVKPPIFSCFGDIALAIGDNFEKYLPYAMPMLQGAAELLAVLDHTDEDMVDYGNQLRRGIFEAYSGILQGIKGAKAQLMIPYASHLLQFTEAVYKDRSRDESVTKAAVAVLGDLADTLGSSSKDLFKSNLFHVEFLRECHDLDDEVRDTASWAQGMINQALVS

SEQ ID NO: 108021 - protein, 868 aa, Oryza sativa
  Clone ID: PAT_MRT4530_12315C.1.pep
MNITQILLSAQSADGNLRVVAEGNLKQFQEQNLPNFLLSLSVELSDNEKPPESRRLAGIILKNSLDAKDSAKKELLIQQWVSLDPSIKQKIKESLLITLGSSVHDARHTSSQVIAKVASIEIPRREWQELIAKLLGNMTQQGAPAPLKQATLEALGYVCEEISPEHLEQDQVNAVLTAVVQGMNQTELSPEVRLAAVKALYNALDFAESNFANEMERNYIMKVICDTAVSKEVEIRQAAFECLVAIASTYYVHLDPYMQTIFNLTANAVKGDEEAVALQAIEFWSTICDEEIELQEEYEGSDDANSTVNYRFIEKALPSLVPMLLETLLKQEEDQDQDDNVWNISMSGGTCLGLIARTVGDAIVPLVMPFVEGNITKPDWHCREAATFAFGSILEGPSVEKLAPLVQAGFDFLLNTTKDPNSQVRDTTAWTLGRVFELLHSPASANPIITSANLTRIMTVLLESSKDVPNVAEKVCGAIYFLAQGYEDAESISSVLTPFLPNLIAALLSAADRADTTHFRLRASAYEALNEIVRVSNISETSGIIGQLLQEIMRRLNLTFDLHILSSGDKEKQSDLQALLCGVLQVIIQKLSSSDAKSIIAQTADQLMFLFLHVFACHSSTVHEEAMLAIGALAYATGTDFVKYMPEFFKYLEAGLQNYEEYQVCSISVGVVGDICRALEDKILPFCDGIMTVLLKDLSNSMLNRSVKPPIFSCFGDIALAIGDNFEKYLPYAMPMLQGAAELLAVLDHTDEDMVDYGNQLRRGIFEAYSGILQGIKGAKAQLMIPYASHLLQFTEAVYKDRSRDESVTKAAVAVLGDLADTLGSSSKDLFKSNLFHVEFLRECHDLDDEVRDTASWAQGMINQALVS

SEQ ID NO: 108022 - protein, 196 aa, Oryza sativa
  Clone ID: PAT_MRT4530_12316C.1.pep
MTGGGGAPQEDDATELRRRASLGKGRTGLAAPWDERRAVRRGRGGSRRRESLAGDEKKRRILTSSGEAGVPTAIGASRVVPEGLCVPNENLGVTNSNLPFALPLPKTLAPSKRNKIAPPPGVEHLSIFDKCLAHANLDPCIFIFVKMLYAWAITLGKTGGSTSREVRRGRPQKTMTTSGGKLSLGTQWMVDRTMAV

SEQ ID NO: 108023 - protein, 224 aa, Oryza sativa
  unsure (1)..(224): unsure at all Xaa locations
  Clone ID: PAT_MRT4530_12317C.1.pep
TRPKGRIGGFLLRVNLELFDVSSIDKGDFYVKFHLQNKDDAFQWILFAIYGAAQDEYKEAFLSELVNSCRREALPMIIGGDFNILRNPQEKNKENFDNKWPFLFNDVIDSLNLREIKLSGHKFTWANSLPNPIYEKFDSVLVSAEWEEKNPLVSVHALTRDPSDHTPLLLDTGKGSLKNNQPLFKFELGWLLRENFHQLVVNSWSKQVRGRXIERWQNKIQRLR

SEQ ID NO: 108024 - protein, 359 aa, Oryza sativa
  unsure (1)..(359): unsure at all Xaa locations
  Clone ID: PAT_MRT4530_12318C.1.pep
EGISRCSLGQFLTVNSIWPRLVVTRPRVVATXFRYGLDKEFAENLNISAGGSFAHKTTAEGRELLDLILENDSFGRSEAVPKVEIIHEEPLHVELEPDSTVESSSRSQEPEEEEIHPPEISFQFEEDLFEDYXNTLNYSXEKRPPTKVNSNEPLDKSMLKETVKRLTIIMSNKWLREGELLSESIQIRCPSSTIMCHIGGNSVRALYNPSVGANIMSATFAFDCLGDRSLEPTVRTFRISTNSTTEGHPIEKLLDVPETGVLNLKIGRIATSVPMLQSTNSLMESLPVPEPIEGVMAISPFETLESIFDESIEEFNEGEDETGETMDLPKTDLPSRAPIELKPLPSSLSYAFLNSDAES

SEQ ID NO: 108025 - protein, 63 aa, Oryza sativa
  unsure (1)..(63): unsure at all Xaa locations
  Clone ID: PAT_MRT4530_12319C.1.pep
FFFFFSKIWPMARCICNYEATVLYTILPSLVTXSHNFHNPDKGSARHIHREGHXNPSRWLTVA

SEQ ID NO: 108026 - protein, 250 aa, Oryza sativa
  Clone ID: PAT_MRT4530_1231C.1.pep
MECKTCATSCRKEEFFHGSFARALNSDAYLIYLIYLAVGTGFVQNDMLASFGRDDSIKGIPSLAARHSQHRRLEVGCRASSLASFSYPELTSKPRWWWRTVACVPYLLPLHNMWSYADVIYQLHTYLQGFSLVYTFIDTMTLFPGWLLLVIFMTVYFFVVRRKWSPHFLRFHVILAILLDTGSQAVATMCTWMPSIVYQGTPMQYFWMAIAFIQIFTVLECMRCALAGMYPNVPFISHTAFIHSDLNLFR

SEQ ID NO: 108027 - protein, 233 aa, Oryza sativa
  Clone ID: PAT_MRT4530_12320C.1.pep
MTNETLRWKLFPFSLRDEAKQWYTLSIKKFQGEWEELKCKFCLAFFPLTRVINLRLDILSFRQNEKESLGAAWARDDLYEDYGNTLNYSSNTKAHPKHEPFEEVMYVSSFVSSEPIDHLHETERPSSPSIKPKPYPSVPQNVVIVYHQETTRFLHDVSLEKEAIDKLETSTLEDSDVPMVKLLTINKALPRDTPDYHEPMYKDKCGGDLAHQRHNQSKITLEGMSHDKPHKEN

SEQ ID NO: 108028 - protein, 567 aa, Oryza sativa
  Clone ID: PAT_MRT4530_12321C.1.pep
MDISRTNEGYTSCGPVVEMSWHRAGVLLLGAQSCLPVPEVPAVDKESAKNLDISAGGSFAHKTTTEGRELLDLILENDSFGRSEAVPEVEIIHEESLHVESEPDSTADSSSQSQEPEEEEIHPPKIPFQFEEDLFEDYGNTSNYSCEKRSLTKVNSNEPLDKAMLKETMKKLTTIMSNEWLREGDRQLEPTVKTFRISTNSTTEGLGIISGVPTRHNNVEVILDFHVFDISDFDILIGHPIEKLLDVPETGILNLKIGRIATSVPVFQSTNSLTEPLPIPEPIEEVMAVSPFETPESIFDESIEEFNEGEDETRATMDLLKTDLPSRAPIELKPLPSGLRYAFLNGDVESPVIISDKLSKEETARLIAVLEKHRAVFGYSLQDLKDAKHACRMFHEIIFPCFGTPRMKTVNEMGKAWKNKLPDALWAYRTAYKMPIGMSPYQLVYGKTCHLPVELEHRAHWAIQTWNKDLKGAGQYKKMQPSELEEWRDKAYHNAKIYKDRTKRWHDKRINHKEFKAGDKVLLFNSRVKLFRHGKLRSKWMGPYTVVNASSHGAVTLRDNEGNIFNV

SEQ ID NO: 108029 - protein, 399 aa, Oryza sativa
  Clone ID: PAT_MRT4530_12322C.1.pep
MTHETLKWKLFHFSHRDEAKQWLDKESVENLDISAGGSFAHKTTVEGRELLDLIFENDSFGQSEAVPEVEIIHEEPLHVESEPDSTIESSSQSQEPEEEEIHPPEIPFQFEEDLFKDYENTSNYSCEKRPPTKVNSNEPLDKAMLKETVKKLTTIELPINDYPRDDMLLKVTDSDPWYATIVNFMVAGHMAYYGDAFRQMKACRSLRSVMLPHMCQKHGGITARDAMPLTYNLQVELFDVWGIDFMGPFLKSYDCEYILVAVDYVSKWVEAMPCRAANTKHARRMFHEIIFPRFGTPRMKTVNEIGKAWKNKLPDAWAYRTAYKTPIGMSPYHLVYGKTFHLPVQLEHRAHWAIRTWNMDLKKAGQHRKMQLSELEEWRDKAYHNAKIYKERTKRWDDK

SEQ ID NO: 108030 - protein, 694 aa, Oryza sativa
  unsure (1)..(694): unsure at all Xaa locations
  Clone ID: PAT_MRT4530_12323C.1.pep
MKQPTIQNLSAPRADLCEPSCSSKPILSDGYEIGPSFIAIVREQTFYGGIGENPYVHLWDFELVCSCLSIVGMTHEALKWKLFLFSLRDEAKQWHTLSVKKFHGEWEVLKCKFCLAFFPLTRVINLRLDILSFRQNEKESLGATWARFSLLTKSGPDLSLPNHMLLQHFRYGLDKESAVNLDISARGSFAQKTTDEGRELLDLILENDSFGRSGAISEVEIIHEDPLHVESEPDSTAESSFELLQPEEEEIHPQEIPFRFRGDLYEDYGNTLNNSSTKEAHPKHEAYKEVMFVSSFISSEPIVHLHETERPSSPLIKPKPCLSGPHNIVLVYHQETTRFLHDASLEKENLQATDKLETSTLEDERKHSTYEHESFSFKIPQDSCSQKESPESCSISTTSLCEDHNHLPVLISNMFRRMVVDAYIYHKYCKSRICLXALILQNDVPLVKLVTINKALPGDTPDYHVGSSTFAQKRXDILRLYSIVPTDHAFKAQGSCTXGNKKTIKEQCTITSXTLISCSLSMRKDMHREPSRTNAKLVAFLHSVQILXKTYLVRISYTMCILISCLHPARIPIISIVAIKKEKKETASPRSSSLSVAGSRSSRRLPSPSYAATSLGSARSSSTPSTVPLTLYLILMYKRYNRASCNSAQSCVLXSVKESSIYSLHMMVTAMGIVQNALQPSLGRHQQRTRGGPG

SEQ ID NO: 108031 - protein, 152 aa, Oryza sativa
  unsure (1)..(152): unsure at all Xaa locations
  Clone ID: PAT_MRT4530_12324C.1.pep
WWERRPAGGRRRGGRXGEGAAPSEGRGGEAPAAPVGRGGGGEAASGVGRRPSGWGGGGGGGGGLWSQDPPAPRGSSAPSRPGSAPASRPARLTGENRKNPVRSSRKPRGGHREGGGRRWRASCLPSSTGPVGVVAGQSGSTGRRWRRVGAAG

SEQ ID NO: 108032 - protein, 562 aa, Oryza sativa
  unsure (1)..(562): unsure at all Xaa locations
  Clone ID: PAT_MRT4530_12325C.1.pep
MEQPAIQNLSAPRADLCEPSCSSKPILSDGYEISPGLIAIIRDQTFSGSVGENPYLHLRDFELVCSCLSIVGMTHETLKWKLFPFSLRDEAKQWYTLSVKKFHGKWEELKCRFCLAFFPLTRVINLRLDILSFXQNEKESLGAAWARFSLLTQSGPDLSLPDHVLLQHFRYGLDKESAANLDISPGGSFAHKTTAEGRELLDLILENDSFGQSEAIPEIEIIHEDPLHMESKPDSTVESSFQSLEPEEEEIHSPEIPFQFRGDLYENYENTLNYSSEKKAHPKNEPFEEVMFVSSFVSSGPISHLHETERLSSPSIKPKPCPSGPQNVFLVYHQETTRFLHDASVVKENLQATDKLETSTLEDERKHSTYEHESFYFEIPLNSCSLKKSPESCLISTTSLFEDHNHLSVLISNMFRRMVVDAYIYHXYCKSRTCLXALILQSDVPMVKLLTINKALSGDTLDYHVGTCIFAQKXRCILRLXPTNHAFKAXGSCTRGNKMTIKEQCTITSXTLISRSFVLLLIITTSVGAICVCRSFEVKTHPSYDKMHLCSFKTRLHGLEAP

SEQ ID NO: 108033 - protein, 38 aa, Oryza sativa
  Clone ID: PAT_MRT4530_12326C.1.pep
PRVRFEEEFGFEIPDNEAEKIDSIKTAVDFVASHPQAK

SEQ ID NO: 108034 - protein, 471 aa, Oryza sativa
  unsure (1)..(471): unsure at all Xaa locations
  Clone ID: PAT_MRT4530_12327C.1.pep
IVLGHQISERGVEVDRAKIEVIRQLPPPVNDMGVRSFLGHAGFYRRFIKDFSKIARPLTALLANDVPVDFDDECMKSFKILKESLISAPIIQPSDWSLLFEIMCDASDFAVGAVLGQTKDRKHHAITYASKTLTGAQLNYATTEKELLAVVFAIEKFRSYLVGAKVVVYTDHAALKYLLTKKDAKPRVIRWILLLQEFDIEIMDKKGVENYVADHLSRMQITNMQKLLINDYLRDDMRLKVIDSDPWYATIVNFMATGHVPPVENKKRLIYESRRHLWDAPYLFRVCSDGLLRICVSTDEGIMIIEKCHAAPYGGHYGAFRHXAKIWQSGFFWPSMYDDTKEFVRICTSCQKHGGIPARDAMPLTNNLQVELFDVWGIDFMGPFPKSYACEYSLVAVDYVSKWVEAMPCRAVDAKHARRMFHEIIFPRFGTPRMAISDGGSHFIDKTFRKFLQELGAQHNIATPYHPQTSG

SEQ ID NO: 108035 - protein, 515 aa, Oryza sativa
  unsure (1)..(515): unsure at all Xaa locations
  Clone ID: PAT_MRT4530_12328C.1.pep
MEEPTIQNLSASRADLCEPSCSSQPILSDGYEIGPGFIAMIREQTFSGGIGENPYRHLRDFELVCSCLSIVGMTHETIKWKLFPFSLRDGAKQWYTMSVKKFHGEWEELKCKFCLAFFPLTRVINLXLDILSFRXNEKESLGAAWARFSLLTQSGPDLSLPDHVLLRHFRYGLDKEFAENLDISAGGSFAHKTTVEGRELLDLILENDSFGQSEAIPEIEIIHEEPLHVELEPDSTAESSFQLLKPEEEEIHPSEIPFQFRDDLYEDYGNTLNHFSKTKAHPKHEPFEEVIFVSSFVSSEPISHHHETERPSSPSIKPKPCPSGPQNVVFVYHQETTRFLHDVSLEKENLQATDKLETSTLEDERKHSANEHESFSFKIPQDSCSHKKYPESCSISTTSLCEDHNHLSVIISNMYRGVVVDAYIYHKYCKSRICLXALILQSNVPKVELVTINKALLGDTPDYHVDTCTFAXKRCILRIVPTDHAFKAQGSCTXGNKKTIKEQCTITSNTYIMLL

SEQ ID NO: 108036 - protein, 953 aa, Oryza sativa
  unsure (1)..(953): unsure at all Xaa locations
  Clone ID: PAT_MRT4530_12329C.1.pep
SPVQVVPKKGGMMVLKTRTTSCPQQTVTXWRMCIDYRKLNKATKKDHFPLPLIDVMLERLANHSFFCFLDGYSGYHQIPIHPDDQSKITFTCPYRMYAYRRMSFGLCSAPASFQRCMLSIFFDMIDDFXYDKTFDHCLENLDRVLQRCQENDLVLNWKKXHFMVREGIVLGYQISVRGVQVDRAKIVVIRXLPPPANVKGVHSFLSLAGFYRRFIKDFSKITRPLTTLLAKDAPFDFDDECLKSFKXLISAPIIQPPDWLLPIEIMCDASDFAVSAVLGQTKDKKHLAITYASKIFTRAQLNYATTEKELLAIVFAIDKFRSYLVGAKVIVCTNHVALKYLLTKXDAKPRLIRWILLLQEFDIQIKDXKGVENFVADHLSRMQITNMQELPINDYLXDDMLLKVTDSDPWYAIIINSMVAGHVPPGENKKRLIYKSRRHLWDAPYLYKVCSDGLLRRCVPVDEGMKIIXEVCHATPYGGHYGAFRTHAKIWQNGFFWPTMCDDTKEFVRRCTRYQKHGGITAWDTMPLTYNLQVKLFDVWGIDFIGPFPKSYDCEYILMAVDYVSKWVEGMPCRATEAKHACRMFHEIIFPCFGTPRMVITAGSLSVPRSPHPSLSVLRSLPVGRPPVAADVACRLGEGGGGGGGGEDGGSEEEERREGARGEGEGEGAAEEGGEGEGAAEERESGRARQKNRGGEGKARWRSGGERVVCVDKDKDSDDALSDRLARLAQLSELKEWRDKAYHNNAKIYKDITKRWHDKRIKHKEFKAGDEKPMRRQYTMEQSLRKEPTAPTTIGHAPLQARRRRRLKTSGKTPHRVGNRSPAAMPPSHDLHPCVLRRDVAFPDGGLREQVWAVVYMPELVGTAGQKKSVQRNWLLPRRTHSGGPAATTVQGEDGVGGDRSAWKSVCGASETCGVGRRWATVAGEIGVGGDLSTGGFPTAGIGGSAGVSFVSK

SEQ ID NO: 108037 - protein, 67 aa, Oryza sativa
  Clone ID: PAT_MRT4530_1232C.1.pep
VHEQTITIYILDLSGHSSGSCRRSNRAACWPGRLWRATGRSRANAGPELTSTGLPPTPVGLCCACAS

SEQ ID NO: 108038 - protein, 350 aa, Oryza sativa
  Clone ID: PAT_MRT4530_12330C.1.pep
MEQPTIQNLSAPRADLCEPSCSSKPILSDGYEISPGFIAMIREQTFSGSIGENPYLYLRDLELVCLCLSIVGMTHETLKWKLFPFSLRDKAKQWYTMSVKKFHGEWEELKCNFCLTFFPLTRVINLRLDILSFRQNEKESLGAAWARFSLLTQSGPNLCLPDHVLLQHFRYGLDKESATNLDIFAGGSFAHKTTAEGKELLDLILENDSFGQSEACPEIEIIHEYPLHVESEPDSTVESSFQSLEPEEEEIHPPKIPFQFRGDLYENYENTLNYSSEKKAHPKHEPFEKVMFVSSFVSSESISHLHETERPSSPSIKPKPCPSGPHNDVLVYHHETTQFLHDVSLEKENP

SEQ ID NO: 108039 - protein, 79 aa, Oryza sativa
  Clone ID: PAT_MRT4530_12331C.1.pep
KTGHATPQKKTRGGGGFNLGLSIRDGGPKGGNFLGRGRPNFGAFLQHNRIGRSPFKLPPTHFLSLKGPPHFFLRGKQKV

SEQ ID NO: 108040 - protein, 135 aa, Oryza sativa
  Clone ID: PAT_MRT4530_12332C.1.pep
MQSGSEMRPVHNSVDTVNAAAVAIVTAESRTQPQAEPRRKWADWLSVYFCFGSQKNGRRISHAVLVPEPLPPRTDAPMPEIPIHPPPPVFPFVAPPSSPASFLQSGGASIVQSPVGAPSFSPLSPNSPSPTGPPS

SEQ ID NO: 108041 - protein, 115 aa, Oryza sativa
  unsure (1)..(115): unsure at all Xaa locations
  Clone ID: PAT_MRT4530_12333C.1.pep
FKRVPQDWRKRLAGIRARLDVDFGFLPWELDPCLLAFEPDETGHLEAKKIYGMLLESQPGEYXNIFGPLTGSAGERQAIVKAYEKDHVILGEAAHIMVQNADYDXPDQRKQMQKT

SEQ ID NO: 108042 - protein, 111 aa, Oryza sativa
  Clone ID: PAT_MRT4530_12334C.1.pep
MGGAVTGGAVAGVLTGRGRRPPRSLVLDMNSRGINVEAAEEGRSKRPWVVVGEDGRVGCSPSSSRRSGGGGRPRAEWKGGRDHAKDAVRTFDARGAAIIASQAAAYFSTEF

SEQ ID NO: 108043 - protein, 89 aa, Oryza sativa
  unsure (1)..(89): unsure at all Xaa locations
  Clone ID: PAT_MRT4530_12335C.1.pep
RSPLVLLSKRGAGLFKKAAELALLFFFYMXLLVMSFHCXLYKFFSSSMERSIDRYXIIYGARKVPNNFMSFSNNDENSFLYCRLKDITG

SEQ ID NO: 108044 - protein, 231 aa, Oryza sativa
  Clone ID: PAT_MRT4530_12336C.1.pep
MLVWWPQHGSEVLVSLLWPPGKERMTPPPPPPRRRRCRARPTSTAAASPPPLQSPAAASTAARAPDLREGEGVVAASKGDEGGAEEKDQRWIRAAWSTASRSERREPGSTVDDVEVGATLPVVRRRRIRPPRGSAAADPASLPAPESRGSWLSSSRIRRLRPSGDRIRRPPGPSRSPSSPSLVRRGFQRREEEEEEEEEKEWRGPKKLPSGFERASWFDPATNKIEKRTKS

SEQ ID NO: 108045 - protein, 71 aa, Oryza sativa
  Clone ID: PAT_MRT4530_12337C.1.pep
RPAALQPAAAPRRRRPGLTSRSSPPQSLHRIKREHGVLSSICFGLQCRDLVRSEIDRCFGSVPLSSSVSFN

SEQ ID NO: 108046 - protein, 93 aa, Oryza sativa
  Clone ID: PAT_MRT4530_12338C.1.pep
PPPSPLSPRAATSASRRRHRRPHRLAPPPSSPPPPPPSPSPSASTSFSPLASPLSPSADFEADAEKATRRTLLSSSPLVSPLPARNCASPPSS

SEQ ID NO: 108047 - protein, 134 aa, Oryza sativa
  Clone ID: PAT_MRT4530_12339C.1.pep
LLLLLLVLLAYRELEFRGYRPNRAQPTSAPRPPFTAEPGEIGSPATPRPPSSPPSSRGGVRNPRPRPETGLPTSDQRAYRTGAAAAAPRRRRSNGQSPPRAPAGRRPGAAAAAAAAEWMAGGPHASEGRRRPGE

SEQ ID NO: 108048 - protein, 171 aa, Oryza sativa
  unsure (1)..(171): unsure at all Xaa locations
  Clone ID: PAT_MRT4530_1233C.1.pep
LGGACATGERARERERERGEGERHEALVLDTRAGLEPTGDAPGWTQAPRHSIGGSTSQSASENRXQVPHHVHXQWGNMNARSSSSSGMPPFSNXWRSISSRDLGEITRRLDTLDIRTREIHHNLEEHIAQMQEWQQNADAQFTNINNLMQQQHAVLQAYFCFQGFNPYQGP

SEQ ID NO: 108049 - protein, 40 aa, Oryza sativa
  Clone ID: PAT_MRT4530_12340C.1.pep
DVHLKGSSSFTSSTIYVSMKANLVTCSYYDIGIYYSWYNV

SEQ ID NO: 108050 - protein, 193 aa, Oryza sativa
  unsure (1)..(193): unsure at all Xaa locations
  Clone ID: PAT_MRT4530_12341C.1.pep
MPTHVHSIASQDVHSQIRQLIHELVNIKDTTGEFLMTLADGQIIDTKGWNDWEWTHGIGLYGIWKYYEMTGEAKYLQIIEDWFSARFKEGHKGKNINTMAVFLTLAFVYEKTKNPTYLPWLDAWAEWAMHDLPRTKYGGFQHITYLDVNEQQLWDDTLMMTVMPLAKNXLVLNRPHYVAEAKXQFLLHVQYLF

SEQ ID NO: 108051 - protein, 74 aa, Oryza sativa
  Clone ID: PAT_MRT4530_12342C.1.pep
SVQGRAQTKRASLRTYSLIHADKKEQLFYYSYLLRKVEIQKNSETVNLILTNAQPPLKPSALLARERRIVHRGW

SEQ ID NO: 108052 - protein, 335 aa, Oryza sativa
  Clone ID: PAT_MRT4530_12343C.1.pep
MAYARGGKEESWNFVFAGAATSGFLRLRQGAVTAGRDALWSAAFFALAEGASLAIHRALDDLPPADGRRGLAARAPVGRPRRLPASPGFPGQLIVVKEVAVADNEDDSGFSDGFFAEERHASQAQLSLLRAPIMASPSPPRPDERDTDLPLPSPPRKPYPGFILDDAGGGFLIGGGVGSAYHAARGLLGSSSGHRLAGAARAVRANAPRISATWAARCGLYGAFKCALSLPRATDGDPVVSVLAAGAAGAAHCLRRGPLAVGRGALVGAASMAVIERADAALDNLRSWVHYHRRLVPEEDIDGGGGSDPKPDDEPPIGFLGVPPKPVVVEEVPAG

SEQ ID NO: 108053 - protein, 174 aa, Oryza sativa
  unsure (1)..(174): unsure at all Xaa locations
  Clone ID: PAT_MRT4530_12344C.1.pep
MAPPLQVATTASSSTREGKAPALNERILSSMSRXSVAAHPWHDLEIGXEIPRGSKVKYELDKKTGLVKVDRVLYSSVVYPHNYGFIPRTLCDDSDPLDVLVIMQEPVIPGCFLRAKAIGVMPMIDQGEADDKIIAVCADDPEYKHYNDIKDLPPHRLAEIRRFFEDCILLIYCS

SEQ ID NO: 108054 - protein, 579 aa, Oryza sativa
  Clone ID: PAT_MRT4530_12345C.1.pep
SPPVGGARTAAAAGRHCSAAAACTCFDVKSFVASLALLTLIMALWQLHPYQPLVLLPAALSSSPCPLLPRSPTSGIAVSFLSTAAATNSTDTATVPTTTAAARVAATTRPTLPARQRERDPNKRELRPYGTAAALFVQMGAYRGGPRTFAVVGLASKPAHVFSNPYFKCEWLPNAPAGAPPVRTKAYKMLPDWGYGRVYTVVVVNCTFPSNPNADNLGGKLLVHAYYSTASRRYERFVALEEAPGSYDDARFRPPFAYDYLYCGSSLYGNLSSARMREWLAYHARFFGPRSHFVLHDAGGVTPEVRAVLDPWVSAGRVTVQDIRAQEDYDGYYYNQFLVVNDCLHRYRHAANWTFFFDVDEYIYLPDGRALEDVLAQLQPYTQFTIEQNPMSSKLCIDDPTEDYSRSNCLCHAISVGIQLDSRNRFTILQLAYEICSFLEGLVFFVEIIPFLLYSFTTAQARHHREWGFEKLVFRNSITGVRRDRKYAIQARNAYSTGVHMSQNVYGRTTHKTESLIRYYHYHNSINVMGEPCRKFVPKPANGSKVMFEGIPYVYDDNMKRLAGEIRRFEKQTIGDVHT

SEQ ID NO: 108055 - protein, 96 aa, Oryza sativa
  Clone ID: PAT_MRT4530_12346C.1.pep
MAATFYGVGSIALAMHEDDEEEGSGRVFGFAAGDLVRPAVVTQQLFPMTAAAGGGECSREEQRHVAAAAEQWARPPSRKTRRGPRSRSSQYRGVTF

SEQ ID NO: 108056 - protein, 200 aa, Oryza sativa
  unsure (1)..(200): unsure at all Xaa locations
  Clone ID: PAT_MRT4530_12347C.1.pep
MKTALSKLSSSTSSSTLRHEPVAVFFSQMEAADCPHRLRPPTLVAALETGVPVFAMVDLVVVLPLCCVGQPLPRLRRSEGLHLDPWSTSATPPPPPPRHPPHPHNIYRPPLPPAFPGIVWSAGPHSRRPISMPLWTDSSPPPPPAXPQTHHSSPPPAPSPERCPTGGLAVAARHLCHHSLLRKKRIEKERRLTSGPQILP

SEQ ID NO: 108057 - protein, 288 aa, Oryza sativa
  unsure (1)..(288): unsure at all Xaa locations
  Clone ID: PAT_MRT4530_12348C.1.pep
MRNPLHVESEPDSTIESSSQSQEPEEEEIHPPEIPFQFEEDLFKDYENTSNYSCEKRPPTKVNSNEPLDKAMLKETVKKLTTIVSNECLREGELSSESIQIRCHSSTITCLIGGNLVRVLYNPSVGANIMSATFAFDCLGDKPLEPTVKTFRISTNSTTEGLGIISGVPTRHNSVEVILDFHVFDISDFDILIGHPIEKLLDMPESGVLNLNIGRIATSVLVLQSINSLTEPLPIPEPIEKVMAISPFEAPESXFNESIEEFNEGEDESGETIELPKMDQPSRAPIEL

SEQ ID NO: 108058 - protein, 459 aa, Oryza sativa
  unsure (1)..(459): unsure at all Xaa locations
  Clone ID: PAT_MRT4530_12349C.1.pep
MVVGTVSCCQRGSWRRRAAALALTVVVFAADTQRLRRENRLPAWTFNASTLLLSNKKESLGVAWARFSLLTQSGLDLSLPDHMLLQHFRYGLDKESVEYLNISARGSFAHKTTAEGNELLDMILENDSFSQSEAIPEVEIIHEDPLHVESEPDSTAKSSSQSQEPEEEEIHPLEIPFQFEEDLFEDYGNTSNYSCEKRPPIKVISNEPLDKAMLKEMVKKLTTIMSNEWLREGELSSEAIQIRCLEGIWSMPSTFAFDCLGDRLLKPTVKTFQISTNSTTEGLGIISGVPTRHNNVEEESPPLSLCCTEPLPIPKPSEAVMAISPFEPPESIFDESIEEFNEREDESGETIDLPKMDQPSRAPIELKPLPSGLRYAFLNGDAESPVIISDELSERETTRLIAVLEKHCAAFGYSLQDLKGISPTLCTHRIPLDPSCTPSREPQRRLNNAMXEVVKKEVL

SEQ ID NO: 108059 - protein, 79 aa, Oryza sativa
  Clone ID: PAT_MRT4530_1234C.1.pep
TYIWLPPQISVVGMIRQKKDGPKHWRDANHWQVSLITSDKKKSRLSELHAVNETCFSNRRPRVKDGCFDLGCKIKAERH

SEQ ID NO: 108060 - protein, 85 aa, Oryza sativa
  unsure (1)..(85): unsure at all Xaa locations
  Clone ID: PAT_MRT4530_12350C.1.pep
XLYFTGYCYQXYITNXKWXIGREQFXCQLFSNNKXICTGDEMXSDXVSRIEIFXCWGXYFFIAPLPFGRLYXGGXXAXFFLXXXA

SEQ ID NO: 108061 - protein, 350 aa, Oryza sativa
  Clone ID: PAT_MRT4530_12351C.1.pep
MEQPKIQNLSAPRVDLSEPSCSSKSILSDGYEIGPGFIAMIREQTFSGGIGENPYLHLWDFELVCSCLSIVGMTHETLKWKLFPFSLRDEAKQWYTLSVKKFHGEWEELKCKFCLAFFPLTRVINLRLDILSFRQNEKESLDAAWARFSLLTQSGPDLSLPDHVLLQHFRYGLDKESTANLDISAGGSFAHKTTKEGRELLDLILENNSFGRSEAILEVEVIHEDPLHVESEPDSTAKSSFQLLEPEEEEIHPPEIPFQFRDDLYEDYGNTLNYSSKMKAHPKHEPFEEVMFVSSFVSSKPIDHLHETERHSSLSIKPKPCPSGPHNVDLVYHQETTRFLHDAFLEKENF

SEQ ID NO: 108062 - protein, 94 aa, Oryza sativa
  unsure (1)..(94): unsure at all Xaa locations
  Clone ID: PAT_MRT4530_12352C.1.pep
GWTKLICILRHAFGDQYRTTDANLKDPEVLKLIFEGXDEQIDIEGFNFTGAGGAAMSMNNTDKMIXAFAQTTMTSAYDTKCSMYINTKNTRMKK

SEQ ID NO: 108063 - protein, 534 aa, Oryza sativa
  unsure (1)..(534): unsure at all Xaa locations
  Clone ID: PAT_MRT4530_12353C.1.pep
QSTIQNLSAPRADLCEPSCSSKPILSDDYEIGPSFIAMIREQTFSGSIGGNPYLHLRDFELVCSCLSIVGMTHEALKWKLFPFSLRDKAKQWYTMCIKKFHGEWEGLKCNFCLTFFPLTRVINLRLDILSFXQNEKESLGVAWARFSLLTQSGPNLSLPDHVLLQHFRYGLDKESTANLDISTGGSFAHKTTTEGRELLDLIVENDSFGQSEAIPEVEIIHEEPMHVESEPDSTAKSSFQPLESKEEEIHPLEIPFQFRDDLYEDYGNTLNYSSNTKAHSKHEPFEEVILVSLFISSEPIVHLHETEXPSSPSIKPMPCSSGPQNVVLVYHQETTRFLHDASLEKENLQATDKLETSTLEDKRKQSAIEHESFSFKIPLYSCSHKESAESCSISVASLCDDHDHLSVLISNMFRRMVVDAYIYHKYCKSRICLXALILQSDVPMVKLVTINKALPGNTPDYHVGSCTFAXKRGIQRLYSIVPMDHAFKAQGSCTRGNKKIIKEKCKITSXTLISRSLSMRKETPVDARARAATL

SEQ ID NO: 108064 - protein, 224 aa, Oryza sativa
  unsure (1)..(224): unsure at all Xaa locations
  Clone ID: PAT_MRT4530_12354C.1.pep
YLRDDMLLKVTDFDPWYAAIVNFILVRHVPPGENKKRLIYESRRHLWDAPYLYRVCSDGLLRRCVPVDEGMKIIEKCHAAPYGGHYGAFRTYAKIWXSGFFWPSIYDDTKEFVRRCTRXQKHGGITDRDAMPLTHNLQVELFDVWSIDFMGPFPKSYDCEYILVAVDYVGMVISDGGSHFINKTXRNFLQKLGAQHNIATLYHPQTSRQVETSNRQIKNILQKT

SEQ ID NO: 108065 - protein, 52 aa, Oryza sativa
  Clone ID: PAT_MRT4530_12355C.1.pep
FCLLQPPLATRIAPISRRSSPSVTVCIHSLTFDSILFLSSFYFLILFFYFIF

SEQ ID NO: 108066 - protein, 973 aa, Oryza sativa
  Clone ID: PAT_MRT4530_12356C.1.pep
MNEKESLGAAWARFSLLTQSDPDLSLPDHVLLQHFQYGLDKESAENLDISAGGSFAHKTTVEGRELLDLILENDSFGRSEAIPEVEIIHEEPLHVGSEPDSTAESSSQSQEPEEEQIHPTEIPFQFEEDFFEDYGNTSNYSCEKRPLTRVHSNDPLNKAMLKKTVKKLTTIMSNEWLREGELSSESIQIRCPSSTIMCLIGGNLVRALYNPSVGANIMSATFAFDCLGDRLLEPTVKTFRISTNSTIEGLGIISGVPVWHKSVQVILDFHIFDISDLEKPIEKLIGQPIEKLLDVPETGVLNLKVGRIATSVPVFQSTNSLTEPLPVPEPIEEVMAISPLEPPESIFDESIEEFNEGEDETGEPMDQPKTDLSSRAPIELKPLPSGLRYAFLNGDAESPVIISDKLSEREMTRLIAVLEKHRAAFGYSLQDLKGIRLSLCTHRIPLEPFCTPSREPQRRLNNAMREVVKKEVLKLLHAGIIYPVPYSEWVSPVQVVPKKGGMTVVENSNNELIPQRTVTGWRMCFDYRKLNKATKKDHFPLPFIDEMLERLANHSFFCFLDGYSGYHQIPIHPDDQTKDVPFDFDDERMKSFKILKESLISAPIIQPPDWSLPFEIMCDASDFALGAVLGQTKDRKHHAIAYASKTLTGAQLNYATTEKELLAVVFAIDKFRSYLVGAKVIVYIDHAALKYLLSKKDAKPRLIRWILLLQEFDIEIKDKKGVENFVADHLSYSNLWYATIVNFMVAGRVPTGENKKRLIYESRRHLWDAPYLYRVCSDGLLRRCVPVDEGMKIIEKCHAAPYGGHYGAFRTHAKIWESGFLWPSMYDDTKEFVRRCTRCQKHGGITARDAMPLTYNLQVKLFDVWGIDFMGPFPKSDDCEYILVAVDYVSKWVETMPCRATDAKHARRMFHEIIFPCFGTPRMVISDGGSHFIDKTFRNFLQELGAQHNIATPYHPQTSGQAETSNKQIKNIL

SEQ ID NO: 108067 - protein, 446 aa, Oryza sativa
  Clone ID: PAT_MRT4530_12357C.1.pep
MGRAFEYVILGGGVAAGYAALEFVRRNGGASSQELCIISDEHFAPYERPALSKGYLLPQDAPRLPAFHTCVGSKDELLTEEWYNEHGIVLVLGTRVISADVRQKTLLTSSGETISYKTLIVATGARAVKLEEFGVSGSDARNVCYLRNVEDADKLVGVMRSCPGGNAVVVGGGYIGMECAAALVTNNIKVTMVFPKKHCMGRLFTPKIAEFYESYYASRGVTFVKEAAVTSMQISAGKVTAVNLGNGRRLPADMVVVGVGARANTGLFDGQLVMENGGIKVNGRMQASDASVYAVGHVAAFPVKLFGRGRPAGWSTVFSLSWQFYGDNAGEAVHFGDLAPPGDGDGAAPKFGAYWVRDGRVAGAFLEGGSRQEYEAVAAAVRRGAAVADVAELERRGLAFATQATGGGGKPTCAWHATVGVAAAVSIAAFACWYGWQAPYVLKRDF

SEQ ID NO: 108068 - protein, 137 aa, Oryza sativa
  Clone ID: PAT_MRT4530_12358C.1.pep
MALFLVVEPWRGKQELLSFWRFPKRGLRSSPKVRKAVLSEQGKYTDGDGRSRGSMDISRTNEGYTSCGPVVEMSWHRVGVLLLGAQSCLPVPEVPAVGGIGSLCEEEDVVNCLPKLQKAAGSASEVKEAVKPTVKQE

SEQ ID NO: 108069 - protein, 498 aa, Oryza sativa
  unsure (1)..(498): unsure at all Xaa locations
  Clone ID: PAT_MRT4530_12359C.1.pep
MEQPTIQNISAPRANLCESSYSSKPILSNGYEIGPGFIAMVXEQTFSGGISENPYLHLQDFELVCSCLSIIGMTHETLKWKLFPFSLRDESKQXHTLSIKKFHGEWEELKCNFCHTFFPLTRVINLRLDILSFRQNEKEXLGAAWARFTLLTQSGLDLSLPDHVLPCXLQHFRYGLDKESATNLDISAGGLFAHKTTTEGRELLDQILENDSFGXSEATPEVEIIHEESLHIEXXPDSTAESSFQSLEPEEEEIHPSEIPFQFRHDLXENYENTLNYSSEKKAHTKHESFEEVMFVSSFIPSEPFAHLHETKRSSSPSIMPMPCPSGPQNVVIVYHQETTWFLHDASLEKENLQATDKLETSTLKDERKHSTFEHESFSFKIPQDSCSHKESPESCSICTISLCEDHNHLLVLISNMFRTMVVDAYIYHKYCKSRICXLILQHDVPMVKLVTINKAPPGDTPDYHVGTCTFAXKKRYILRLYSIVPTDHAFKAQGSCT

SEQ ID NO: 108070 - protein, 157 aa, Oryza sativa
  Clone ID: PAT_MRT4530_1235C.1.pep
NSPPNPRNQFMGKLPAQLTYRKRNRIAHWSVSRARTPLLDLAARRESPYGIHPQAKSLSTRSRTGWEEFPRPQSQTLGPIRAGNVVEDDEEEGGVRVYAREGWRRGGGLLPDLRRAADEGEGRRRAGALALRPRPRRRRRRGAAVRGERERERERER

SEQ ID NO: 108071 - protein, 968 aa, Oryza sativa
  unsure (1)..(968): unsure at all Xaa locations
  Clone ID: PAT_MRT4530_12360C.1.pep
WLREGELSSELIHIRCPSSTITCLIGGNLVRALYNPSVGTNIMSATFAFDCLGNRPLEPTVKTFRISTNSTTEGLGIISGVPIWHNNSVEVILDFHVFDISYFDILISHPIEKLLDAPETGVLNLKIGRITTSVPMLQSTNFSTKSLPVPEPIEEVIAISPFEPPESNLDEFIEELNEGEDESGETIDLPKTDQPSRAPIELKHLPSGLRYAFLNGDAESPVIISDKLSERETTXLIAILEKHRAIFGYSLQDLKGISPTLCTHRIPLDPSCTPSREPQRRLNNTMREVVKKEVLKLLHARIIYPVPYSEWVSSVQAVPKKGGMTVVENSNNELIPQRTVTGWRMCIDYRKLNKATKKDHFPLLFIDEMLERLANHSFFCFLDGYFGYHQIPIHPDDQSKITFMCPYGTYAYRRISFGLCNAPASFQRCMMSIFSDMIEDIMEVFMDDISVYGKSFHHCLENLDRVLQRCQEKYLFRSYLVGAKMIVYTDHAALKYMLSKKDAKPRLIRWILLLQEFDIEIKDKKGVENFVADHLSRMQITNMQELPINDYLRDDMLLKVTDSDPWYATIVNFMVAGYVPTGKNKKRLIYESHRHLWDAPYLYRVCSNGLLRRCVSKDEGMKIIEKCHAAPYGGHFGAFRTHAKIWQSGFFWLSMYDDTKEFVRRCTSCQKHRGITARDAMPLTYNLQVELFDVWGIDFMGPFPKFYDYEYILVAVDYVPMVISDGGSHFIDKTFRNFLQELGAQHNIATPYHPQTSGQAETSNKQIKNILXKTVNEMGKAWKNKLPDALWAYRTAYKTPIGMSPYQLVYGKTCHLPVELEHRAHWAIRTWNMDLKGAGQHRKMXLSELEEWRDKAYHNAKIYKDRTKRWHDKQINHKEFKAGDKVLLFNSRVKLFGHGKLRSKWMGSYTVVDSSSHGAVTLRDNEGNIFKVNGHRLKVFLDPLEVDCDLDVVNLVSFSFYPESLAPT

SEQ ID NO: 108072 - protein, 468 aa, Oryza sativa
  unsure (1)..(468): unsure at all Xaa locations
  Clone ID: PAT_MRT4530_12361C.1.pep
MEQPMIQNLSAPRVDICEPSCSSKPILSDGYEISPGFIAMVREKTFSGCTGENPYLHLRDFELVCSCLSIVGMTHETLKWKLFPFFLREEVKXWYTLFIKKFHGEWEELKCNFCLSFFPLTRVINLRLDILSFRQNEKESLGAAXARFSLLTQSGLDLSLPNHVLLQHFRYGLDKESAENLDISAGGSFAHKTTAEGRELLDLILENDSFGRSEAVPEVEIIHEESLHVESEADSTTESSSQSQEPKEKEIYPPEIPFXFEEDLFEDYANTLNYSCDKRPPTKVNSNDPLDKAMLKETVKKLTTIMSNEWLREGELSSEAIQIRCPSSTVTCFIGGKLVRALYNPSVGANIMSITFAFDCLGDRPLEPTVKTFRISANSTTEGLGIISGVPIRHNSIEVILDFHVFDISDFDILIGHPCHAEKNCLFPNASVLISVPRKAGVHHTNMIQKTHLYYIDNIYIITKALKV

SEQ ID NO: 108073 - protein, 146 aa, Oryza sativa
  Clone ID: PAT_MRT4530_12362C.1.pep
MESSALSNSSEASFVRDQRGLVAAAKPLGPGPKVVTPVGLVVEQAQCDLVIWVEVTGEIVGPDVCKEGAKGLVGGNNEVVFDGGREGHAERSRKGGTARARSCKGGDGSMVDMEATRSGVEGWHGSPGHAKVVTPRRRSHDLGLEK

SEQ ID NO: 108074 - protein, 149 aa, Oryza sativa
  Clone ID: PAT_MRT4530_12363C.1.pep
MASSSTSSSLAAAAMVAVVLLLLGATATSTQAARLLDEELPTAAIPAIPGVPGVPAVGPGIPVIPGVPGVPVVGPGIPFVPVIPGVPVIVPIIPGVPMIAGMTTLPVPPFVPPIDPGAGAGFPGVPPASSTTVQEDPQPPMPSVVPPVP

SEQ ID NO: 108075 - protein, 171 aa, Oryza sativa
  Clone ID: PAT_MRT4530_12364C.1.pep
GFGKMNITASNDLNEETIDALNKQGHEVDAFGIGTYLVTCYAQAALGCVFKLVEINKQPGVKLSEDVTKVSIPCKKRCYRLFGKEGYPLVDIMTGEDEPAPKVGERLLCRHPFNESKRAYVVPQHVEELLKCYWPGTTSEPREELPSINEIRSRCMGYLDRMRPDHMRRLN

SEQ ID NO: 108076 - protein, 89 aa, Oryza sativa
  Clone ID: PAT_MRT4530_12365C.1.pep
MDGLLGGREGKRRRLSSSAPWRVADVDAWNKNKSYAGWITGERHGSVAAPWQLLAHRYLATADGTSCFHMLFMWSVVTGYTGGMNPSEI

SEQ ID NO: 108077 - protein, 116 aa, Oryza sativa
  Clone ID: PAT_MRT4530_12366C.1.pep
HSRLQGEKATWCRRAAKMRRCQREDGEKASSEDEEALASGERSRPPPARMLAGRSWRGAGSGRSRRRGRSRRRAWPPLARTITEGRGEGGRACPLAAPSPSTDVLPSSGAVLPSVV

SEQ ID NO: 108078 - protein, 2631 aa, Oryza sativa
  Clone ID: PAT_MRT4530_12367C.1.pep
MGPLVNLSLSLLLPLFVCSSLSHCAAAELCRGHEAASAAGGYGLFIRTADCSMAEAQQEVAAAAKGYWSSPSSPSSMSPTPSPPPAAAVHGGGGRAEESTIAAAATPAARSLAAGDNGMQVISYCRNEIACNKISLSIPSAYREQSVRWFIRVLMTVFLCIKACTSETELPNHIKILAKTLQLYMIRTFRMVLVSKPTLLTAFREEGVWDLIFSENCFYFGSSVEDMQFHIVAEVQNEDINGNTEPTDSESLYLSDVNILQLEAISFLEYAATLNENKYNLVLVFLLCYIPECSALLEALEHCIYDPVVVSILLKSFRVILQLATEQTLVSFKSLDVITGVLKAACQQAKELQNFSCFPSDDVISSGYGSKIENIEMSSSGKRTEYAIICIELALSLFKEYVTISSYGRILILHNPDCIECLFNLFQEKNFRKHVLEQIFALFRVKLCIFQIFSFDLVNVWNYNTLTVYFNQLPPSSKQDHAAKLQLCSKYLENFTRANEKEKVNSELLVDLLVNMREIIMMDRMYYQNLFRDGGCFLYIVSLLNGTFNEATGEQLVLNVLETLTLLLEGNDASKASFRMLVGVGYQTLQSLLLDFYKWLPSPSERLLHALLSMLNEDVVILVLNILQKSSTSLQHYGLVVLQQLLKQSIANRTSCFRAGLLSYLLDWFSVEERDDTVGQIADLIQIIGAHSISGKDIRKIFALLRCGKIVAKKKHSSLLLTCLSHMLKEKGPEAFFEFDGHDSVSRHAFSDFSSFFYLKNLEGIEIKSPFQWPYNRGLSFSCWLRVENFPENGMMGLFSFFTEDGKGCSAVLSKSALVYEIMPLFTMAELPLETALMSTLSGITSSEASLSIKNLPKNERGNDSLHYRCNAVTDGEQSCHTSVINGKLRAEVIELVASVLDANVSNQQQMYLLSGLSIMGFLLQSATPKLLNIETLSALKYMFDVLRNCGMSKVLLKDAILQIYLNPQIWVHSSYEVQRDLYMFLLKYFETDGRFLPLLCGLPRIIDIVCQYYSEYVDCRCAVGSKSLLRTGNKQVVGDRPKIEEICKLRLLLLSLAEMSLKLQVCLADIRALASLFERNQDVACVEDILKMIIRALSEGPVLSSFLEHVNCLGGCCIFINLLKRESEPVRLLGLQLVGKLMAAFFNVLLGGTSPIKVILPTSCHINISFLPSYYRFTSVILVCIFRYLQSCQDSSARIRILSELIGLLDSNPTNIEALMEHSWNYWLETSTKLDVLKEYSLVSKGELDNVEIDEVILVRKLYALVLAYYLSAVKGGWHQLEDTVNYFLLKFGQGQLSSSYLLRDILDDIVGSLLQTSSEENIILSQPCCDNVLYLLKLIQELLFNQIGIKLLFPSNPSEESLSSIKWKDDIKSTLNEILIDESHSQYKSFPWKSCQFADEDEKSEDWWNFFDKVWDLICNLNGKGPNKLLPKGPNIEVPSLGQRARGLVESLNVPATEMAAAVVSGGIGTALGAKINRFSEKATLLREEIFPRVFFHLVILYLCKAGLENASKCVLQFMSLLPVLISEDEQSKNKLHFLIWSLLITRSQYGQLDDGARYHVLSHLILETIICGKSMLVPNILGRDDSMEIGNSNKDTGFILNFVQKDRVLAAATVEVKHMKAVQADRLSQLDELQSKLNEHFTEETQLEKMIEDNIHISITSALSADDKRKIAFRLAFDEDQQIVADKWIHISRALIDERGPWSANPFPNDVVTHWKLDKTEDKWRRRLKLKRNYKFDERLCQPSYSRNESTEACVDQSSLSTKVPLKLKRFLLKGVRAIFEDNAYEPIEDTNDTGESSQSSLLENQNPNNVSDLSDYRTAVQNKKESASNNGDNDYTKVLCSVHCVLITPKRKLAGQLDITRTVLHFSFEFLVEGTGGSSVFSKFKEIEDSDCKSDLGSVERLDGGRDYVIKTPNGVLMQKQSNKIKHHRRWNITKIKAVHWTRYLLQYTATEIFFDDSNAPIFLNFSSQKDAKNAGSLLVSLRNEALFPKGSTKGKSRVISFVDRRVALEMAENARDRWIKREISNFEYLMILNTLAGRSYNDLTQYPVFPWVLTDYTSEKLDFNKSSTFRDLSKPIGALDEKRFEQYVIGQVFEDRYVNFDDPDIPSFYYGSHYSTMGIVLHYLLRLEPFTTLHRSLQGGKFDHADRLFQSIDSAYKNSLSNTSDVKELIPEFFYMPEFLENSNSYHLGVRQDGEPLGDVVLPPWAKAANIFYYVTYEGAVDLENMDDLLQKSAIEDQIANFGQTPIQIFRVKHPRRGPPVPIAHPLYFAPQSIALTSSVSSTISHMSALLFIGLLDNTVILMNEGLILSIKLWLTTQLQSGGNFTFSGPQDHFFGIGSDVISPRKIGTFLAENVNFGRQCLATMQINSDKYLILCGNWENSFQIISLSDGRIVQSIRQHKDVVACVAVSSRGNVVATGSYDTTVMIWHAFRGRPSDHVVMERPVHIFCGHDDIITCLFVSTELDIVISGSKDGTCIFHTLREGRYVRSIRHPSGIGLSKLVASQHGRVVFYSESDLSLHMYSINGKHIASSASGGRINCMELSCCGQFLVCAGEHGQIVLHSMHCLDIIRRYDGAGKTITSLSVTPEECILAGTKDGSLLVFSMESPLLRRKSMPRTRIKPPTAS

SEQ ID NO: 108079 - protein, 93 aa, Oryza sativa
  Clone ID: PAT_MRT4530_12368C.1.pep
MDAMRGEGGRPLDPCVDDRHRWIFALMAAAAGSVQGRPPPAGSHALHRHNVEEAGACLCPPRLSPRAAAAAAIGRRGEDSGERRGHWREERRS

SEQ ID NO: 108080 - protein, 216 aa, Oryza sativa
  Clone ID: PAT_MRT4530_12369C.1.pep
MVLWVFGYGSLIWNPGFDFDEKILGFVKGYKRTFNLACIDHRGTPEHPARTCTLESDEEAICWGIAYCVKGGLKKEQEAMKYLERRECEYDQKISVDFYKEGDSLKPAVTGVLVFVSTPDPVGNKYYLGPAPLEDMARQIATANGPNGNNRDYLFSMEKALSNICHEDDSIIELANEVRKVLSRPKEKITGSDSPQKSHALVHLSALPEGTVVDSR

SEQ ID NO: 108081 - protein, 175 aa, Oryza sativa
  Clone ID: PAT_MRT4530_1236C.1.pep
VMRQNVAQSQISNSIVLLRFILSTNTDLRDSQGCSYKFQPWKDKKESHLNTQKDSKPTSAQAGNGQRVQTCSPKHKSAKIPAVRAWRWRRRLPCKGGRLWSGGGREDEVAVAVPAGARRRRRRWRAVGGRDAVAAANLRINQSIMREGGREMGSFRVRLASSRLSGRQQTAARRQ

SEQ ID NO: 108082 - protein, 563 aa, Oryza sativa
  Clone ID: PAT_MRT4530_12370C.1.pep
MQKLVRSFVRHLTRLRLRDSHCDARGKRNGGTGQGRSRDAVQSLPVEVPLPSFVRHRGGPGSDLELDGLPTSSSNASSGSHEEDHGPLQGVKGEGWMQVQGPIKNSAARSIGECQDQRYRLGSVLFHGKNERKQRPASVDFGCPSVDRSSTHSPGFLVNGTGAMNKGLSVSSQNKPGAPTSPGTPSYNRQGATVVGYQQGWSSERVALSSNGQRRHSGNSMVLPHNTGRTLPSKWEDAERWIFSPNPSNALGRTSIPQSRRPKAKSGPLGPPGRFSEPYSSVSSSSYLLDTGRVGNLTANSPFLAGVLLPEHVCVSSSHAGRDLSGASGEDKSNGMGGRSGEANGAHPAVWSTRVCQRMDSAVQSSPSLPTSQESVQACTDEQIEITTDLTTSSKPEISRKDVATQTSPELSRSSSPSGRPSFSRSLSVQQVKELESCFSKLEIRDVQMDDRVTLTRWSKKHVTRGSEKNSTNIIEWKKKTVESKSSAWEVTETAKCISKIEGEEAKMTAWENLQKAKAEAAIQKLVMKLEKKRSYSLERIFNTLRRHCHFQDGIGGGNQKAC

SEQ ID NO: 108083 - protein, 94 aa, Oryza sativa
  Clone ID: PAT_MRT4530_12371C.1.pep
MEDNEPSVSLKFFDGDAVTASTTMAVCANFLARDVNALTWYFSYLVLGKHAAQQLDTRTGEEDEFWISGHHHPLHTVQRRGGENARRICPAAPG

SEQ ID NO: 108084 - protein, 69 aa, Oryza sativa
  Clone ID: PAT_MRT4530_12372C.1.pep
GLKGVSYSPKCMLDFCLKLNYNNACSMRELFHFHSPYIDLHLSTAPIVINYLLLYRGCHASFTILEKSY

SEQ ID NO: 108085 - protein, 41 aa, Oryza sativa
  Clone ID: PAT_MRT4530_12373C.1.pep
YHAPPAETVPRPKAAAPACFSVIKMLSVLPHELSSAYSLCA

SEQ ID NO: 108086 - protein, 78 aa, Oryza sativa
  unsure (1)..(78): unsure at all Xaa locations
  Clone ID: PAT_MRT4530_12374C.1.pep
MAASALDQTSRFVGTATRRDELVRRVGDXAGRITMRLTVKSARNSIWYGPERPKYLRQSSGQTPSDTPGEYPPDYGRD

SEQ ID NO: 108087 - protein, 82 aa, Oryza sativa
  unsure (1)..(82): unsure at all Xaa locations
  Clone ID: PAT_MRT4530_12375C.1.pep
PEDTTDSFSGDNIYTLFDALLFXATQYNHFISCSYDXMNSHFSAISDQTTISASSIYQSMGIXSYKDGCCLADVKICSSFSE

SEQ ID NO: 108088 - protein, 71 aa, Oryza sativa
  Clone ID: PAT_MRT4530_12376C.1.pep
CGSGFGATASRSGLSAAEAVSMAGVMAIRASSTSAAGHPGELRLSHRSPPLGPVSWRIRVASVQATSPFSE

SEQ ID NO: 108089 - protein, 66 aa, Oryza sativa
  Clone ID: PAT_MRT4530_12377C.1.pep
MTALLAAVRLLQSSIFHVADTRALRSLSPPALPDAPAAESEKLAVVAPMPPSAITPVVATANRSPS

SEQ ID NO: 108090 - protein, 72 aa, Oryza sativa
  unsure (1)..(72): unsure at all Xaa locations
  Clone ID: PAT_MRT4530_12378C.1.pep
SIFYKLIQIDRFRGKNTTHCSSTPKTPNKIAASKIHQQNYTASXTHNSPEVDPGDAELRIQPTADHLPLLRP

SEQ ID NO: 108091 - protein, 34 aa, Oryza sativa
  Clone ID: PAT_MRT4530_12379C.1.pep
SVIASTHPYTLVLSFSTKIKMLAAAAHTSVGQLA

SEQ ID NO: 108092 - protein, 154 aa, Oryza sativa
  unsure (1)..(154): unsure at all Xaa locations
  Clone ID: PAT_MRT4530_1237C.1.pep
APGNSSFGQRQQWQGSGACRWWPIEGIKKFXXLSYLPPLTVEXLLKXIEXXLLRSKWVXPCLXFXKVGFLYREXNHRFPXNTNNGKFLGTMFETAPCFGLHLXPPKVLXGXPKKAXKAFPDAFXRIIGFXNVXQVQLINFIXLQTPPGCXRIGN

SEQ ID NO: 108093 - protein, 106 aa, Oryza sativa
  Clone ID: PAT_MRT4530_12380C.1.pep
ALEAWGTETLEARLALRKVVITKLPVPCRRRGGNIARAEAGSRMRSLLDPSLAACCWMGELAAHRRREKFSWIVLCFYVALLKRRKKSNFDWYNFEFLMFQPMYMD

SEQ ID NO: 108094 - protein, 122 aa, Oryza sativa
  Clone ID: PAT_MRT4530_12381C.1.pep
MARFNLTLSRDTARPQTDRIGGILGGKEYSAWHMQFALCLANLDGLLHRCAIGAAHNSLCRVLLLHEVWEWEGEAAAAAAAAEAAAEDRALRGIWAVGLLCRWQPQPQECSRKLTISCTPLH

SEQ ID NO: 108095 - protein, 127 aa, Oryza sativa
  Clone ID: PAT_MRT4530_12382C.1.pep
MADDGGRFGENPSPMSASTSPTRCPCPWLSPRPTRTRWRRQQQQPLAGMKNSFVGTEDDDEVGPGMKYRWIYDGHRVHQEETRWPQRWPTATARSRGGGAAGGARDCRSSALPSGLFRASAAARCPP

SEQ ID NO: 108096 - protein, 239 aa, Oryza sativa
  unsure (1)..(239): unsure at all Xaa locations
  Clone ID: PAT_MRT4530_12383C.1.pep
LSFAPNLLLVMPPRIRALRTVLLALADNFWVGNIHGTLTVPVISXYSRSXDALLPLQLTSGSEDHFVWRWTSDQRYSTGLACHALFLGQQSFACANLLWQAKSPVKCKLFLWLAFQQHCWTADLLLKRGINSHSAYPFYAQELETANHILLDCVFARQVXRQVLSSSGWSDLASSLGCSLXGLVTXSRARLSEHLRNGFDSLILLISXQVWNERNSRFFDYSLFSILVVLEFIRLEGRL

SEQ ID NO: 108097 - protein, 400 aa, Oryza sativa
  Clone ID: PAT_MRT4530_12384C.1.pep
MAPSLENPIVPLKEPVKSSESTSLSCSTTTTSSFQRFLLFFFVSGAARLRDLGRGAAAEMHPKLSRFAHRVLCCGRKGSGEDLSDEGSGSLRWVFSLRELRSATNSFNYDNKIGEGPFGSVYWGQVWDGSQIAVKKLKCAKNGTETEFASDVEILGRVRHKNLLSFRGYCADGPERVLVYDFMPNSSLYAHLHGTHSTECLLDWRRRTFIAIGAARALALAHLGDFGLIRFIPDGVDHDKIISENQRGYLAPEYIMFGKPTIGCDVYSFGIILLELSSGRRPVERSGSAKMCGVRNWVLPLAKDGRYDEIVDSKLNDKYSESELKRVVLVGLACTHREPEKRPTMLEVVSMLKGESKEMLSRLENDELFRPDSTVSSHGMSTPEGSSDCVPKNDQELAAA

SEQ ID NO: 108098 - protein, 101 aa, Oryza sativa
  Clone ID: PAT_MRT4530_12385C.1.pep
SEQNDEDILSIVRRHWEEGAIAEMIDHSLGRNYSETEVLKCVNIGLLCVQQNPVDRPTMADVMILLNSDTTCTMPALAPRPAYLIDGTSGYSQTVTQWSGR

SEQ ID NO: 108099 - protein, 44 aa, Oryza sativa
  Clone ID: PAT_MRT4530_12386C.1.pep
GAYGYHQERHSAVSDLAGCGFEEEGYPVVDYESILQIAKSTTVR

SEQ ID NO: 108100 - protein, 39 aa, Oryza sativa
  Clone ID: PAT_MRT4530_12387C.1.pep
YSCNKSYRYKFLIQRLKLNFTVFKVVHYNHNCFIFLTFL

SEQ ID NO: 108101 - protein, 264 aa, Oryza sativa
  Clone ID: PAT_MRT4530_12388C.1.pep
MDSKKFLQLLEEKKKRILEKKEAPLKWEQKLEAAAKAKADAEAKEKKLKSRKHRRRGHSSSDSESDSDSDGDRKHRKRKDRKRHRKHGHSDSDEAKRHKRRSKRRSSDSSDDTDSDEYDSGSEEENRRKKRSHRRKHRRHSSRSDSDASDYSSDDEERRSSKKDHSSSRSHRHHHHRSSGDDSGSESEERGRSRHKKHHRSSDEDATSDSNNHKHRRSRSLEESSDDAAAGEYEKVRNGKRPHKTGHHRHHHRHQHHQVYLPQG

SEQ ID NO: 108102 - protein, 697 aa, Oryza sativa
  Clone ID: PAT_MRT4530_12389C.1.pep
MDTCVAAGPNPQECLPFSCGDLGNISYPFRLQGDSRQCVSTPRPWYNLSCSRGKATIHINTRKYYVISINYTRENFLVVDATMQLDDDTNGTSCPLPRSDHLPYMIYWSDLSSIDSYGFKDLVTASDTWACFVNCSRAITNDSRYKPVTCLSGNNSFPYVYVYIYDDYGCCPVKRLQPSCRYLGMIPFDYVYQPGSYDDDIMSNVLQSASYRDIVGFIRKGFRVNFPLYNNDQRAPTIVERCLNNSMSYFKDQISGASIPHLTRALFWTEIHFVQCVSTNHDYTIKLFSVVITIVSAIDVTKLLFVLCRFVLAPLVVLTFLAHKYWKTRIAIDAVEKFLRMQEMLGPKRYAYTDIIAITSHFRDKLGQGGYGSVYKGVLLPGDIHVAIKMLDGKSDCNGEDFISEVATIGRIHHINVVRLVGFCSEEMRRALVYEYMPRGSLNRYIFSSERSFSWDKLNEIALGIARGINYLHQGCEMQILHFDIKPDNILLDDNFIPKVADFGLAKLYPREKSFVSDRALRGTFGYMAPEMACRSFGVISSKSDVYSFGMLLLEMAGGRKNADPNANSNSSRAYYPAWVYDQLIVDQQVDEISSAIDMHEKERKLWLVVFWCIQMKSYDRPTMSEVIEMLEGDVDALQVPPRPFFCDGDSTPPPPVPVMDSICLYSSELTAISEEEDVDGITQLDSSCLLGYERSI

SEQ ID NO: 108103 - protein, 965 aa, Oryza sativa
  Clone ID: PAT_MRT4530_1238C.1.pep
MGVKTLQVSGFALDDSADYVKDLLERIVGCGNVYAVKLRHPKNVTATSRAYAIVQFQTEEHASLVKNAAQRKILRRGHYYLKVHPSDRDIVPRPRVSMFKLEDVTLHFGCLLKETILSALWSRKGVSVEFGFNLKKIYFYLQLPNSSIEYKLELSHESIWEIQLQRPPKSQTKFLLIQVQAAPKIYEQTPRRSGVMYEDPLFNYFRDHTDDQWTRTTDFTSSSSIGQSYILCLEVPRRCDLPNIRDYFFYYHEYNHDFECRSGGYPYSSDTRFVPIVKSRGYVPYEILFKINHLVQNGTLSGPTVDDSFFRLDCEKLRATDLSPRSASGHDANRTALYKRVLSVLSDGITIGGKNFEFLAFSSSQLRDNSAWMFASRQGLAASDIRTWMGDFRNIRNVAKYAARLGQSFSSSTETLKVQKYEVEEISDIKNGTQHVFSDGIGKISSAFANEVAMKCNLKRFAPSAFQIRYGGYKGVVAVDPTSRWKLSLRKSMLKFQSDNITVDVLAYSKYQPGFLNRQLITLLSTLGVRDSVFEQKQEEAVNQLNKMVTDPQAAIEAIELMPMGEITNAVKELLLCGYQPDDEPYLSMLLQTFRASKLLELKTKSRILIPKGRAMMGCLDETRTLKYGQVFIRATSGVNDNDRPHPNECSGSDLDGDIYFVSWDPSLIPPRMVTPMDYTPAPTETLDHDVTIEEVEEYFTNYIVNESLGMIANAHVVFADKEDLKAESSPCIELAKLFSIAVDFPKTGVPALIPPELHVKEYPDFMEKLDKVTYESKGVIGKLYREIKKHTPHIKHFTREVARRSYDTDMIVDGYEDYITEAMALKDEYDFKLGNLMDHYGIKSEAEIISGCILKMAKNFTKKSDADAIRLAVRSLRKEARSRFSEMSLDDNGHGHDASEAKASAWYHVTYHPEFWGCYNEGYERPHFISFPWCIYEKLLRIKQRRKFVRKMQPELFSLHNLRI

SEQ ID NO: 108104 - protein, 734 aa, Oryza sativa
  Clone ID: PAT_MRT4530_12390C.1.pep
MYCTPHAVQYSYMAKNVMQLAILSTQRVVLLLWLLHAPAAADAALTTVAGCPSKCGDVDIPLPFGIGDHCAWESFDVVCNESFSPPRPHTGNIEIKEISVEAGEMRVYTPVADQCYNSSSTSAPGFGASLELTAPFLLAQSNEFTAIGCNTVAFLDGRNNGSYSTGCITTCGSVEAAAQNGEPCTGLGCCQVPSIPPNLTTLHISWNDQGFLNFTPIGTPCSYAFVAQKDWYNFSRQDFGPVGSKDFITNSTWDKSVPTVLNWAIRNNGSCSSITGLAPACVSANSNCVNTSNGVGYLCKCSPGYAGNPYATGADGCTNINECDLRRAEPAKYEKLYPCYSGSKCHDTEGDYKCKCRFWHRGDGKLDKGCRAIIPWTAVAAVATLLASAFLAALLLYIRRERKRRQRKGLFDKNGGNILRNVLNIKIYSEDELNKMTTNYSNMLGNGCFGGVYKGITDEKQEVAVKRFNPRDEERSRDDVVREITSQSSIQHDNLLRLVGCCLETDVPRLVLEFIPNGSLHTVLHGAGRNMHIPLLARLDIAVGSAEALAYMHSNIGHNSIVHGDVKSANILIGDNMEPKVSDFGASKLMSVAKYNKWSVFGDLNYIDPVYTSTGDFTDKSDVYSFGVVLLELITRRKAKYDGTSLRVQFDKHYKDDDMRRKMYDQDLLSDDAQPHCLECLDKMADIAVQCLRNNVDERPTMAEVLEDLKKLRESAKTHNTYPTRVDGEGKPDR

SEQ ID NO: 108105 - protein, 77 aa, Oryza sativa
  Clone ID: PAT_MRT4530_12391C.1.pep
SCKGKTISSLAASAVQQDDGEEPPQNDYSIKTPSPFFVICSIDSNSYAAAKTPKKYLQRRQINPFFPPNFKFRLNTS

SEQ ID NO: 108106 - protein, 89 aa, Oryza sativa
  Clone ID: PAT_MRT4530_12392C.1.pep
MEEEKRGALGGMGWDWGSKRWSTIRSRDRGPGEKPCSLLGQANPDQTLIFISRIDLAAVLLVSSVLLSSSIVSGSIYGRLVARCFFFDA

SEQ ID NO: 108107 - protein, 70 aa, Oryza sativa
  Clone ID: PAT_MRT4530_12393C.1.pep
CREVHPPTLYDQGGQTSTKGHRFMVNPRKWGIHTDLYTGIHAFQGCLGEAPVRRPWHGTPPAEQVQAETV

SEQ ID NO: 108108 - protein, 434 aa, Oryza sativa
  Clone ID: PAT_MRT4530_12394C.1.pep
MERGRAACRANVDAFLALLGVDPGELAGLELPATVDVMRERVEFLHSLDLSNEDLAAYPLALGCSVRKNMVPVLDYLGKLGVRQDALPDLLRRYPQVLHASVVVDLAPVVKYLQGMDVRPHDVPRVLERYPELLGFKLEGTMSTSIAYLVGIGVARRQVGSVITRFPEVLGMRVGKIIKPFVEHLEGIGLQRLAIARIIEKKPYVLGFGLEDKVKPNIEALLEFGVRKEALAFIVAQYPDILGIELRDKLATQQSLFESSILVSSEDFGRVIERMPQAISLGRTAVLKHVNFLTSCGFLLSQVSKMVVACPQLLALNMDIMKMSFEYFQNEMERDLEELVEFPAFFTYGLESTVRPRHEMVAKKGFTCSLAWLLNCSDAKFDERMKYDTIGIEEMEVDNSFDTNTLSERVEDEVEDEDLDEDSDYDSTDDEFIE

SEQ ID NO: 108109 - protein, 110 aa, Oryza sativa
  unsure (1)..(110): unsure at all Xaa locations
  Clone ID: PAT_MRT4530_12395C.1.pep
MGIHSPRSGCXNARKTEKPGRGKSHVLGLGLCVGQAAECGIKSLRLGXGVTLPDGWEGHGDVGIVENWMRGXTGPSGRVGVDCSEIMLMNRCRRWWSRDLGSPVDACGVR

SEQ ID NO: 108110 - protein, 111 aa, Oryza sativa
  unsure (1)..(111): unsure at all Xaa locations
  Clone ID: PAT_MRT4530_12396C.1.pep
MGIHSPWSECRNARMTEKPGRGKSRVLGLGSCVGQAAECGIKSVHHEESGVTLPDGREGHVDVGSVENWMRGXTGPSEGLGVDCSETMLMKRCRRWWSRDLGSPVDACGVR

SEQ ID NO: 108111 - protein, 108 aa, Oryza sativa
  Clone ID: PAT_MRT4530_12397C.1.pep
MPAQSERLRLPAAAPMPRGAHALYGLLALLGASVVVWSVAGKPPAAHAGHALAGFLLWLLGMIALLLSPYAAQPLFPVATTANLAVEKLKHRFSNPRTPAQAQAPALA

SEQ ID NO: 108112 - protein, 438 aa, Oryza sativa
  Clone ID: PAT_MRT4530_12398C.1.pep
MAPPPPPPPAAAASPTPMLLALTGLSTFSDRLVEFFNHWNSFIRYATAISDDLPPLPAADQPPNLADVAEPESTTPHSPVAVDEPESSTAPNPVAVAVAEPKPAPVPQPEEPRPNRGGDPSAEHMGRICERMGSGELLRFVISRMGDLSWLLRAVPPALRRAPNPAELVLRAIGRYYIRPGGRHTEAACELLLLSYVRAGCPLRPGQEAGDDHLRAEAREAALSWRSRLVRSKGRVAAAAANDARGLLLLMAAFGVPVEFPSQEIFELLHAAGGLACAEVLKCSKHFLDKLRDVVAHMLNRGIYHQTVATIIAFELQDAFPLSAIATCVIERVGRTKDQDSQEQHHLPGSKENDEEKLALLRLLSKYVEDPKQCSTENFSIADRIAMLEQSLAKPHQAFTGTKRKRTAQEDSVECTRGPKCSYTPAASSASRNKNLEG

SEQ ID NO: 108113 - protein, 404 aa, Oryza sativa
  Clone ID: PAT_MRT4530_12399C.1.pep
MLHLQKHLLLLSLPPRATASTLLSLRHHGLFSLTRFSAAAAAAKSAGHFAVEEYLVATCHLTPDQATKASKSISHLKSPSRPDAVVAFLAGLGLSAADIAAAVAYDPRLLCAEVDRTLAPRLAELAGLGLSPSQIARLVLVDPARFRRPTVISKLQYYVPLFGSFETLLQALKNNSYLLSSDLEKVVKPNVALLRECGLGACDIAKLCIPLPRLLTTSPERVRDMVAQAENVGVRRGSKMFRHAILAVAYISEEKIAAKMQFLMKTLKWSDAEARIAVSKLPVVLRSSEDKLSRVSEFLISEVGLEPAYIAYRPAMLTYSLERRLMPRHCVLKYLKDNGLIESDKSYYSAVQVTEEVFVEKYISPYEDTAPHLAEDYAAVSSVKIPTRFRLKGPKTGHASAQTA

SEQ ID NO: 108114 - protein, 55 aa, Oryza sativa
  unsure (1)..(55): unsure at all Xaa locations
  Clone ID: PAT_MRT4530_1239C.1.pep
MAAYTSKTFALFAVIALAASPTPAITLMQYCPPTXSHGHLDPCRQYLEANCRALV

SEQ ID NO: 108115 - protein, 89 aa, Oryza sativa
  Clone ID: PAT_MRT4530_123C.1.pep
THTGEMSQAAASHALAKAKLDDVWGPWRLSVLEEPETALLAMVNAVARQPRMPLPLPWPWPRVRHEEDVDSRLHCSLLSHLVVEPCVPC

SEQ ID NO: 108116 - protein, 471 aa, Oryza sativa
  Clone ID: PAT_MRT4530_12400C.1.pep
MDKKQGFFSALREEVARGLSPARARRRSQAAAAAEVAAALRYAGGGGGGEMLAPLMEGPDPESGDGGRSSSSAAAARREGWGRWVRGQLSRAPSTAGAAVVAAGGGGGAARRNDLRLLLGVMGAPLAPVHVAAGEPLPHLSIKDTPIETSSAQYILQQYLAASGGQKLLSSVRNSYAMGKVRMVATEFETGGRVVRNRMAARATESGRFVLWQMAPEMWYIELAVGGSKVHAGCNGKLVWRHTPWLGAHSAKGPVRPLRRALQGLDPLTAASMFAGARCIGERKVNGEDCFILKLCADPETLRARSEGLAEIIRHVLFGYFSQKTGLLVHLEDSHLTRIQSTTGGDAVYWETTINSFIEDYRPVEGIMVAHAGRSAVTLFRFGEVAMSHTKTRMEEAWSIEEVAFNVPGLSIDCFIPPTDIKSGSISETVELPHGEKSKVGLLQCHSAKVAALEKADDNVAWSGALQRDFK

SEQ ID NO: 108117 - protein, 80 aa, Oryza sativa
  unsure (1)..(80): unsure at all Xaa locations
  Clone ID: PAT_MRT4530_12401C.1.pep
FISYRAPTKXAALQEAYSTPILALDFLADRPPXKKFEWPNRLVSNYWSLVSCVGLFGVFIYLIASPLNSIVSKACKLRLS

SEQ ID NO: 108118 - protein, 132 aa, Oryza sativa
  unsure (1)..(132): unsure at all Xaa locations
  Clone ID: PAT_MRT4530_12402C.1.pep
PGHLGLADGGFRSPHALALASALYPPTVASALVDNSWVGHICGPLTVPVISQFHTFFVGHHFFPCVDLLWXAKGPVKCKIFLWLAFQQCCWMTDLLHKRGIDNHLACPFCTQELETASYILLDCLFVCQVWH

SEQ ID NO: 108119 - protein, 91 aa, Oryza sativa
  Clone ID: PAT_MRT4530_12403C.1.pep
MTGAVATRASTATGGSTTASPEKGRSSDGGVVGSALSEGPIGLAGQTDVEWPVRPATARSDRCQLGLTEYGFVGSVSATSSSTIPATRGPV

SEQ ID NO: 108120 - protein, 296 aa, Oryza sativa
  unsure (1)..(296): unsure at all Xaa locations
  Clone ID: PAT_MRT4530_12404C.1.pep
SGTDSVQGERCLVSWTNVSRPKVVGSLGISDLRTAVFALRMRWLWLLRSIHPYXADLKSPLERTVFDMFVASTFLMLSDGESTLLWLDQWIQGRSVISLALDLILATPSPLGXHTVASALVDNSWVGHICGPLTVPVISQFLLVWDAVQLVHLTPSTEDCLVWRWTSNXRYSPASPYHTFFVGHHFFPCVDLLWXAKGPVKCKIFLWLAFQQCCWMTDLLHKRGIDNHLACPFCTQELETASYILLDCLFVCQVWHCILSPSPVAILFRSGGRQLKFACMPAHLRKGFDSLVLLMS

SEQ ID NO: 108121 - protein, 80 aa, Oryza sativa
  Clone ID: PAT_MRT4530_12405C.1.pep
RVRDIRLVHKEPRHSSDRAYVLCFVEFSDAKCAITAMEALQEYRFDERKPDAAVLNIKFARFPFRPAAAPHDDRRRLTLH

SEQ ID NO: 108122 - protein, 68 aa, Oryza sativa
  unsure (1)..(68): unsure at all Xaa locations
  Clone ID: PAT_MRT4530_12406C.1.pep
PLARKNPKFRPKPVDVIANSSRQFREQAPNLXNNMGKKPGALPPKNQQQTHLGFSNESENKAPKLCSK

SEQ ID NO: 108123 - protein, 369 aa, Oryza sativa
  Clone ID: PAT_MRT4530_12407C.1.pep
MRKRQREGVRYSPMLLRDVERDARLNRLFNGTEANCVSELRMRKAIFHKLCGHFRSRGLLVDTLHVTVEEQIAMFMHIVGHKWCNRSVGFEFFRSGETVSRYFNAVLDSLVSISKELIYIRSTETHPKITSSPGRFHPYFEGCIGALDGTHVPASVPAHMQDRFRGRKKSPTQNVLAAVDFDLRFIYVLAGWEGSAHDSHVLQDALSRPSGLKIPEGKFFLADAGYAARPGILPPYRGVRYHLKEYKGGREPQDYKELYNHRHSSCRTTVERAFGTLKNRFNILKSQPNFPLKTQVKTVIACCTLHNWILDNGDDEYVYDHETWYRVLPRSNRVYQDIREENEAWVLKRDQMAQAMWQDKAGQSTSAAN

SEQ ID NO: 108124 - protein, 250 aa, Oryza sativa
  Clone ID: PAT_MRT4530_12408C.1.pep
MLKLTIRKRLPGAASSLMLLPLHKVQARLADQGEKHNLKCHVEERPMAFEVVTSINFKLCHANTLTLRGEKVIFLHANGKAMGSCASNRSTSRENKGNHRVSRRYGVDGITVFGRAHEVKLTAKVDGRVYRCIKVREGMFLTLATEYNMPALIGCPGDEPRMLTPYVDDDEDEDDATESPTLARGITVCFARTCRWRHGGVLKSEVPPKAEDANLAGVDPSASVEAEPNGVGCSIDPDELKGLGDGAGLV

SEQ ID NO: 108125 - protein, 50 aa, Oryza sativa
  Clone ID: PAT_MRT4530_12409C.1.pep
MTITTYRPSQFLGSKQQRKINLEWREYYSSLVQKLHSLSRVLVLEHSVAH

SEQ ID NO: 108126 - protein, 214 aa, Oryza sativa
  unsure (1)..(214): unsure at all Xaa locations
  Clone ID: PAT_MRT4530_1240C.1.pep
MAMEPVGPAAQWLLPLRRAPAVSPPSGSYRPRRPAAPTAPPGSRGLAAQWLLPPPPPRRSHRRLIAPAVPAEFPPSRRSRHLSLGMWNGPTRPMALEGLTALELTGAGRTGLISEVFAVLADMDCGVVEGRAWMHRVHLGCLIFLRNKETDTERMARIXGRLGHLLLGDSISAGGGAVAAVPAPAVTHAERRLHVGQNHLRNHRGRCKSLGHCS

SEQ ID NO: 108127 - protein, 48 aa, Oryza sativa
  Clone ID: PAT_MRT4530_12410C.1.pep
FQRIWPLLTIATNSSGSLCYRCFLLFDLLVYILVNSDELMNQGIQVRS

SEQ ID NO: 108128 - protein, 280 aa, Oryza sativa
  unsure (1)..(280): unsure at all Xaa locations
  Clone ID: PAT_MRT4530_12411C.1.pep
KHSPASTGKPPNPPXRTKDPKPPGTNQSSYEVGAKNIVPVTIYKLSPEHKLELEQIVNSAQEKFMNSFKETRQGTVIQKYKLKVVAADEPGTSSSQDGGTMGAKGGADGSGDKGIEPRDGEVEDVGEEDAEGQQEPTRCNNFQDQVDYAVQHALINQSGVLVNILTNMIKFVVDGMIAKHQNTGPVFLPGGVFPPYRNLVTGNQHHTTNTPPVQPTAVVQPTAVVSVPAPVAPSSAQRQVVNPRVLTREQPQHVGQNLNRATQEQIAAMFAPTQPYCFQE

SEQ ID NO: 108129 - protein, 77 aa, Oryza sativa
  Clone ID: PAT_MRT4530_12412C.1.pep
MAVAHSEAGSSEASGIHCHPSSSLSPDRPREVMRTPGFGEVGPQTPPTPLFFGTDELSTGTWSSQSACLQVDSRGSP

SEQ ID NO: 108130 - protein, 113 aa, Oryza sativa
  Clone ID: PAT_MRT4530_12413C.1.pep
MAVAHSEAGSSEASGIHCHPSSSLSPDRPREGLPNFTVNTTAALFPRIDLRRQCRLRRGRASDATNAPLLRHRRAEHWHMVLAECMLPPWFQVTELKVVKRRRPKEELVRRRR

SEQ ID NO: 108131 - protein, 192 aa, Oryza sativa
  unsure (1)..(192): unsure at all Xaa locations
  Clone ID: PAT_MRT4530_12414C.1.pep
IDQLQLVWDVVQLVQALSAHYDNLVWHWIGDQSYSASSAYHSFFMGQHSSPCADMLWQANGPVNCKLFLWLVFQQRCXTADLLHKHGIDNHSTCPFCAQEHETVSHILLDVFSRQVWRITSYLPPASLGSLPPIAILFRSXWTTARARLPLHLCKGSDSLVLLVSCQLWKEXNAKVFNYSLSPFLMVIGSIL

SEQ ID NO: 108132 - protein, 292 aa, Oryza sativa
  unsure (1)..(292): unsure at all Xaa locations
  Clone ID: PAT_MRT4530_12415C.1.pep
PNICKVDTGIKFSSVDEAWKFWVSYGGKIGFDVRKQHNNKSVVDGLFTSSRFVCSSAGHRGKDKRDYLTKNPRAQTRTDYNVHMGIKLNKVEGNYEVYDLVTERYHILXLPKTCHLXMPSPQKISHVQGFQIDMVDDYGIRPKAGYELASKEAGGSSNLWIYGETGSMLKYFQYKCVENPSFHYVVHLDXEDXLTYFFDVITFDTTFGTNRDHRSLSVFVGFNHYGERVYIXGALLYDETFDSFKXLFETFLAAHNQKHPKAIXTDQGTAMKKAIVIVFHGTWHGLCTFHIM

SEQ ID NO: 108133 - protein, 394 aa, Oryza sativa
  Clone ID: PAT_MRT4530_12416C.1.pep
GADVSDDMAATRDRHGEHENGGRRPWVDDGDGFPATSGGNGGVDGVLLAAAVPREATSRAQATEAASDGSGSGASGEGGKPKRRAWEQIGLGTQGIVLGNTRVHRFGIRKGRPDLEEKSEPDQDEQELCRCPRHPLLFPLFSPFLISLSISLLCNCKLAEARREGGAATAAGGGGVQARRLLCFLRLLVPLGRRGLSICGSNAVVVSALPADDDDEDIDAAAPREEEEGLGAARTTGALSCGSGSGSGSYTLFKQGRDELVDSLSEFANETLPSKRPAVKRRTGAPPRSITCRSREICNVIQVTSMGRSEVSPKLGFRSGSLMRIEPLKAKVRLKVIMLLLHYVVDVGELSISRLLPFLRLSYVFREVVLDLPRLHIKGVHSPSDFTQVPTRGT

SEQ ID NO: 108134 - protein, 70 aa, Oryza sativa
  Clone ID: PAT_MRT4530_12417C.1.pep
KKVWPQQPVEAQKKDQKLRFKISFPRVFGIPEEDQSLSFFEVKTPMLEAEHFVKPVVCKPWKRWRVLHLI

SEQ ID NO: 108135 - protein, 366 aa, Oryza sativa
  unsure (1)..(366): unsure at all Xaa locations
  Clone ID: PAT_MRT4530_12418C.1.pep
STRTTKQYLIELKDPKQGILQVDDGASVATWKFDPELLKTAFCIMVIEDELPFMAVEKSGFRKFMAVACPQFNLPSRRTXTREVVKIYYEQKAKLKIFLKHNCQRVSLTTDCWTSQQQESYMIVTAHFIDNDWNLHKKIIAVFKVKSHKGEEIGKHLQKVLLDWELDKVMTVTVDNASANDVAVSYLRKQMNNLNTSIAQGKYLHMRCAAHIVNLIVSDGLKVVDISIKRVRAAVKFIKNGTARLVKFKECXLEKVDSKAFLNLDVCTTWNSTYDMLKAACTYEKVFIRYAEEDLAFQIELLGDKGPGVPGEGDWRXARKTADFLGHFADITLHVSASLNATAHNFFHEIADINIFLLGRKKRDRA

SEQ ID NO: 108136 - protein, 271 aa, Oryza sativa
  Clone ID: PAT_MRT4530_12419C.1.pep
MAMLLRRPLHTLPILPLLGRHLSSSSAAAEAVTADHHHHHDADLLSPPFDYLPGHPRPDAKHDELILAVPRASSGRHVAAKERKAGRVPAIVFEQENGQEGGNKRLVSVQSKQIRKLVDHLGRSFFLSRLFRLQVWSEHAGQGELIESVRVLPRKVHLHAGTDEPLNVTFMRAPSSALLKIDVPLMFIGEDASPGLRKGAYFNTIKRTVKYLCPADIVPPYIEVDLSELDVGQKLLMRDLKVHPALRLLQSPEQPICSIIGSRAPDQKKSK

SEQ ID NO: 108137 - protein, 42 aa, Oryza sativa
  unsure (1)..(42): unsure at all Xaa locations
  Clone ID: PAT_MRT4530_1241C.1.pep
GXVKADAFLFINAMFNQHYKLILFLCCKSPTPPFWGNRARGT

SEQ ID NO: 108138 - protein, 94 aa, Oryza sativa
  Clone ID: PAT_MRT4530_12420C.1.pep
MSTHGGEGAEEEIRSLSLDVLADDAGGRGRAAPEGGRHGRLATVGFGGLHEKSREAQLPKCLVNPLIVQDTGGWRFFFVDHHISSLMLKKEHIP

SEQ ID NO: 108139 - protein, 708 aa, Oryza sativa
  Clone ID: PAT_MRT4530_12421C.1.pep
MEDAWRKAKRALGLGLCVHVPEAEEGEREDCSSERRRRLPAAASGARCRGEAAVTVGPESVPAPSDVPVPLPLPGVVRRSKSGSSRSSSKRKCAICFDSMRHGNGQALFTAECSHMFHFHCISSNVKHGNYFCPICRAKWKEIPFNRSLSSNIPHGRIGVSRARLTQQDANMALLHQVPNHHQRVRRPHTSEPADFNDDEPLQQPEVFDNLNVRSTKTAEINTYPEFSTIPQSSSKDDFAILIHLKAPSANPDQGTGKLANESSAGSSRNRAPVDLVTVLDVSGSMAGTKLALLKRAMGFVVQHLGPSDRLSVIAFSSSARRLFHLQRISHHGRQQALQAINSLGASGGTNIADALKKAMKVIEDRSYKNSVCSIILLSDGQDTYNISSSVQGASPDYKSLVPSSIINDARHTVPLHAFGFGADHDSDSLHSIAQASGGTFSFIEDEGVMQDAFAQCIGGLLSIVIQEMRVSMECVHPGVQLSSIKSGSYPSKVARDGRNGSVDIGHLYADEERDILLSVNIPQSRHQTSALKVSCAYRDPVTGETIKIQGDEVKINRPTTSNISEHVSIEVDRERNRIQAAESIECARAAAEKGALSEAVAILEDCRRTLSQSFASRSGDRLSLSLDAELREMQERMANRQLYESSGRAYMLSGLSSHSWQRATARGDSTDSSTVIYSYQTPSMVEMLQHSQNHLPSPQGRQRPRPR

SEQ ID NO: 108140 - protein, 61 aa, Oryza sativa
  Clone ID: PAT_MRT4530_12422C.1.pep
EFREKRRHPFATKPDRVLILGTDVLLLQITTISLSNFSHSCIDMPVKLFADKAAGRRHQAS

SEQ ID NO: 108141 - protein, 132 aa, Oryza sativa
  Clone ID: PAT_MRT4530_12423C.1.pep
MALMKPLLLIFCSNDYPRRSLEPEAQEESRAVAAEAHCSGRRLGRCRVQGRASPQRRQEPHRRALFDDSSDETMLKEMADMHARPARGHGDVFDERPELSPAGREVLDRWDAGLQPRREDDGSGGAGPQVVH

SEQ ID NO: 108142 - protein, 570 aa, Oryza sativa
  unsure (1)..(570): unsure at all Xaa locations
  Clone ID: PAT_MRT4530_12424C.1.pep
MTVRQLVFFAKPTFEELMSRIKHELDWNDESVGMQGRYDVGGGVMSHKFMLDLNGEIEWQTYIDIVLGSHFKSLEVFAWKKDGRIGKKELVDLNESSLIESPISCHELSERCSRKEELIEEDVEGGEGVNDMADVEVREENDPVREEVHAEENVPLREEVHAEDNVPLREEVNVEENVPVREEGDVEDGREVXDDVELPEEEANAKNVSMGLRELARLKFYTREECEEAMIRSGLNPGWLEYDTEDELDESASDSDDDRPVRKMSEHERTVFAKLVGRNPEITQFEDLTRSGLAIADGDPQYDGAFEPMCDEPRKGLEFRLMDDLKIWLQSYSIRVHRPYHVKESNASVKLHAFVRAEPTLSPAAIVEAVEQIWHYRPTYGKAWRAKQVAMKVIWGDWDEAYVRLPTLMRAIKAKNPTMHFRVEAHPEKSRMVDGVQRRVFGHAYWIFGQSIEAFKHLRPVLAIDGTFLTGEGGTLRNALQRLRQRCRKLAARLGCRSTDVVEHAHAHQEGDEEGEVGDEEGEQDKEAEEGDEEEEGDEDREKEADELGPSQLEDAPESSQPDISQPGPS

SEQ ID NO: 108143 - protein, 95 aa, Oryza sativa
  Clone ID: PAT_MRT4530_12425C.1.pep
MGIFTHDFISHSLRSSSRAFTRHIGAPQVLTYTLRLLSQPSQARSIIKQHRQGEDTDYDDPTTIELTVLRAATSNFSAENKLGEGGFGEVFKELE

SEQ ID NO: 108144 - protein, 397 aa, Oryza sativa
  Clone ID: PAT_MRT4530_12426C.1.pep
MSNPESNPPPPSATSCPPPGSAAHAGHAPLCRSCGAPTTTPVPPPWSASSDSPPPAYRPIRMPAINAPTNTAAIVLSPVPQPLPVPPASPPFAFQVPAKRITSPDDIARFHASVHGRHFLGFVAALSASVHGRKLSDPLPSPPSPVVSALLELISALSAFVASTPPLPHNSRYGNPAFRLWHEKLSDSANQLIAPIMATAGSPDLAGAEAELAPYLLDSFGNATRIDYGTGHETNFAAFLYCLARLGLITEADYPAVVLRVFAAYLDLMRTLQDTYLLEPAGSHGVWGLDDYHFLPFIFGAAQLIDHKYMKPKSIHNPDILDNFSKEYMYLACVAYVKKVKKGPFAEHSPMLDDISGVPHWKKVNSGLLKMYKAEVLEKVPIMQHFLFGSLIKWYGS

SEQ ID NO: 108145 - protein, 1524 aa, Oryza sativa
  unsure (1)..(1524): unsure at all Xaa locations
  Clone ID: PAT_MRT4530_12427C.1.pep
MTVRQLVFFVKPTFEELMSRIKHELDWSDELAGMQGRYDVGGGVISHKFMLDLNGEIKWQTYIDIVLGSHFKSLELFAWKKDGRIGKKELIDLNESPLIELPISSHEHSNACNRKEELFEEDVEVSEGVHGGEDVEVREELHGEENVPVREEVRAEDNVPLREEVNVEENVPVREEGDVEDGREVGDDVELPEEEANAKNVSMGLRELARLKFYTREECEEAMIRSGLNPGWLEYDTEDELDESASDSDDDRPVRKMSEHERTVFAKLVGRNPEITQFEDLTRSGLAIADGDPQYDGAFEPMCDEPRKGLEFRSMDDLKIWLQSYSIRVHRPYHVKESNASVKYTVACLDRHCKWQINARKSGGDRWRVTRVGEDHTCCSAEVTGKHLQLTSRFIGNRLQAFVRAEPTLSPAAIVEAVEQIWHYWPTYGKAWRAKQVAMKVIWGDWDEAYVRLPTLLRAIKAKNPTMHFSVEAHPEKSRMVEGVQRRVFGRAYWIFGQSIEAFKHLRLVLAIDGTFLTGKYXGTLLTTIGVDAGLHLVPSAFALVEKENTSNWEWFINMLRNXLIGPNREVCIISYRHPGILNSINLRMPQHLTIHHRWCMRHLCANFCTAGATTDQMKDLECICXINEKALFLGEIKCLLGVVGERPKKWLEDHMAHKVKWARAFDTNGRQHSIMTSNMAESFNNVLRGIRKLPVTAIVAYTFSKCNSWFVDRHKEATVDILSGKKWPTKVKDILEEQQRRTLEQKTACFXFPSMKYEVSEQGGVMVVGVQWGGRHYVVVARDNTCTCQFPQLHHLPCSHMITVCRLRGLDVEVAPRMCYDASNRAVQNTYSSRFEPYLDPLQWPSYDGEFFVSDLLLKNNTRGRRRTRRFKNDMDKAYKGSGNRRMEHVLGLEDFYEEKHRAPXIASGERLKTLRVRGHTAHILFDDRYVPYLRRAKLLAFVTMAQXPVPMYNTAALTALVNRWRPETHTFHLPCGELTVTLEDVVMILGLPIRGQAVTGDTASGNWRQRVEEYLGVEPAVAPDGQRQTKTSEVPLSXLRANFGQCPAKADEAMVQXYCRVYVLYIFGSILFPDSSGDMASWMWLSVLADWDEAVLGRRNLAYYHYTNEMDYLQPEHVVWRPYEAQKVLELDINPMCHIEDALKTLRCPLICFYAVEFXMCNRVMRQFGRLQTIPHRFSTSIDLHKVDRRKNKKVTDWAYYHQDHITQWEKFEENGVLHQCQHNRMEFDAYLAWLHRTYRLVLRLAWTLADITDDPEDVEEQNKYDTHTRQGTMVETEPVRDRVARELLRTVNDVGVALGTAPGSEGESGTLRNALQRLWQRCRKLAARLGCRATDVIEHAHAHQEGNEEGEVGDEEGEKDKEAEEEGDEEEEDEGDEEEEADELGSSQLEDAPESSQPDFLQPGMSRPRRRRAPSQDWRQTPLTPTPLSFPSRPSPLRHAAVAAPHALPGARASPRSAPNDVALRLGTSAPKWLALRYLPRRRGDRLGRHGSTRSAPGPLALTRPTSAPKALVLNRRPIFD

SEQ ID NO: 108146 - protein, 1274 aa, Oryza sativa
  unsure (1)..(1274): unsure at all Xaa locations
  Clone ID: PAT_MRT4530_12428C.1.pep
MTVRQLVFFAKPTFEELMSRIKHELDWNDESVGMQGRYDVGGGVMSHKFMLDLNGEIEWQTYIDIVLGSHFKSLEVFAWKKDGRIGKKELIDLNESPLIESPISCHELSERCSRKEELIEEDVEGGEGVNDMADVEVREENDPVREEVHAEENVPLREEVHAEDNVPLREEVNVEENVPVREEGDVEDGREVGDDVELPEEEANAKNVSMGLRELARLKFYTREECEEAMIRSGLNPGWLEYDTEDELDESASDSDDDRPVRKMSEHERTVFAKLVGRNPEITQFEDLTRSGLAIADGDPQYDGAFEPMCDEPRKGLEFRSMDDLKIWLQSYSIRVHRPYHVKESNASVKYTVACLDRHCKWQINARKSGGDRWRVTRVGEDHTCCSAEVTGKHLQLTSRFIGNRLQAFVRAEPTLSPAAIVEAVEQIWHYWPTYGKAWRAKQVAMKVIWGDWDEAYVRLPTLMRAIKAKNPTMHFRVEAHPEKSRMVDGVQRRVFGRAYWIFGQSIEAFKHLRPVLAIDGTFLTGKYQGTLLTAIGVDAGLHLVPLAFALVEKENTSNWEWFINMLRNKLIGPNREVCIISDRHPGILNSIIHIMPHHLTIHHRWCMRHFCANFYTAGATTDQMKDLERICQIDEKALFLDEIKRLMGVVGERPKKWLEDHMPLKVKWARAFDTNGRRHSIMTSNMAESFNNVLRGIRKLPVTAIVAYTFSKCNSWMEHFPGLEDFYEEKHRAPQIASGERLKTLRVRGHTAHILFDDRVGNWRERVEEYLGLEPPVAPDGQRQTKTSGVPLSWLRANFGQCPAEADEATVQRYCRAYVLYIFGSILFPDSGGDMASWMWLPLLADWDEAVVGRRNLAYYHYTNEMDYLQPEHVVWMPYQAQEVLELELNPMCHIEDALKTLRCPLICFYAVEFQMCHRVMRQFGRLQTIPHRFSTSIDLHKVDRRKNKKVTDWAYYHQDHITQWEKFEENGVPDQADIADDPEDVEEQNEYDTRTRLGTTVETGPVRDRVARELLRTVNDAGVVLGTAPGSEGEGGTLRNALQRLRQRCRKLAARLGCRSTDVVEHAHAHQEGDEEGEVGDEEGEQDKEAEEGDEEEEGDEDREEEADELGPSQLEDAPESSQPDISQPGPSRPRRRRAPSQDWRYTPDVPRPRTRAPVHLALXGPSPAIQKACXAGPRPKRPSPTSTPGGLALSFPHVPRSAPLWLALRSQPASHPAGLLVWALWAGAECPTVSAIMAGAEVQARKPSRSLAGLGLGGCGQVPPQRQSGWR

SEQ ID NO: 108147 - protein, 71 aa, Oryza sativa
  Clone ID: PAT_MRT4530_12429C.1.pep
TTIGLFKSFCKCSQSETFNSESIYTLNILHTSINTRNQVCRERSSDCFADELNIKKESGVGRNDSGGGLPP

SEQ ID NO: 108148 - protein, 112 aa, Oryza sativa
  Clone ID: PAT_MRT4530_1242C.1.pep
MPPHDDSIFLLGAAHQPPRPPVVSNALTKLEMVMAPRRRKKQRHCPPPQPGGLPSSRRRTAQRPTARRRDASHPSLPFLAFREREREGAREIWKGKEVGEHIEELTGGAHFF

SEQ ID NO: 108149 - protein, 1249 aa, Oryza sativa
  unsure (1)..(1249): unsure at all Xaa locations
  Clone ID: PAT_MRT4530_12430C.1.pep
MGAESAAHARTWPTWPGEGGGVGAATVAGAAARRDRREVGDGSDRKTSGCDTDPLADVAATSAPTASALRCPTSEPNESTHGSQFEGMTVRQLVFFAKPTFEELMSRIKHELDWNDESVGMQGRYDVGGGVMSHKFMLDLNGEIEWQTYIDIVLGSHFKSLEVFAWKKDGRIGKKELIDLNESPLIESSISCHELSERCSRKEELIEEDVEGGEGVNDMADVEVREENDPVKEEVHAEENVPLREEVHAEDNVPLREEVNVEENVPVREEGDVKDGREVGDDVELPEEEANAKNVSMGLRELARLKFYTREECEEAMIRSGLNPGWLEYDTEDELDESASDSDDDRPVRKMSEHERTVFAKLDLTRSGLAIADGDPQYDGAFEPMCDEPRKGLEFRSMDDLKIWLQSYSIRVHRPYHVKESNASVKYTVACLDRHCKWQINARKSGGDRWRVTRVGEDHTCCSAEVTGKHLQLTSRFIGNRLQAFVRAEPTLSPAAIVEAVEQIWHYRPTYGKAWRAKQVAMKVIWGDWDEAYVRLPTLMRAIKAKNPTMHFRVEAHPEKSRMVDGVQRRVFGRAYWIFGQSIEAFKHLRPVLAIDGTFLTGKYQGTLLTAIGVDAGLHLVPLAFALVEKENTSNWEWFINMLRNKLIGPNREVCIISDRHPGILNSIIHIMPHHLTIHHRWCMRHFCANFYTAGATTDQMKDLERICQINEKALFLDEIKRLMGVVGERPKKWLEDHMPLKVKWARAFDTNGRRHSIMTSNMAESFNNVLRGIRKLPVTAIVAYTFSKCNSWFVDRHKEATVDILCGKKWPTKVKDMLEEQQRRTLGQRAACFDFPSMKYEVSEQGGVTAAGVQWGGRHYVVVARDNTCSCQFPQLHHLPCSHMITVCKLRGLDVEVAPRMCYEASNKAVQDSYSPRFEPYLDPSQWPXNTRGRRRTRRLKNDMDKAYKGSANRRSXHDTRTRLGTTVETGPVRDRVARELLRTVNDAGMALGTAPGSEGEGGTLRNALQRLRQRCRKLAARLGCRSTDVVEHAHAHQEGDEEGEVGDEEGEQDKEAEEGDEEEEGDEDREEEAVELGPSQLEDAPESSQPDISQPGPSRPRRRRAPSQDWRYTPDMPHPRTRAPVHLAXGPSPAIQKACWAGPRPKRPSPTSAPGGLALSVPRSAPLWLALRSQPASHPEGLLVWXLGVAAKSHLSASPVGAEAAATSAGDRPGRHGGTMSEPVPLALTRPTSAPMCLALRRRPIFG

SEQ ID NO: 108150 - protein, 247 aa, Oryza sativa
  unsure (1)..(247): unsure at all Xaa locations
  Clone ID: PAT_MRT4530_12431C.1.pep
GPQGPQNHGPRVASRLHGSASATRPGPDFSFSSSPAVVEGRRAAAPATGHRKGSGVVVLGSEVGCGDVVQDLAARGAASAREQSCREFGKQYNQLLSRSTQPTFCPNEEHLILXATTSSDRDDGSQSKEKISVTFVNKDGTEQTISVPVGMSILEAAHENDIELEGACEGSLACSTCHVIVMDVNYYNKLEDPTDEENDMLDLAFGLTETSRLGCQVIAKPELDGMRLALPAATRNFAVDGFVPKPH

SEQ ID NO: 108151 - protein, 312 aa, Oryza sativa
  Clone ID: PAT_MRT4530_12432C.1.pep
MSAATPDSAAAAKRPIDPSHADPSPAAKLQRSSPPDPSPPAEAQGDATDGGGEVAGVRSGEMAGARNPQAQRYLVAVEYVGTRFSGSQQQLNQRTVVGVLEKPGEMKNEGDIMVTDVRCVAPDFHARYKALERTYHYRLLSGSEPLSVFEKTSAWHIPEDLNVQAMKANSPMRTLDELSVTEVFPSMFFPSSMERSEMESLDGHLVYSRTSVVESSGKGSDASSTSEQSRFENGEEFGKRLRHRCFVVTARARSFLYHQVRLMVGLLKSVGTGDLTTEDVERILNLKAVTAAPPMAPACGLYLANVKYDLSV

SEQ ID NO: 108152 - protein, 704 aa, Oryza sativa
  unsure (1)..(704): unsure at all Xaa locations
  Clone ID: PAT_MRT4530_12433C.1.pep
MIQRMNWMSPLPTPMMIVAHRMEHFPGLEDFYEEKHRAPQIASGERLKTLRVRGHTAHILFDDRXPVPLYNAAALTALVDRWRPETHTFHLPCGELTVTLEDVAMILGLPIRGQAVTGDTASGNWRERVEEYLGLEPPVAPDGQRQTKTSGVPLSWLRANFGQCPAEADEATVQRYCRAYVLYIFGSILFPDSGGDMASWMWLLLLADWDEAGTFSWGSAALAWLYRQLCDACRRQGGDANLAGCVWLLQVWMWMRLPVGRPMWRTHQAWPHQDADRRPTVAHLWESVPSPVVGRRNLAYYHYTNEMDYLQPEHVVWMPYQAQEVLKLELNPMCHIEDALKTLRCPLICFYAVEFQMCHRVMRQFGRLQTIPHRFSTSIDLHKVDRRKNKKVTDWAYYHQDHITQWEKFEENGVPDQGQHNGTEFDLYLAWLHRTYRLVLRPAWTLADIADDPEDVEEQNKYDTRTRLGTTVETGPVRDRVARELLRTVNDAGVALGTAPGSEGEGGTLRNALQRLRQRCRKLAARLGCRSTDVVEHAHAHQEGDEEGEVGDEEGEQDKEAEEGDEEEEGDEDREEEADELGPSQLEDAPESSQPDISQPGPSRPRRRRAPSQDWRYTPDVPRPRTRGRXERSQPSHPEGLLGWATAETAKSNLSARWAGAECRTVSAIMAGAEVQARKPSRSLACLGLGGCGQVPPQRQSGWR

SEQ ID NO: 108153 - protein, 169 aa, Oryza sativa
  unsure (1)..(169): unsure at all Xaa locations
  Clone ID: PAT_MRT4530_12434C.1.pep
LFHGSDCGSHRRGFLKLRLGQNDTGVHALSNVCHVDVERISQRKPGEMLPPHEPGVVKRAVNHFLQKNEGDIMVTDVRCVAPDFHARYKALXRTYHYRLLSGSEPLSVXEKTSAWHIPEDLNVQAMKKACSILVGHHDFSSFRATGCQANSPMRTLDELSVTEVFPSMF

SEQ ID NO: 108154 - protein, 884 aa, Oryza sativa
  Clone ID: PAT_MRT4530_12435C.1.pep
MGLALTLCHRGGRADPLADVAATSAPTASALRCPTSAPNESTHGSQFEGMTVRQLVFFAKPTFEELMSRIKHELDWNDESVGMQGRYDVGGGVMSHKFMLDLNGEIEWQTYIDIVLGSHFKSLEVFAWKKDGRIGKKELIALNESPLIESPISCHELSERCSRKEELIEEDVEGGEGVNDMADVEVREENDPVREEVHAEENVPLREEVHAEDNVPLREEVNVEENVPVREEGDVEDGREVGDDVELPEEEANAKNVSMGLRELARLKFYTREECEEAMIRSGLNPGWLEYDTEDELDESASDSDDDRPVRKMSEHERTVFAKLMGRNPEITQFEDLTRSGLAIADGDPQYDGAFEPMCDEPRKGLEFRSMDDLKIWLQSYSIRVHRPYHVKESNASVKYTVACLDRHCKWQINARKSGGDRWRVTRVGEDHTCCSAEVTGKHLQLTSRFIGNRLQAFVRAEPTLSPAAIVEAVEQIWHYRPTYGKAWRAKQVAMKVIWGDWDEAYVRLPTLMRAIKAKNPTMHFRVEAHPEKSRMVDRVQRRVFGRAYWIFGQSIEAFKHLRPVLAIDGTFLTGKYQGTLLTAIGVDAGLHLVPLAFALVEKENTSNWEWFINMLRNKLIGPNREVCIISDRHPGILNSIIHIMPHHLTIHHRWCMRHFCANFYTAGATTDQMKDLERICQINEKALFLDEINASWRLRQRCRKLAARLGYRSTDVVEHAHAHQEGDEEGEVGDEEGEQDKEAEEGDEEEEGDEDREEEADELGPSQLEDAPESSQPDISQPGPSRPRRRRAPSRDWRYTPDVPRPRTRGGLALTFPQSAPLWMALRPLPESHPEGLKLPRPTSEPGGLDRDVPLATHIMAGTEVPIQMPNLRLTSLGPAGWH

SEQ ID NO: 108155 - protein, 1177 aa, Oryza sativa
  unsure (1)..(1177): unsure at all Xaa locations
  Clone ID: PAT_MRT4530_12436C.1.pep
MGAESAAHARTWPTWPGEGGGVGAATVAGAAARRDRREMDRLVRLHYGGCVVDESTHGSQFEGMTVRQLVFFAKPTFEELMSRIKHELDWNDESVGMQGRYDVGGGVMSHKFMLDLNGEIEWQTYIDIVLGSHFKSLEVFAWKKDGRIGKKELIDLNESPLIESSISCHELSERCSRKEELIEEDVEGGEGVNDMADVEVREENDPVKEEVHAEENVPLREEVHAEDNVPLREEVNVEENVPVREEGDVKDGREVGDDVELPEEEANAKNVSMGLRELARLKFYTREECEEAMIRSGLNPGWLEYDTEDELDESASDSDDDRPVRKMSEHERTVFAKLDLTRSGLAIADGDPQYDGAFEPMCDEPRKGLEFRSMDDLKIWLQSYSIRVHRPYHVKESNASVKYTVACLDRHCKWQINARKSGGNRWRVTRVGEDHTCCSAEVTGKHLQLTSRFIGNRLQAFVRAEPTLSPAAIVEAVEQIWHYRPTYGKAWRAKQVAMKVXWGDWDEAXKNPTMHFRVEAHPEKSRMVDGVQRRVFGRAYWIFGQSIEAFKHLRPVLAIDGTFLTGKYQGTLLTAIGVDAGLHLVPLAFALVEKENTSNWEWFINMLRNKLIGPNREVCIISDRHPGILNSIIHIMPHHLTIHHRWCMRHFCANFYTAGATTDQMKDLERICQINEKALFLDEIKRLMGVVGERPKKWLEDHMPLKVKWARAFDTNGRRHSIMTSNMAESFNNVLRGIRKLPVTAIVAYTFSKCNSWFVDRHKEATVDILCGKKWPTKVKDMLEEQQRRTLGQRAACFDFPSMKYEVSEQGGVTAAGVQWGGRHYVVVARDNTCSCQFPQLHHLPCSHMITVCKLRXNNTRGRRRTRRLKNDMDKAYKGSANRRSXHDTRTRLGTTVETGPVRDRVARELLRTVNDAGMALGTAPGSEGEGGTLRNALQRLRQRCRKLAARLGCRSTDVVEHAHAHQEGDEEGEVGDEEGEQDKEAEEGDEEEEGDEDREEEAVELGPSQLEDAPESSQPDISQPGPSRPRRRRAPSQDWRYTPDMPHPRTRAPVHLAXGPSPAIQKACWAGPRPKRPSPTSAPGGLALSVPRSAPLWLALRSQPASHPEGLLVWXLGVAAKSHLSASPVGAEAAATSAGDRPGRHGGTMSEPVPLALTRPTSAPMCLALRRRPIFG

SEQ ID NO: 108156 - protein, 778 aa, Oryza sativa
  Clone ID: PAT_MRT4530_12437C.1.pep
MVFGLNCPAKQIVYVEKKRRWGPCIHQLRASSFGSESLVRKTAFLIAFAHEKAGHREKGEKLTKKDIRSIGIGMDLGAASAVAVSSSGGRRATGEIGQRQVESAGELGLTDKQLQMWFCHRRLKDRKPPPKRQQLEEEVHVPVMAPPPVLPPPLPHSELTMAPGGMYGEQLLPSSSRRGTGRPSAILDMSDLQCLPLLTSHATLKLIDCIPHQGKAWQIVQLDALDERMEHFPGLEDFYEEKHRAPQIASGERLKTLRVRGHTAHILFDDRYVPYLRRAKLLAFVTMAQRPVPLYNAAALTALVDRWRPETHTFHLPCGELTVTLEDVAMILGLPIRGQAVTGDTASGNWRERVEEYLGLEPPVAPDGQRQTKTSGVPLSWLRANFGQCPAEADEATVQRYCRAYVLYIFGSILFPDSGGDMASWMWLPLLADWDEAGTFSWGSAALAWLYRQLCDACRRQGGDANLAGCVWLLQVWMWMRLPVGRPMWRTHQAWPHQDADRRPTVAHLWESVPSPVVGRRNLAYYHYTNEMDYLQPEHVVWMPYQAQEVLELELNPMCHIEDALKTLRCPLICFYAVEFQMCHRRLRQRCRKLAARLGCRSTDVVEHAHAHQEGDEEGEVGDEEGEQDKEAEEGDEEEEGDEDREEEADELGPSQLEDAPESSQPDISQPGPSRPRSRRAPSQDWRYTPDVPRPRTRAPVHLALRSQPSHPEGLLGWATAETAKSHLSARLAGAEFPNVSAILAGAEVPARKPSRRLAGQGHGRNGQVPPQRQVGWR

SEQ ID NO: 108157 - protein, 334 aa, Oryza sativa
  Clone ID: PAT_MRT4530_12438C.1.pep
MQHLLQGARQRQARCHLRSCTLLLRVTSWLSMPHHLLLKRRLGATVTAPAASNYDVGISIALEASGITGEATEAAPARQWLKTSKRVGRSPSLNCASLATRLGRITPCRAQIEWYKALFDANTGYYDAFKQRLSPKKFSGANMYRIKLAQFWDGVLSMLDTSQLPYDFHRRAKWVNAAHFYQLLVEPLDIADYHRNNLHRTRGSYITHGRERRYELFDKWWKQKGCTDPSTGDTSATTTARRSKFAGLTQDPCFWARVEEAREQTESAKSERDMTSLARMLEDLHKFERHSSELVENKEVSIDVVAPQSSYSLWVKEWNELKLREEVRTILFQF

SEQ ID NO: 108158 - protein, 690 aa, Oryza sativa
  Clone ID: PAT_MRT4530_12439C.1.pep
MWRSGKRMTREEEYQEDNVPLREEVNVEKNAPVKEEENVKHGREVGDDVELPEEEANAKNVSMGLRELARLKFYTREECEEAMIRSGLNPGWLEYDTEDELDEFASDSDDDRPVRKMSEHERTVFAKLVGRNPEITQFEDLTRSGLAIANGDPQYDGAFEPMCDEPRKGLEFRSMDDLKIWLQSYSIRVHRPYHVKESNASVKYTVACLDRHCKWQINARKSGGDRWRVTRGDWDEAYVCLPTLMRAIKAKNPTMHFRVEAHPEKSRMVDGVQRRVFGRAYWIFGQSIEAFKHLRPVLAIDGTFLTGKYQGTLLTAIGVDAGLHLVPLAFALIEKENTSNWEWFINMLRNKLIGPNREVCIIFDRHPGILNSIIHIMPHHLTIHHRWCMRHFCANFYTAGATTDQMKDLERICQINEKALFLDEIKRLMGVVGERPKKWLEDHMPLKVKWARAFDTNGRRHSIMTSNMAESFNNVLRGIRKLPVTAIVAYTFSKCNSWFVDRHKEATVDILCGKKWPTKRLKTLRVRGHTAHILFDDRYIPYLRRAKLLAFVTMAQRPVPLYNAAALTALVDRWRPETHTFHLPCGELTVTLEDVAMILGLPIRGQAVTGDTASGNWRERVEEYLGLEPPVAPDGQRQTKTSGVPLSWLRANFGQCPAEADEATVQRYCRAYVLYIFGSILFPDSEVDWR

SEQ ID NO: 108159 - protein, 55 aa, Oryza sativa
  Clone ID: PAT_MRT4530_1243C.1.pep
WQYYNSTRHVRSLEINTHTTMYLVRLIALSIPKNGQGSYDDGRSEAGTNIQTTGS

SEQ ID NO: 108160 - protein, 124 aa, Oryza sativa
  unsure (1)..(124): unsure at all Xaa locations
  Clone ID: PAT_MRT4530_12440C.1.pep
FFFFFFYSEIIXPLCSGASXCXRSPIRPIFIKHSMFHQLSSSSAGSATLNIRGHHQHINCTHFFIAHTAHQHPSRSSSPLAYGHQQLMACFIIHSHHGIQPSWQIGISISSNTSSSPLAMHAXS

SEQ ID NO: 108161 - protein, 533 aa, Oryza sativa
  Clone ID: PAT_MRT4530_12441C.1.pep
MAVMEDKAFQFSTTYLNSTVFNDTYKEGVPVVLDWVITLDTCEKAKSKTTSYACVSTNSICNDDPSGGYRCNCSHGYEGNPYIKDGCEDINECLDNVTYPCPGICNNTMGSFTCSCHQGNYMENGTCIPNRKSGFLALPIVGTSVGLVILVITITCACLIHDRRKLQHIKNQYFRRHGGLLLYEEMKSKQGLAFKIFSEEELQQATNKFDEHQVLGQGGNGIVYKGHLKDNLEVAVKRCMTIDEQKKKEFGKEMLILSQINHKNIVKLLGCCLEVEVPILVYEFIPNDTLYHLIHGNYNGWHIPLVTRLRIAHESAEALAYLHSCASPPILHGDVKSSNILLDSNLSAKVSDFGASILAPTDETQFVTLVQGTCGYLDPEYMQTCQLTDKSDVYSFGVVLLELLTRKKPFNLDALENEKCLSMRFLSAMKENKLSDLLDDQIKNNENMGFLEEIAELARQCLEMSGVDRPSMKEVRDKLDRLRKVIEHPWTHDNPEELESLLGESSCVVISEVESTGNFSIERKVVKGLESGR

SEQ ID NO: 108162 - protein, 383 aa, Oryza sativa
  Clone ID: PAT_MRT4530_12442C.1.pep
MAGVEVAQERRGEERRFIMGVDYYKLLQVERGATEEELKKAYRKLAMKWHPDKNPNSKKEAEAKFKQISEAYEGMACYIQFLEQKLLQEVLSDSQKRAVYDQYGEEGLKGQVPPPGAGGPGGSSYYGGDGSTFRFNPRSADDIFAEFFGFSSPFSSMGGMGGMGGGVDRGMRGSKFGMYDNDIFGSFSQFPGEASMHAPQRPQKAAPIENRLPCNLADLYKGTTKKMKISREILDSSGRTMVVEEILTIDIKPGWKKGTKITFPEKGNESPHVIPADIVFVIDEKPHDLFTREGNDLVMTQKISLAEALTGCTVQVTALDGRNLTVPINNVVYPGYEEVVLREGMPIPKDPSKKGNLRIKFNIKFPSRLTSEQKSEIKRLLAS

SEQ ID NO: 108163 - protein, 489 aa, Oryza sativa
  Clone ID: PAT_MRT4530_12443C.1.pep
MAAGAHASRASAPIIAGLTGALRAAYKGFSPQLCNFHASVNNGLLHRRKIQLHFICSFRSIQARYNHSSAVAPKDYCETYIQFLRDKQIVPDSDPPSAKDVDLLYRFIDQSKKLMVLTGAGMSTESGIPDYRSPNGAYSSGFKPLTHQEFVRSIRARRRYWARSYAGWRRFRRAQPNSAHYALASLERIGRVHSMVTQNVDRLHHRAGSKPVELHGSVYEVACLDCGTSIDRESFQEQVKDLNPKWALAIDSLEVGQPGSDKSFGMQQRPDGDIEIDEKFWEQDFDIPSCNQCGGVLKPDVVMFGDNVPEERAESTKEAARNCDALLVVGSALMTMSAFRLARLAHEANAPIAAITIGETRADSILSLKINARCGEILPRILQMGSLAVPNILRCKRSFSLFRILITCPYVVKDYAFISSLCRFFVAKRSFSEYYYTSNLRKKTLDNLTDDVDGTCTSSKSPGDILPVSSRVPRSENSDQSISMCSYDK

SEQ ID NO: 108164 - protein, 236 aa, Oryza sativa
  unsure (1)..(236): unsure at all Xaa locations
  Clone ID: PAT_MRT4530_12444C.1.pep
RKRGLLRQRLGFAVDRAHGSSSRERTAEIDPSKTDDRDRTVHDRTTEDDNDDVSDDVTSGGGSAARARKLAGERRRDDANGGLXDVERDAANSPMTKTAAEDQRTTTALRKKRRRPSAXRRRRWSGGRQRRRMGGRERRRYGDHDGGLPERRRRLERWRRTAEAAATTAALGCTRLGRYRRRRAKARVAAGRGDTGDPFIGARRRRRRPTADGDGKERLGKNESESNSNLPISKGD

SEQ ID NO: 108165 - protein, 91 aa, Oryza sativa
  Clone ID: PAT_MRT4530_12445C.1.pep
MLTGSGHAAGESINRAPVAVGAEPDRARIPHAKRGSDRDMPPAGGRGQRAGQAGDRERGQTVPSKHHGNEAHTPVHPRRLAKFGPVSSPVS

SEQ ID NO: 108166 - protein, 142 aa, Oryza sativa
  Clone ID: PAT_MRT4530_12446C.1.pep
MPKNKGKGGKNRKRGKNEADDEKRELVFKEDGQEYAQVARMLGNGRCEAQCIDGTKRLCHIRGKMHKKVWIAAGDIVLVGLRDYQDDKADVILKYMNDEARLLKAYGEIPDHVRLNEGVVDEDDAAAHDDYIQFEDEDIDKI

SEQ ID NO: 108167 - protein, 273 aa, Oryza sativa
  Clone ID: PAT_MRT4530_12447C.1.pep
MKKTMVLYPGLSVSHFLPMMQFADELIDRGYAITVALIDPVFQQHIAFPATVDRAISSKPAIRFHRLPRVELPPAITTKDNDFSLLGYLDLVRRHNECLHDFLCSMPPGGAHALVVDPLSVEALDVAKRLNVPGYVFHPGNASAFAIHLQLPLIRAEGQPSFRELGDTPLELPGLPPIPVSYLYEELLEDPESEVYKAIVDLFHRDIQDSNGFLMNTFESLEARVVNALRDARRHGDPAALPPFYCVGPLIEKAGERRETAERHECLAWLDRL

SEQ ID NO: 108168 - protein, 141 aa, Oryza sativa
  unsure (1)..(141): unsure at all Xaa locations
  Clone ID: PAT_MRT4530_12448C.1.pep
MAPIAPATWGSGEEERERRDGIQTESRPLNGRACAGEVEEVGGDVGASCERCGGTDKAGNGGGVGRWGAGVGGRRXGRPTGGAHLSAPEREREGGRTSGRGREGGGRPSKEGALEGGWADSPTRKKKGKKWRKRKKTFPGI

SEQ ID NO: 108169 - protein, 461 aa, Oryza sativa
  Clone ID: PAT_MRT4530_12449C.1.pep
MGTALLSRAAGVLVLVVVVAAAAAAPRCDLFQGRWAADESYPLYDASRCPFVPDVFDCRRNGRPDAAYLNLRWFPSSCRLPRFDGVELLRRWRGKTVLFVGDSLSMNQWASLACMLHAAVPADGRVSFTSGEPVSSVRFLDYGVSVVLYYSRFLVDVVDDEPGLGRVLKLDSMRDAAAWLGADVLVFNTWHWWTYRGASQVYVDRRRARTYTTTHDVSFLGTDTVSHVYIYVMCRWDYVQEGNKTYRDMDRLTAFSKGLSTWARWVDANIDASRTKVFYQGISPSHYYTSSSSSSNDDGDGEVAAADGGCYRQTRPLQESTTADGGGGALLPEQVVVRGVVGSMATAVSLLDVTRMSQLRIDAHPSVYGGPGREGMDCTHWCIAGLPDAWNHIMSSPARREAAASNPVCGRQQQWWEANNKGSLVVHDGGGEGEGGEGADELELASRPLEGVGGWSKTMGM

SEQ ID NO: 108170 - protein, 151 aa, Oryza sativa
  Clone ID: PAT_MRT4530_1244C.1.pep
LLINGSGRPRRRPRCSPDTAARSPPPASSAAPPPASSRPPPPLAHLPPVVRRHGVECVEAADLAATPLLRMAISRDAAPPRRSSACDRRAAPRPRRRRPSPSPRRARIWRPSCLRCLPLPLPASPPPPPSPPPPGKKAASCSPRSPAWRIL

SEQ ID NO: 108171 - protein, 272 aa, Oryza sativa
  Clone ID: PAT_MRT4530_12450C.1.pep
MGWGIPTRPPATSTPSRVQALYELCKRTFPSPSSVAASSSPSSPPPDHAIRAISSLMDTITPVDVGLRDDNLEDGRGFGFFESNFLKNSARVARWAQPITYLHVYECDAFSIGIFCLPTSAVIPLHDHPGMTVLSKLLYGSMHVKSYDWVEPAVLANGKPVKLGKLHTDDVLNAPCPTAVLYPQSGGNMHCFTSVKSCAVLDVIAPPYSESSGRVCPYFHDYPFSSFSAAAGQAKVVHGPDNYAWLEALIVPVNINMRPGTYTGPTIQEHLP

SEQ ID NO: 108172 - protein, 93 aa, Oryza sativa
  Clone ID: PAT_MRT4530_12451C.1.pep
MARRFLIPLDVGSSLPCNLRARYLRRLMQQLDKLLRAPLRRPRSCRGCGASFAGHGPRTLTTVMLDTCNALECILVESPRHFKSHGWTARVRL

SEQ ID NO: 108173 - protein, 50 aa, Oryza sativa
  Clone ID: PAT_MRT4530_12452C.1.pep
MTGFCSIEIFPHISDLYPVTVALPDSDDAFSPSQISDHVLVLGEVDLTLA

SEQ ID NO: 108174 - protein, 248 aa, Oryza sativa
  Clone ID: PAT_MRT4530_12453C.1.pep
TPNGIPASRPLASSVPIEAVLFDIDGTLCDSDPLHHVAFQEMLLEIGYNNGVPIDEEFFINNIAGRSDVEAAQNLFPDWPLEKGLKFLEDKEAKYRSLAKERLEPVKGLAKVVQWVKDHGYKRAAVTNAPRINSELMISLLGLTDFFQAVIVGGECEKPKPAPFPYLKALKELQVSADHTFIFEDSASGTRAGVAAGIPVVAVATRNPEKSLLDAGATLIIKDYEDPKLWSALEEIDREEAKLKKADA

SEQ ID NO: 108175 - protein, 72 aa, Oryza sativa
  Clone ID: PAT_MRT4530_12454C.1.pep
NTNHNFYNNAGFSNDLSCNRCKNVWMLPIWLRYYPVISWLQAEEYNYSALPISISPLTPLPKSNRADLFPGW

SEQ ID NO: 108176 - protein, 324 aa, Oryza sativa
  Clone ID: PAT_MRT4530_12455C.1.pep
MEEWRWGQLPRNSARRSRGAGREALRQRMEARRGGLAGARAGRRGGRRPRGQRGGGEERRLRRPASQRAASRIRRHNGVNLVHGGNLLQIPCFLSHFHVAQLREICLVNGDFFLLKGIFGISPEDQIGKVSFPPVQAAQSFSSSFPHLFHDNDDHLPCLIPCAIDQDPYFRMTCDVAPKLGFQKPSLIESRFFPALQGESTKMSASDPNSAIYVTDNSKQIKAKVNKYAFSGGQDTVELHRELGANLDVDVSIKYLNFFLQDDDELEHIKKEYKAGRMLTGEVKQRLIEVLSELVARHQRARAQVTEEMVDAFMAIRPLPNMFG

SEQ ID NO: 108177 - protein, 107 aa, Oryza sativa
  unsure (1)..(107): unsure at all Xaa locations
  Clone ID: PAT_MRT4530_12456C.1.pep
MGPQVRCNRPENCVNYNNSHKDPPVNDPEKCGGMLGQPRFGRTRGSVEXLAAAAPAGLTRGRLGWLADGGCRVEWSFRLFYNLHTDLINGGAHFTSHTLKQSQDSSL

SEQ ID NO: 108178 - protein, 62 aa, Oryza sativa
  Clone ID: PAT_MRT4530_12457C.1.pep
LCPTTRGCMWHINTKKPDNSRRHTTPICYTCTREPTTRSVFLGLLFIQWSNHVYAGDAANNS

SEQ ID NO: 108179 - protein, 178 aa, Oryza sativa
  unsure (1)..(178): unsure at all Xaa locations
  Clone ID: PAT_MRT4530_12458C.1.pep
MWAPHVISCAGARWDKPTEAEGRRRPSLSSSVVEAGDGXLGGGSRIADGGRRQRELVHPSNAASQGVGELAFDFASTYSXPWMAEGANDGDGDSCPRAGRSSQAIRARGGARRPSMRGEELACRPRAGEELELAGGQEQRREDLELAGGRERRRSAPASGGHGQRRPRRHQAGGEKGR

SEQ ID NO: 108180 - protein, 503 aa, Oryza sativa
  Clone ID: PAT_MRT4530_12459C.1.pep
EQPQQQQEEEEAMKLDVNALRYLSKDDFRVLTAVEMGMRNHEIVPAELVDRIAGLKHGGTYKVLRNLLKNKLVHHDATKYDGYRLTYLGYDFLAIKTLVNRGVFASVGRQIGVGKESDIFEVATEDGTVLAMKLHRLGRTSFRAVKSKRDYLAHRRSFNWLYLSRLAALKEFAFMKALGDHGFPVPTAVDCNRHCVIMSLVQGYPLVQVKELQNPDDVFDTILGLVVRLAEHGLIHCDFNEFNIMIDDDEKVTMIDFPQMVSVKHRNAQMFFDRDIECIYKFFRKRFHLSSEKCEEQDGSDIDDDENSRPSFLSIQKAAGSLDKELAASGFTRKEQVEMDKYIDQNAEEESSDDDSTSEQDNEDGDDVAVKIGSLKIAEQDSAEVPDCTLASKDSNEPETFAKENETSTSCSGENNSINPSRSSNGDAKEPTESQDNDDSDDDSSDDPDGEDDDALAKQLNKQRKRAIAAAHGRRRPISSRNAYKYKGKGTMNSKIERQACKW

SEQ ID NO: 108181 - protein, 57 aa, Oryza sativa
  unsure (1)..(57): unsure at all Xaa locations
  Clone ID: PAT_MRT4530_1245C.1.pep
FFFSSKAAAIFHISTAQRRFTNSYEKHHGHIGXLTQYTQXDKXFIKKHRVNIVNQHX

SEQ ID NO: 108182 - protein, 426 aa, Oryza sativa
  Clone ID: PAT_MRT4530_12460C.1.pep
MDAQVQQQQQAAPQQQPPPAAAAAAGRRYGVHFSASSFIQAPLSALLEYSGILRADPGGGPHQVGGGGGGGGGEVSIRIVGSGEAAGAASERGEEGVVEDEAGAAPQANPSTSAAAAATAGGGEAGRESSSSYQRYDIQQVARWVEQILPFSLLLLVVFIRQHLQGFFVTIWIAAVMFKSNDILRKQTALKGERKMSVLVGITILFVVHVFGVYWCYKNDTMVRQTAMIIKCMLLMYYKNSKGRSYRRQGQMLTVVEYFLLLYRALLPAPVWYRFFLNKEYGSLFSSLTTGLYLTFKLTSVVEKVQSFLTALRALSHKDFHYGSYATSEPAEAGSSDHQDIRLSSVSWNQYFGCFAPGTLTSFGTSTCYPFTETKRILPKSRGSGIALVLFRCNIFTRLIGAFNAQYALTRVIIAGCHHSKRIGEF

SEQ ID NO: 108183 - protein, 63 aa, Oryza sativa
  Clone ID: PAT_MRT4530_12461C.1.pep
TRATPLAVVADDISDETFIELQGSHLPGIIIHNIQKSMCTHAVSCYTIDWHSTRRYFCTSDVI

SEQ ID NO: 108184 - protein, 322 aa, Oryza sativa
  Clone ID: PAT_MRT4530_12462C.1.pep
MRCGHTRAVSSASLSISDWPRRFRGGVEGSRPSDQERGRYRGPGPVGPTGHAARANPCTRGLALGIGRWVGWGPLVCDCGWRRGEAATGGGSWTVLPRRGGARHSAKLRRGVRGYWRSRREEWQLGVETNKARDRSLGTSRTNFARERQHDELVEARDAFNWWSRHAYVQPQELVTAVGREPVTAAGYDAHGASRCLRCRRKGRQDGDGVGSGPRHRQTGSSRCLLRHLHAHMLHRLQAHRRCPLKRAAAPMHELTVDEPQPPPTGRLPSAQIWASYRSARGRGRGRGEARLLRASISQSPQSRSAIAVILSAVSAESREVG

SEQ ID NO: 108185 - protein, 253 aa, Oryza sativa
  Clone ID: PAT_MRT4530_12463C.1.pep
PRRRSTPSAWTSSGRYSFASPTWRHSSMPPSPASAGGARPPTPPFSSASSRSAVLRSSVSSSPTAATSPSPATAPTSTSSAPPPVSPIWHPPPPIAISSSKTSPISIRTRTTTTAAVSTPTSGASAAATAAAFSSPAAATGSTSPSTIPSRGLPSSSARPKPSAARSTWSGTPLSSTTPTPRSGSSASVTTHPPPCSPPAPTNGPCSTSTRRRICVTASPTATACPPAGSCTGGRTPRTTRTWRGSCCSMWAP

SEQ ID NO: 108186 - protein, 564 aa, Oryza sativa
  Clone ID: PAT_MRT4530_12464C.1.pep
MTAATACTVTGGRAARRRCRYRPLHHLQLHPQGRRAGEQQYDDLDSRTDLRLRNEDAASPTNSYTNLGAHIVRLKKRSWIDEDSLSVELNLLFSYCMSTHQNCQQAHPAPSSLAPGCPPLPPPVEQDNGSCRAVTDAIRMALQVERRLRVPPSIPPTSSGSSTTEREIEMTAQRDNVSFGCMGVKFNEEDHGGARAGGGISVRGQHCNGALTECDVPLPNCTTIATSGAAAAEPAHKAPLSLAPACSPLPPPAEQDNGGTISAYLAIWAYYVAIRQNRWAVTGVVRMTLQVERRLRAPPSIPPTSSVSSTMEHGIEMTAQCDNSRGLEPPPRLDMSLKVSNFFTKAKEVHYIEQRERLGVASLSNISDREAIAIMGTIDLTAAAVSFGCMGVKFNEEDHGDVGAGGISVRGQHCNGALINRWVVTGTVRMALQVERRSRASLSILPTSSGSSTTEREIEMTAQHDNDLIAAAVSFGCMGFKFNDEDHGGAGADGGISVRGLHCNGALTVLSISIDVITELALTCVVDCDAHDLLKQQEAGYSRRTHRSLISTGRLYVDGSSTST

SEQ ID NO: 108187 - protein, 446 aa, Oryza sativa
  Clone ID: PAT_MRT4530_12465C.1.pep
MGNGGGGNKKGRRDSPSPPLETPPRGELPSTSSSSSSRATKRHRVAGMADRYFPNDLPDFVAEAPDGGRGLLSLPYSSLSERLLRAALRIKDKVMEETWTRARRQVTDYTLYTGALGTALLLFKSFQVTGNRADLALAGDIVKECDAASRGLPFLTFICGRAGVCALGAVIAKHCNDQLLLTHYLSSFDEIIVTEKVPNELLYGRAGYLWACLFLNTHLGEKTIPHEHITSVAKDIIDEGRKLAKKGNCPLMYEWHGKKYWGAAHGLAGIMHVLMHTELKLDEKDDVKNTLLYMIRNRYPTGNYPSSEGSESDRLVHWCHGAPGVALTLAKAYQVFHDEHFKQTAAEAAEVVWNRGLLKRVGICHGVSGNAYVFLSLYRLTGNVEYLYRAKAFACFLLEKADQLIADGAMHGGDHPFSLFEGRAGMAYLLLDMVSPSESKFPAYEL

SEQ ID NO: 108188 - protein, 67 aa, Oryza sativa
  unsure (1)..(67): unsure at all Xaa locations
  Clone ID: PAT_MRT4530_12466C.1.pep
LGAYQAAIXNSDVPGXDADAAXXRXAIVFXXYVXXGXYQXVIXEIXSXAATXLXAVXLXALYLXRRH

SEQ ID NO: 108189 - protein, 484 aa, Oryza sativa
  Clone ID: PAT_MRT4530_12467C.1.pep
MGNGGGGNKKGRRDSPSPPLETPPRGELPSTSSSSSSRATKRHRVAGMADRYFPNDLPDFVAEAPDGGRGLLSLPYSSLSERLLRAALRIKDKVRHACASVWVWVWVWVARARTHARCSADFPRPLPAPPAGHGGDVDRARRQVTDYTLYTGALGTALLLFKSFQVTGNRADLALAGDIVKECDAASRGLPFLTFICGRAGVCALGAVIAKHCNDQLLLTHYLSSFDEIIVTEKVPNELLYGRAGYLWACLFLNTHLGEKTIPHEHITSVAKDIIDEGRKLAKKGNCPLMYEWHGKKYWGAAHGLAGIMHVLMHTELKLDEKDDVKNTLLYMIRNRYPTGNYPSSEGSESDRLVHWCHGAPGVALTLAKAYQVFHDEHFKQTAAEAAEVVWNRGLLKRVGICHGVSGNAYVFLSLYRLTGNVEYLYRAKAFACFLLEKADQLIADGAMHGGDHPFSLFEGRAGMAYLLLDMVSPSESKFPAYEL

SEQ ID NO: 108190 - protein, 93 aa, Oryza sativa
  Clone ID: PAT_MRT4530_12468C.1.pep
PYLGAVCLRTTSLAQVAVQPGQVSLPITLSRGYHPVNRLCFQFGGSLLASNCRITQERGSTPSSSLAPVARKNAHVFEGIISTTEMMVDRIVQ

SEQ ID NO: 108191 - protein, 47 aa, Oryza sativa
  Clone ID: PAT_MRT4530_12469C.1.pep
DESSEEDGERNQATGTRATNPCETKSGDAAKARERDNIAVVSASARL

SEQ ID NO: 108192 - protein, 131 aa, Oryza sativa
  Clone ID: PAT_MRT4530_1246C.1.pep
MDIYLSDLLADTQVRTRTMQAGGRELSVVIPIASGGRHHRPPPLTTLSALPPPPSSSPAASAPPPPPARSATHRRAAASHGHPSKADPISSALYRNLGLPVPEKKRWSPELEKKSTNREAHPVIQILQDLR

SEQ ID NO: 108193 - protein, 421 aa, Oryza sativa
  unsure (1)..(421): unsure at all Xaa locations
  Clone ID: PAT_MRT4530_12470C.1.pep
MGVYDADAIQKERIPDRLKMKLLSRLKMRSAEPTNPIPHTNRVVSTSTPPPPRNEIGDDQARKRCWISWEGGRGGXPETVCVPLLLSASGGFVVVVVVVGGGGAASLGYSKHNLTAQLEQRWVESLHIFYLKIYEGYMGFVKKPIDLTISKRTRRCVVMMSFARSKGGKIGILRGRKDKQEHHPITSSNDWVIWEWKRIVHDEKHYQRFRCANVACLQHPSPCEEPHQVRHCMVHWVSPCQKFQENTVTPKIYTSLFCERPTLLKGPYLIHILVLSSVFHRRRRLSEFPRKPNPLRCWVPSGERELKLLRPGNTMEVSMATTNTAGEPEAFKYLKTSDSDERMEGSKKVSEDEEQALKVRFQEWMNKFNRNYKDEAEKAYRFEVFKSTVQYVEKFNAEQLLNLDQGPGVAVGCTGNLPCVL

SEQ ID NO: 108194 - protein, 183 aa, Oryza sativa
  Clone ID: PAT_MRT4530_12471C.1.pep
MDRATEEETAATGRRILVAVDEGDESVHALKWCLASFAKRGGGGGAAPPDTIILLYVRPPPPTYSVLDASAMVGYVFSDEVAAAIDGYSKEVAEAVVEKAQKLCTLYGKEVGGDGEAGHEMKVEVKVAVGDARNVICQMADKLGADVLVMGSHGYGLFKRALLGSVSDYCVRNANCPVLIVKS

SEQ ID NO: 108195 - protein, 173 aa, Oryza sativa
  Clone ID: PAT_MRT4530_12472C.1.pep
MASSALAVSVAKPAASPPVAVAAVTPQRRLLPQCRGVRAAPVVRLRSGRARGVSVVCAAQGQETSFQVPDVTKSTWQSLVVESELPVLVEFWASWCGPCKMIDPVIGKLSKEYEGKLNCYKLNTDENPDIATQFGIRSIPTMMIFKNGEKKDAVIGAVPESTLVSSIDKYIGR

SEQ ID NO: 108196 - protein, 115 aa, Oryza sativa
  Clone ID: PAT_MRT4530_12473C.1.pep
VAPAIDGYSKEVAEAVVEKAQKLCTLYGKEVGGDGEAGHKMKVEVKVAVGDARNVICQMADKLGADVLVMGSHGYGLFKRSLKRSRFQSQKLALLGSVSDYCVRNANCPVLIVKS

SEQ ID NO: 108197 - protein, 478 aa, Oryza sativa
  Clone ID: PAT_MRT4530_12474C.1.pep
MERGEMEREEEDEEDEGMAATLHSKINRKRLDKLDIIKICEEILNPSVPMALRLSGILMDYACTNSSHRLRSTRHGGSSQSQTPPYFPRAKPKPITGAKGAGLRAVWYEAVTLPENIMDMDVEQPMLFSEADTTRFRGMRLEDLDDQYINVNLDDDDFSRAENHHQENITLADNFGSGLGETDVFNRFERFDITDDDATFNVTPDGHPQVPSNLVPSPPRQEDSPQQQENHHAASSPLHEEAQQGGASVKNEQEQQKMKGQQPAKSSKRKKRRKDDEVMMDNDQIMIPGNVYQTWLKDPSSLITKRHRINSKVNLIRSIKIRDLMDLPLVSLISSLEKSPLEFYYPKELMQLWKECTEVKSPKAPSSGYYTICSFLSPFWITKGTPQVDNDREMGFHPVDFADDIEKLRGNTSGEYGRDYDAFHSDHSVTPGSPGLSRRSASSSGGSGRGFTQLDPEVQLPSGSNRDIRAVTANCVAE

SEQ ID NO: 108198 - protein, 66 aa, Oryza sativa
  Clone ID: PAT_MRT4530_12475C.1.pep
IYIYIYIVISRFISIYMNVSSARKSYIVKQREYSFLICSSIVTNPTNPSLLPSSATLLLCCFLPIL

SEQ ID NO: 108199 - protein, 83 aa, Oryza sativa
  Clone ID: PAT_MRT4530_12476C.1.pep
KATRWCVQTGETWPSAWQAASGWPNKLQGWISSKQVRALAKANVSKWCAGRCGAKQADKLTNSLLGVLLAIRLQAQAQAMVGP

SEQ ID NO: 108200 - protein, 590 aa, Oryza sativa
  Clone ID: PAT_MRT4530_12477C.1.pep
MAEPGEDAAAAAAAASTKYVLITGGVVSGLGKGVTASSVGVVLKACGLRVTCIKIDPYLNTDAGTMSPFEHGEVFVLDDGGEVDLDLGNYERFLDVTLTRDNNITTGKIYQSVIEKERKGDYLGKTVQVVPHVTDEIKQWIQSVSSVPVDGQTRPADVCVIELGGTVGDIESMPFIEALRQLSFSLGKDNFCLIHVSLVPVLGVVGEQKTKPTQHSVRELRALGLTPDLLACRSAQPLIGSVKEKLSQFCHVPVENILNIHDVPNLWHVPLILRNQKVHEAIIKQLNLGRSAGPPELRDWTQMAESYDDLKNSVKIALVGKYTNLTDSYLSVVKALLHASVACSLKPSIQWIAASDLEDATATSAPDAHAKAWETLKGSSCILIPGGFGDRGISGMILAAKYARENKVPYLGICLGMQISVIEMSRNVLGLKDADSEEFNSETPFRVVMYMPEVSKTHMGNTMRLGCRRTFFRRTDCLTSKLYGSPEHVDERHRHRYEVNPSFVAMLENAGLHFVGCDESGKRMEPEPASTYEQVVELQDHPFYIGVQFHPEFKSRPRRPSPPFTGLILAAAEYMGTPANNSNGHVGTSE

SEQ ID NO: 108201 - protein, 99 aa, Oryza sativa
  unsure (1)..(99): unsure at all Xaa locations
  Clone ID: PAT_MRT4530_12478C.1.pep
KLTRAPPADPMIHDNSXDXTAPXAGDXSFKFLPYXXCSXKLDIXFRXXSXXGGAQXPPXPXXSXXXSVAXICXPLYXVKXAXPQKKRRETXPXSAXWXI

SEQ ID NO: 108202 - protein, 196 aa, Oryza sativa
  unsure (1)..(196): unsure at all Xaa locations
  Clone ID: PAT_MRT4530_12479C.1.pep
MVLQGKRNPGTDEKXRVVSFLQSVRQAKEMKIDRXVCFASWHIVMKMESPKSSTCDPIAPLDLPHSLHAFHRVPNNPQDKEYSCTFRGGFWNYFSMGMDAQVSYAFRSGRKLHPEKFKNQLSNQKTYXELACTQGWFCASLCHPMSRYIALPSLGXSLQHSGKSAPFVLPQRLPSFVSLXVPCFSGGLNPWGTPSE

SEQ ID NO: 108203 - protein, 156 aa, Oryza sativa
  Clone ID: PAT_MRT4530_1247C.1.pep
MAGWADEDYAEIMVAYWADDGSCRRARRDHPARHRRTTLKEKSGEDTPVAFLVTRRVVGSEVPLGPSGTLVGLSREEGHSDGWSYEGSPAQLAGVLDCTEFEAQRLWRGYRNCMGGGRTRLPSFVLIRQGVYSLRMTHKAGKCVSIPMMRNVWRMH

SEQ ID NO: 108204 - protein, 126 aa, Oryza sativa
  unsure (1)..(126): unsure at all Xaa locations
  Clone ID: PAT_MRT4530_12480C.1.pep
PFFFXFFFXFFFFFFFFMVCVSSLSVWVPSRHEWESVFPPQMDLNVEALPGGPARIMNTHAALVSPRRNDLLSVRAGSERVEELCCQVRWVVVQHQEKVRSRTRCQADACVSSISSTSAVASGAWR

SEQ ID NO: 108205 - protein, 143 aa, Oryza sativa
  unsure (1)..(143): unsure at all Xaa locations
  Clone ID: PAT_MRT4530_12481C.1.pep
PVQWVCEAPVQPLYPPLGPVPRAPIYHFPGFSPPILSPNRVYGPPISFPGFLPHGPVFPPPRPVLSRLCWRAPSSGPGPGGSQFPPPGXGSPLGPPPPPAKFPLGLPVFGRGAPPIKKVGKKKGPPPPGGSGKKIWKSLCLFV

SEQ ID NO: 108206 - protein, 61 aa, Oryza sativa
  Clone ID: PAT_MRT4530_12482C.1.pep
YFFTFPLTHHLAVDLSDPVSLACALAGVEAVCPSSTWSPPRPTRDGSSFLSLHCLAVESTR

SEQ ID NO: 108207 - protein, 80 aa, Oryza sativa
  Clone ID: PAT_MRT4530_12483C.1.pep
MTASTSTGELTIVVSCSPHTKLRPDDIRLNQTTTHFSTSSTGGGGFTFGRSFTFYNVGGVRHGHMPLLLDDLERKEHKSL

SEQ ID NO: 108208 - protein, 121 aa, Oryza sativa
  Clone ID: PAT_MRT4530_12484C.1.pep
MTAASSPPLAPPATIPSSTSALRHLLPLSGLRFRRLPAAVGRGYRSRPGFRYRAAAGPSPPSSEPPPRSPHGWQERLSRLQDRIRIFFAVLFWMALFFWGSAWDGNNNSGGTKRQRFRKKS

SEQ ID NO: 108209 - protein, 80 aa, Oryza sativa
  unsure (1)..(80): unsure at all Xaa locations
  Clone ID: PAT_MRT4530_12485C.1.pep
MATNASYPRARETESTLQKEKRELSSASGPDLVEGPLLKRSXTPRKWNDRWPIIDPNYRKIEHKKLRDEPDIEGTIIFEA

SEQ ID NO: 108210 - protein, 89 aa, Oryza sativa
  Clone ID: PAT_MRT4530_12486C.1.pep
VGVHGGATTCRVRVSPRRWRWWCSTSETTPREAAPKAPKAENKPADKKTAAGEEKYAEKAPVAKKAKAENQMPETKAVSKEGGADDKKG

SEQ ID NO: 108211 - protein, 171 aa, Oryza sativa
  unsure (1)..(171): unsure at all Xaa locations
  Clone ID: PAT_MRT4530_12487C.1.pep
MESRWCKRNGDLDQPEPSGAVAIYREGGPDWDQIRDGGAIAQSEAFNFLESGCSRHCCSLRETLPPSVLGKESKNKELWGLGRDHCNLRAQPPPPTPAHPPGVAAAAADAATASGRNCRLRAPPSPPXVQPQPPPLGTTVATTGRSHSHHRRCKPQSPPLPISLSRRGGGD

SEQ ID NO: 108212 - protein, 445 aa, Oryza sativa
  Clone ID: PAT_MRT4530_12488C.1.pep
MADLEQSSSDAATLKKLYTEGAIPPKQTMAREAGDLPDDTVAQRVREVLISALSTAEEVPASLCDKSAAEKAAAINASASLKEKVDDEVTKVSSIPVIAGGSGTKRKPWARSSASIGHGQPSLSSEEEDIEAARRRAVVSSQSRSEVATSGSTAAIIPRVEVAPTITESAGPAAAPVVAPPPVVTTWSDVVVECHCLLDNSSWVVAAQIDRAEARPTAADERVAQLEAELEVAREDLQKMMELVAGNEMQRQVDSSYESFVDLSHSFVSRSYVDPENVQQGGDPDVEMVELPSPSDAVKDGGLDATFCPPEAGEVGLPRENPDLDSVIAERDRRIDYWRMKFEITELERSLVVVKKDQAMEALRGREVWVNSYLKSCCSAMADICCQLKVDRPEPEESTTGYLPWMRGACAQLEGIGQRIDISLKEECRRASRYAGGHVLAVGIS

SEQ ID NO: 108213 - protein, 117 aa, Oryza sativa
  Clone ID: PAT_MRT4530_12489C.1.pep
MEVIGGGSIPTNFWDGIKAVKDKLRVNLGLFLCASLCWGLWLVVYKAISLMHRWKVLLPKERDREALNMLLEKLKAKIDSLHPMNVLPYNISVSVLLLLGLRSLSRLDVFLGRACTH

SEQ ID NO: 108214 - protein, 60 aa, Oryza sativa
  Clone ID: PAT_MRT4530_1248C.1.pep
MPGAEVSRISAKAVGAEVPATSTWGKGWAATLAGLNADAAGTDPWGVGLGLSSHSETLIS

SEQ ID NO: 108215 - protein, 73 aa, Oryza sativa
  Clone ID: PAT_MRT4530_12490C.1.pep
FKINPNQPSQRVRRRRLAGATGSCSGGDSDVLLRTSAVTGGRYGRARTAAASGGRVRPRQAAAFYGSDDQQVM

SEQ ID NO: 108216 - protein, 513 aa, Oryza sativa
  unsure (1)..(513): unsure at all Xaa locations
  Clone ID: PAT_MRT4530_12491C.1.pep
MDNLVILAGVLLLPLLFLLRNAASSRRRRLPPGPPAVPLFGNLLWLRHSAADVEPLLLTLFKKYGPVVTLRIGSRLSIFVADRHLAHAALIAAGAKLADRPQAATSTLLGVSDNIITRANYGAMWRLLRRNLVSQTLQQSRVDQFAPARVWVRRVLMEKLRGSGEEAPNVMEAFQYTMFCLLVLMCFGERLDEPAVRDVEEAERAWLLYISRRMSVFFFFPWITKHLFRGRLEAAHALRRRQKELFVPLIEAXRREYKRLASQGLPPARETTFQHSYVDTLLDVKIPEEGNRALTDDEIVTLCSEFLNAGTDTTSTGLQWIMAELVKNPAVQEKLYAEINATCGGDDELLERNVRDKDNKMPYLNAVVKEGLRKHPPGHFVLPHKAAEDMDVGGYLIPKGATVNFMVAEIGRDEREWENPMQFMPERFLDGGHGAGVDMHGTKGIKMMPFGVGRRICAGLNIAMLHLEYFVGSMVMEFEWKEVEGHEVEFAEKREFTTVMAKPLRPRLVPRRS

SEQ ID NO: 108217 - protein, 422 aa, Oryza sativa
  Clone ID: PAT_MRT4530_12492C.1.pep
MWRLLRRNLVSQTLQQSRVDQFTPARVWARRVLMEKLRETTSGVSGGGGDAPPNVTEAFQHAVFCLLLLMCFGERLHEHAVRDIEDAERAWLLYISKKTSVFFFLPWITKHLFRGRLEAGHALLRRQKELFVPLIEARREYKKLASQGLPPARETTFQHSYVDTLLDVKIPEEGNRSLTDGEIVTLCSEFLNAGTDTTSTGLQWIMAELVKNPAVQEKLHAEINATCGDDGELLERSVRDKDNKMPYLNPVVMEGLRKHPPSHTLLPHKAAEDIDVGGYLIPKGATVNFMVAEIGRDEREWEKPMEFIPERFLAGGDGDGVDVTGSREIRMMPFGAGRRICAGLNVGVMHLEYFVGSMVMEFEWKEVAGDEVEFAEKLEFTTAMAKPLRPRLVPRRSQALIRVSLLICSLRFKIFDTVDLLV

SEQ ID NO: 108218 - protein, 134 aa, Oryza sativa
  Clone ID: PAT_MRT4530_12493C.1.pep
MASRHVYPRLPSPANREASSLWDPPRRASEMDSPSPMAAQAADLSLTLAPSGGGGGGGGGGGGGGSSSACIDGKDVRLFPCLFCNKKFLKSQALGGHQNAHKKERSIGWNPYFYMPPTPHPAGNAAAAAAAATP

SEQ ID NO: 108219 - protein, 37 aa, Oryza sativa
  Clone ID: PAT_MRT4530_12494C.1.pep
ECFRHVRARVLMVIFITPSPIYNNRPSLSRSVPRAPA

SEQ ID NO: 108220 - protein, 91 aa, Oryza sativa
  Clone ID: PAT_MRT4530_12495C.1.pep
MAAAPEAAAVMPMEAYFSPAELVRIAGYGEELVSTVIVSGKVVCKLSLRPPGSDLLSIELPGFVGLDAEKCEILRMTHDEDERPEPEHFDM

SEQ ID NO: 108221 - protein, 102 aa, Oryza sativa
  Clone ID: PAT_MRT4530_12496C.1.pep
AGEPEALLVRWPVRLFALWLWASKQSETQLSQVDEDGASSSSCSWPSSPSPRIQIPGLPPLPPLPTIQIPCLPPLQPLPTIQIPGLPQLQPLPTIQIPELPP

SEQ ID NO: 108222 - protein, 127 aa, Oryza sativa
  Clone ID: PAT_MRT4530_12497C.1.pep
IYIHIDVNESKHIYMNMTNARKYYIVKRRKYLRPKMLQYLIMNLDIFIAKNVYIFGLREYTEDINQTEPNFFPLWNLQSFLLSLPSPLRWWEKDNILGRGAQGAFFAEAVAQRRNSDPMAREKKHCW

SEQ ID NO: 108223 - protein, 528 aa, Oryza sativa
  Clone ID: PAT_MRT4530_12498C.1.pep
MAAASAAKELHFLLVPLVAQGHIIPMVDLARLLAGRGARVTVVTTPVNAARNRAAVEGARRGGLAVELAEITFTGPEFGLPEGVENMDQLVDIAMYLAFFKAVWNMEAALEAYVRALPRRPDCVVADACNPWTAAVCERLAIPRLVLHCPSVYFLLAIHCLAKHGVYDRVADQLEPFEVPGFPVRAVVNTATCRGFFQWPGAEKLARDVVDGEATADGLLLNTFRDVEGVFVDAYASALGLRAWAIGPTCAARLDDADSSASRGNRAVVDAARIVSWLDARPPASVLYVSFGSLTHLRATQAIELARGLEESGWPFVWAIKEATAAAVSEWLDGEGYEERVSDRGLLVRGWAPQVTILSHPAAGGFLTHCGWNATLEAISHGVPALTWPNFSDQFSSEQLLVDVLRVGVRSGVTVPPMFLPAEAEGVQLTSDGVVKAVTELMDGGDEGTARRARAKELAAKARAAMEEGGSSHADLTDVIGYVSEFSAKKRQERDAGETAQQPPPSPAELGDISGDKVEADPALSVQS

SEQ ID NO: 108224 - protein, 356 aa, Oryza sativa
  Clone ID: PAT_MRT4530_12499C.1.pep
MEDAAAAARRMERLASHLRPPASQMEESPLLRGSNCRAKGAAPGFKVAILGASGGIGQPLALLMKMNPLVSVLHLYDVVNTPGVTADISHMNTGAVVRGFLGQPQLENALTGMDLVIIPAGVPRKPGMTRDDLFNINAGIVRTLCEGIAKCCPNAIVNVISNPVNSTVPIAAEVFKKAGTYDPKRLLGVTTLDVVRANTFVAEVLGLDPRDVNVPVIGGHAGVTILPLLSQVNPPCSFTSEEISYLTTRIQNGGTEVVEAKAGAGSATLSMAYAASKFADACLRGLRGDAGIVECSFVASQVTELPFFASKVRLGRCGIEEILSLGPLNEFERAGLEKAKKELAESIQKGVAFINK

SEQ ID NO: 108225 - protein, 93 aa, Oryza sativa
  Clone ID: PAT_MRT4530_1249C.1.pep
AGHALNQVVPEHLVHHIQPDGTTMPQIVPEHLVQSIQPNYQNYQGGNINYQYQPPSPQVQYQQGGLTQPQFASQYNQFEPIRQQSQGAAQQRP

SEQ ID NO: 108226 - protein, 122 aa, Oryza sativa
  Clone ID: PAT_MRT4530_124C.1.pep
RPRHGQEAALGETAGSQSLSLLAHGGGGAGYASISCGGAGGVDIDHLLLRGGHSLSLAAVTTPPSPKMELGTGNGGDAETLSRNSLSSENTGTIVSSPSLELHIPMEVLAGKMKKGRKSRRG

SEQ ID NO: 108227 - protein, 429 aa, Oryza sativa
  Clone ID: PAT_MRT4530_12500C.1.pep
MEDAAAAARRMERLASHLRPPASQDLTLIAICFLLVIMEESPLLRGSNCRAKGAAPGFKVAILGASGGIGQPLALLMKMNPLVSVLHLYDVVNTPGVTADISHMNTGAVVRGFLGQPQLENALTGMDLVIIPAGVPRKPGMTRDDLFNINAGIVRTLCEGIAKCCPNAIVNVISNPVNSTVPIAAEVFKKAGTYDPKRLLGVTTLDVVRANTFVAEVLGLDPRDVNVPVIGGHAGVTILPLLSQVNPPCSFTSEEISYLTTRIQNGGTEVVEAYAASKFADACLRGLRGDAGIVECSFVASQVTELPFFASKVRLGRCGIEEILSLGPLNEFERAGLEKAKKELAESIQKGVAFINKKSYIVKRREYISSNQVGCCFHGRRKQYYLGSKVTCFGSEQHCAPKYSINKPAWLGHQTLKKAAAANDLQWRH

SEQ ID NO: 108228 - protein, 242 aa, Oryza sativa
  unsure (1)..(242): unsure at all Xaa locations
  Clone ID: PAT_MRT4530_12501C.1.pep
RPGAAPGFKVAILGASGGIGQPLALLMKINPLVSVLHLYDVVNTPGVTADISHMNTGAVVRGFLGQPQLENALTGMDLVIIPAGVPRKPGMTRDDLFNINAGIVRTLCEGIAKCCPNAIVNVISNPVNSTVPIAAEVFKKAGTYDPKRLLGVTTLDVVRANTFVAEVLGLDPRDVNVPVIGGHAGVTILPLLSQIDGILLLFPXVNPPCSFTSEEISYLTTRIQNGGTEVVEAKAGAGSATL

SEQ ID NO: 108229 - protein, 46 aa, Oryza sativa
  Clone ID: PAT_MRT4530_12502C.1.pep
VLQGKMTVMFCTVSSLNAFSSRLLESNVLMCCLRWGYFSCQSVEIS

SEQ ID NO: 108230 - protein, 111 aa, Oryza sativa
  Clone ID: PAT_MRT4530_12503C.1.pep
SQRRPPPARKRRSEGLPPAEGSAPRPPCGAGLDAVAGEAMAPPLGVGGAAAWPRPTASTLAVFAAFQLAPLGMRALLTITTHSPPPLVGGRNLPSSSSSSQSAAAATVVGV

SEQ ID NO: 108231 - protein, 137 aa, Oryza sativa
  unsure (1)..(137): unsure at all Xaa locations
  Clone ID: PAT_MRT4530_12504C.1.pep
XXPXSXPXXXXXXXXXXXXXXXSPXTXXXXLXKXHWAGXXXXXFLXXXRXFLKXXXXXPSDVVPNEPSANTVWCLVDQGTGYHKLELMLVHYNLRITSNMRRMPSLTRTSNLRTLLRNVLEHLLCLARTCVKAFWFV

SEQ ID NO: 108232 - protein, 431 aa, Oryza sativa
  Clone ID: PAT_MRT4530_12505C.1.pep
MAPTTNQSSGSAPLTVNPVVQRAVVGAQLPTTSPCRTPKSPPPSYGSIVTVLSIDGGGVRGIIPGTILASLEEKLQKLDGADARIADYFDVIAGTSTGGLVTAMLTAPNDQGRPLFAAKDINDFYLKHCPKIFPPRSIPIVGLFQSMAGPKYDGKYLHSVVQSLLGDKRVNETITNVVIPTFDIKLLQPITFSRFDAQIDVSKNALLSDVCISTSAAPTYLPGHRFQTKDKDGKPREFNLVDGGVAANNPTLLAMTHVSKQILLGKQDDFFPIKPADYGKFMILSLGTGTAKIEEKYDAVQSGKWGMINWVYHDGSSPLIDSFSQASADLVDIHASVLFQALHCEKSYLRIQDDELTGDTASVDVSTPENLNRLVDVGKALLKKRACKVNLETGKNEPDMSRGTNEEELENFAKMLSEERKARLQKKAFLQ

SEQ ID NO: 108233 - protein, 624 aa, Oryza sativa
  Clone ID: PAT_MRT4530_12506C.1.pep
MNRAARSRSPEDASVAAARKLHLLLRSRDLRPALSYLRTLPSPLTLLPNHALNALLRALAAAGRVRAAAALFRRIPSPTPHSFNSLLAALLRRGRRRAASALFAALLRSPSASPDAATLNTLLHGLSTASPHPSTPALLRLFRFLPDTYAFAPDAISYNSLLSALCRAGDVLTARKLFDGMRVGGEEGRGAVFPNVITYTTMIKAYCAKRLVNEALAIFKLMVADGVAPNRITYNTMVQGFCDAGRMELVKEVLEMDSFRPDTCTFNTLVAVHCREGRIEDAMKVFNQMVELRVRRDSASYSMVIRVLCENGEFGQAEELVDELLEKEVLKKRGGCTPLIAAYNPVFVYLCEHGKTKKARMLFGQLLDRRSKVDVPAFKTLILGHCREGDFEEGYALLLSMLKRDLVPDDECYIAVIEGFSQRGRMKFAWEALHRMLNSGLRPSTSTFHSVLLGLLNKDGCAKEAADLIEIMLERKIRQNVDLSTNLVDTLFRNNLNDRAYKIVTSLYDHGYYIKMEKLIANLCEEKKFIEAADFTLFSLEKSQNFGVAIPSMVLDGLCMTGRASEAFRLFYELIENRSALASVAAPRSLVALHHALEESGKMKEADFIARQMRRASARIRERI

SEQ ID NO: 108234 - protein, 235 aa, Oryza sativa
  Clone ID: PAT_MRT4530_12507C.1.pep
MARIKPKQLLIQSKTKKAPTRISYSTIVTWNLIVILVALSLYATYRHWHHRPMLETEMDLPRAEHVGRSEDSTKTSRPSYAVIDTAKGSITIEIYKDASADVVDRFVSLCKSNHFKGMPFRHVIKNFVIQGGDFDFNGAAQEWILKAKASGENALSPKHEAFMIGTTKNPNNKGFDLFITTAPIPDLNDKLVVFGQVINGQDIVQEIEEVDTDEHYQPKTPIGILNITLKQQALS

SEQ ID NO: 108235 - protein, 250 aa, Oryza sativa
  Clone ID: PAT_MRT4530_12508C.1.pep
MARIKPKQLLIQSKTKKAPTRISYSTIVTWNLIVILVALSLYATYRHWHHSFTCFLTSFTDEIPHRPMLETEMDLPRAEHVGRSEDSTKTSRPSYAVIDTAKGSITIEIYKDASADVVDRFVSLCKSNHFKGMPFRHVIKNFVIQGGDFDFNGAAQEWILKAKASGENALSPKHEAFMIGTTKNPNNKGFDLFITTAPIPDLNDKLVVFGQVINGQDIVQEIEEVDTDEHYQPKTPIGILNITLKQQALS

SEQ ID NO: 108236 - protein, 217 aa, Oryza sativa
  Clone ID: PAT_MRT4530_12509C.1.pep
ILKWSLLGSILSNLLLVLGSSLLFGGIVNIGKERPLDKDSSDSSSSEDDATDKSVIGFASAMVWLIGMAVVTAMLSSYVVTTIEEASESMGIPVRFISIIVRPIVGNAAEHAGAIIFAFKNKIDISLGITLGSATQISMLVVPVILIVSWVNAIPMDLDFNLLETGSLAMAVITTAFTLQDDKWHYLKGLNLVFSYIVIAVCFFVMKALPTLKKEDD

SEQ ID NO: 108237 - protein, 210 aa, Oryza sativa
  unsure (1)..(210): unsure at all Xaa locations
  Clone ID: PAT_MRT4530_1250C.1.pep
RASYHSGLRDDDDDIFFATXKKCISLNANLIRSRSFTFVHVSFTFHSCSFTFHSRFVHVRSRFIHVRSRFIHXSLTFRSRXFTFVHDSFTFRSRSFAFVAAASRLGSALAGGGVGVGRVDVGGGGLERERGGGGSHTRDAAAAEAATTTPARRRRYMTAALARGCPRXGDEGEAEIGXKTSTCWWRRRGRXIGNIYTPRSLVTIGENNWE

SEQ ID NO: 108238 - protein, 83 aa, Oryza sativa
  Clone ID: PAT_MRT4530_12510C.1.pep
QHWRWRGNVRRFRDSAGGDWKATTTPQVIAGDPFGIKPASRAAPPLRPTAAATSAVPCRHRLPCCALLPPPPVLHSAAASSDV

SEQ ID NO: 108239 - protein, 75 aa, Oryza sativa
  Clone ID: PAT_MRT4530_12511C.1.pep
MGDNLDEVIDKRLNASEEIQKQKKRVAKAYNQRVKAKLFQAGDLVWKTILPLGTRSRRVREGRSDRHVLAGQITG

SEQ ID NO: 108240 - protein, 47 aa, Oryza sativa
  Clone ID: PAT_MRT4530_12512C.1.pep
HKKVNGALMLMCTLILTRRPIYAHTKTHTVCYIVTDDDMFAALANDG

SEQ ID NO: 108241 - protein, 188 aa, Oryza sativa
  Clone ID: PAT_MRT4530_12513C.1.pep
MIWGKWTAATAAAAATPTTTRLSWPPSTSRPSPFPIPSPPPPPEPSPPTRTTTTTTTITTTIFTILTITTTITMLLLTLVTLPLPLPLPEVSPTGAPPPAPSPPLPRTLLLPPAMPFTTASPPAMPSGHITCSTRTPTPPPSLRHTTTTCALPTTIILETHQVLHPATGSSLLLHRPWHRIFAPTCLP

SEQ ID NO: 108242 - protein, 100 aa, Oryza sativa
  Clone ID: PAT_MRT4530_12514C.1.pep
GSTRAFFFRHLFPSKAEGIPAWLDPVNLPSGNSRCCGFCGEPLQFVLQIYAPIEDNAASFHRTLFMFIVKVFRCQLPRSNAFYSSEPPKHNDSDKPLCPG

SEQ ID NO: 108243 - protein, 97 aa, Oryza sativa
  unsure (1)..(97): unsure at all Xaa locations
  Clone ID: PAT_MRT4530_12515C.1.pep
MGLVHALLPLAXLLLATPPPATADDPGLVVYWGRHKEEGSLRKACDTGHYTTVIITFYNVFGYGRYSLDISGHPLAAVGADIXIKHCQSRGITVLLS

SEQ ID NO: 108244 - protein, 419 aa, Oryza sativa
  Clone ID: PAT_MRT4530_12516C.1.pep
MESNAEKLRGLTITSLDEEDDEPELPHRSPPASGGGGGGGAGYEDDDEEEEEEAEVTLGFLEKPKHPGLLLRHLFPSKAGGIPAWLDPVNLPSGNSRCCGFCGEPLQFVLQIYAPIEDNAASFHRTLFMFMCPSMACLLRDQHDQWKHRQGNPCRSVKVFRCQLPRSNAFYSSEPPKHNDSDKPLCPGAPVCHWCGTWKGDKLCSSCKKARYCSEKHQTLHWRSGHKSDCLQLISSSEASSSIFPAVGKVPASKSWPEYEIAIDYEGAFNSDSCDESNSKSLVMQRPGKPDDMMQSWMDQFEADADNKCWASFQERVSRAPKQVLRYCREENAKPLWALSAGCPSNADIPSCSYCRGPLCYEFQIMPQLLYYFGVKNEPDSLDWATIVVYTCKGSCDQNVSYKEEFAWVQLYPTTTTRS

SEQ ID NO: 108245 - protein, 152 aa, Oryza sativa
  Clone ID: PAT_MRT4530_12517C.1.pep
RLPNFFAAACLRRPPPLPACDLHPPTVVLRRRRPSSSARRRPSSSRRPRAPPRRWPSIQLHRRPLPPPPPAPSPSSTDRLCRRSTAPPPPPPLHRSTTGATVHRAEAPPRARELALHRWHRPPPPAASPSSAEHLHLPVVVHGRTSLSALPS

SEQ ID NO: 108246 - protein, 91 aa, Oryza sativa
  Clone ID: PAT_MRT4530_12518C.1.pep
GNRGGGYGGDSGGDWKELFGGGPSGQLSLTIRGKMFLSSSRVVMVSSGSLQSKSPLSIHPVLGVFRPLCYPELSSLWLWGLNCLLLSIGIK

SEQ ID NO: 108247 - protein, 423 aa, Oryza sativa
  Clone ID: PAT_MRT4530_12519C.1.pep
MDRKRPRPPQPSPPPPVASSAASSSSSSVLDDGDLLREILLRLAHPTFLVRAALVCRRWLRHASDRAFLRRFAVLHPPRLLGFYVDSASLPRPRFVPLPHPPELAAVVRRGSFDLGTAADLHFHLGTGIYCCRNARLLVCHRGGGESTLQLRRPLHPASDGAVISTFRTPPRPLPPNQRHTRYILLPEDGGDGDGDAVACTVVTLVSSEREVFAKVEKILRAGVWDVAQTSAPIELPAHWRRSLSRGFLVNGKLYMLGTTGYILGLELVSMSLFFIEVPDAVRDDCPESFQLSVKLSQAEKSGLYLIHVEGFKIHVWLHGTDGNSSADWNLVNTICLREVFGHLVKPSWESGDSRISLPGSGDNAEFVFLEVDGEVFCMDIISRTVEKVYEMAMKDDFLFEIYPFMMVWPPIFPALIKTHEPE

SEQ ID NO: 108248 - protein, 87 aa, Oryza sativa
  Clone ID: PAT_MRT4530_1251C.1.pep
GSVRGNIHGIAGRGAPLPRHAAPCTWPRARPPDRHRGVLSSRAVTRTAGTGNGWAARHVKVHRFRRPPPSRGTRRWAKQRTVLAGVA

SEQ ID NO: 108249 - protein, 66 aa, Oryza sativa
  Clone ID: PAT_MRT4530_12520C.1.pep
NVLSFPLPSSSVGTWHRSFNISSCQLSHFAVPFIRTRCSILPSQRFKLSYYFVTRPVIVFFSLLKT

SEQ ID NO: 108250 - protein, 69 aa, Oryza sativa
  Clone ID: PAT_MRT4530_12521C.1.pep
RVFSLPLLVHCPGTPFFPFRLGPVLPPGLPFWGPLVLNFVGPLAPPRRFPFSRGVFLPNSIVAPPEPPF

SEQ ID NO: 108251 - protein, 49 aa, Oryza sativa
  Clone ID: PAT_MRT4530_12522C.1.pep
YATPPRGISLFRGCNRSLFGGRVLTLCAFSSTRVSRIPFWDVWSAYSLR

SEQ ID NO: 108252 - protein, 1322 aa, Oryza sativa
  Clone ID: PAT_MRT4530_12523C.1.pep
MAEVVIGPLVSMVKEKVSSYLLDQYKVMEGMEQQREILERKLPAILDVIEDAEEKGAFRPGVSAWLRALKKVAYEANDVFDEFKYEALRRDARKKGQFNMLGMDVVSLFPSYNPIMFRNKMGKKLQKIVGSIEVLVSEMNSFGFIHRQQAPPSNQWRQTDSIMADSEKDIIRRSRDEEKKKIVKILHNHASSNRDLLVLPIVGMAGLGKTTFVQLIYNEPEIKNHFELWRWCCVSDDFDVGNIANSICNSTEKDHEKALQDLQEAISGKRYLIVLDDVWNREADKWEKLKTCLKLGGKGSAILTTTRDSQVARIMITGVVEAYNLEKLGEEYTKEIIQTRAFSLAGSDELSEIVQKFVDRCQGSPLAAKAFGSMLSTKTSILEWKNIIAKSDICNEKTGILPILKLSYADLPSHMKQCFAFCAIFPKNYEINVENLIQLWMAHDFIPLEEKYHFETTSGEEIFKELAWRSFFQDVKQTPLVCSNNGDRVQLRYTTTCKIHDLMHDIALYVMGKECVTITDRSYRKELLSNRSTYHLLVSRHRTGDHFDDFLRKQSTTLRTLLYPTWNTYGSIHHLSKCISLRGLQLYEIKELPIRPIKLKHLRYLNLSENCDIKELPEDISILYHLQTLNVSHCIRLRRLPKDMKYMTSLRHLYTNGCKNLEYMPPDLGHLTSLQTLTYFVVGAISGCSTVRELQNLNLCGELELCGLENVSEAQASTVNIENKVKLTHLSLEWSNDHLVDEPDRQKKVLDALKPHDGLLMLRIAFYKGNGFPTWMTDLSVLQNLAELYLVGCSMCEEFPQFCHLNVLKVLCLTSLDNLASLCSYTTSNFFPALRELQLHRLERLERWSATEGEEVTFPLLESASIMNCPMLKSLPKAPKLRILKLVEEKAELSLLILRSRFSSLSKLTLSVSDGNAGLELDQNYEAPLSEMELCGCAFFFPLGPSRPTVGIWKWFGQLVDLKIESCDVLVYWPEEEFICLVSLKNLAIEKCNNLIGHRHVSGESTRVPSDQLLPYLTSLSIRQCKSLEEIFRLPPSLTSISIHDCRNLQLMWREDKTESESVIQVERRSEHCNDLASTIVPDQQSPSLRNNSLPCLESLTIGRCHRLVTLNHLPPTVKSLGIGQCDNLHSVQLDALNHSLKKLLIFGCEKLCSVSGQLDALKRLIIDHCNKLESLDCLGDLPSLRILRLEGCRRLQSVAGCHGRYPLLQDITIKYCPAINVKPLYERLGQRIDSLEIRELSDVHSRNPEEGERRQKDCRNILDEIKVIYRQENNKNTKTKKSIKEVGKPRVFDQYLEELGWPPYQPLWDFFGRYAYSVPTE

SEQ ID NO: 108253 - protein, 101 aa, Oryza sativa
  Clone ID: PAT_MRT4530_12524C.1.pep
VSSVLQSKVYNVHLARCRILLLACLIFALPITANFKFAPVSSKDFLLKRNLNKQENTKNDCVLSCTEKLWYLYIFCHVQFQPKNNKTLKISLFIYIYCRLR

SEQ ID NO: 108254 - protein, 163 aa, Oryza sativa
  unsure (1)..(163): unsure at all Xaa locations
  Clone ID: PAT_MRT4530_12525C.1.pep
MAYSSRMGETADANLEGLRAALETLVQMMPIENYALIMLLSGIPHRRREPAQSASRSHTRIGKVEELYYTLWVAALHLSQTKKXCLNRLAVLKLNGGLGTTXMDCTRPNIVIEGRNGCTVIYLIVIQIEYVIKRDGRTGPLLLMNSFITHDDAHKIEDDVLQL

SEQ ID NO: 108255 - protein, 158 aa, Oryza sativa
  Clone ID: PAT_MRT4530_12526C.1.pep
SSSLSIDHLVLAHHLSLARQLGIRSLEPRLGDSMDMSESSEKGMESNASSGPGNGIPVEWQSQFSSAFACQPSVAAQHQQHAMMDSFAAASAGLWASSDVVSAMSSAAPPRGAGFLAPVPGFLQQGLGHFPVDSGFIERAARSTCFGGGMMAGGPYRA

SEQ ID NO: 108256 - protein, 207 aa, Oryza sativa
  Clone ID: PAT_MRT4530_12527C.1.pep
MEAGEHTSRRRRRQAGGEVVDAQQRRHNRPAVHAAAKASRLVKTWMPMNGDVTIKPYRQKHQSAAMRQPPMASLMVLQHDVVIGGSRRISLKEDHADTDMKVSRRRRLISTIMHKPADLAYMYGSDDEDDSEVAAAEWVRSKKVVPCPWVRSSGKEERFDFDITKAGGKITFDDLKKPMKVDGNPFPVNMVHTSRRTADGGKNRTFR

SEQ ID NO: 108257 - protein, 90 aa, Oryza sativa
  Clone ID: PAT_MRT4530_12528C.1.pep
GVYMDQITLLAMIHAQLIVFNRVAFEVLDTCDLVPGLWISIHFLKDDSEARIHDNIEIGCPEGCLFCNGFFILLIDLMQREHLLEGEKEA

SEQ ID NO: 108258 - protein, 142 aa, Oryza sativa
  Clone ID: PAT_MRT4530_12529C.1.pep
MGIHEHVEGIKAHWAKNFSFLDYFKKVYGRDKPLPKWTDADVDEFIASDPVYGPQLKAMRESRKFALGGALVGGAHLGGIALKYSKAPHGVVLATGFGAICGAVVGSEVAEHWYQLYKTDKQGANLRFIYWWEDKVAGNQKS

SEQ ID NO: 108259 - protein, 54 aa, Oryza sativa
  Clone ID: PAT_MRT4530_1252C.1.pep
VITLVTRWLCTWTILHKPGLRNTIALVSRRLDQVAQSFLTRSMDGSLVYGLIAT

SEQ ID NO: 108260 - protein, 125 aa, Oryza sativa
  Clone ID: PAT_MRT4530_12530C.1.pep
MSSVMGWDCPNATATLPFAAPPAHDMGSSCAVGTAPQAIMAPLVCPRNGTAVLAAIAVAAVLLRALRHQPHTDSPARPVAYRCLSPLSHRLSTILRIHGRGVEEGTPLDFSHFGPFEKLISQIDP

SEQ ID NO: 108261 - protein, 80 aa, Oryza sativa
  Clone ID: PAT_MRT4530_12531C.1.pep
PAGPGGARSRARATSSRPRRRPMASAPAPPPRARAAPATMRRRRTRTARRGRERARSAASPPPNAMPIDAAGRARARASP

SEQ ID NO: 108262 - protein, 138 aa, Oryza sativa
  Clone ID: PAT_MRT4530_12532C.1.pep
MLYGRTPFRGRSRRETFHRVLAARPDMPGEPTPLRDLIGLLLEKDPGRRLGAHGVKRHAFFRGVDWDRVLHVARPPFIPTPDDDDAGAAAEALDVEKVLHEAFAASTAAAAGETAAVETAAPEAGSDRGRDEDFSVFF

SEQ ID NO: 108263 - protein, 84 aa, Oryza sativa
  Clone ID: PAT_MRT4530_12533C.1.pep
GQKRGVYSTIYTKKMGGFFIIITHKTPWGSIKRTFCFTKTPMRPTKKGRLQSIPGNLFRTKGRERGGPLSLHKRGLKLPKAAMF

SEQ ID NO: 108264 - protein, 355 aa, Oryza sativa
  unsure (1)..(355): unsure at all Xaa locations
  Clone ID: PAT_MRT4530_12534C.1.pep
MAEERESFESQWAPSDVTEEDLKEMVAHGVLPAKEIIGWRPACGEAFPTPDTHEVVVFSHFFYGGFSLPTSRFFRGILEFYGISLHHLNPNSIVHIANFIHACEAFLGIRPHFALFRHIFFLKPQPNKSKPCIVGGAGFQLRGTLSQKYFSMPSKTSNKGWHANWFYVQNPEPALPEYTCLPPEFSLMKSDPPIAQHRSPCRQAGQASGRPKIRSDAQPNTSKPTNQSDSRKRKLVLSDDEGDDVEKAGSKGVTGKQPRQANPKKKTSSRPIPKIRKSSRKPYDIDPSGKDSEPTGAETSPTTETGPTAKDRLSSNQPATDNVQASNEPXTGNQSAEAEIANQISSSIRRLGQQN

SEQ ID NO: 108265 - protein, 371 aa, Oryza sativa
  unsure (1)..(371): unsure at all Xaa locations
  Clone ID: PAT_MRT4530_12535C.1.pep
MAEERESFESQWAPSDVTEEDLKEMVAHGVLPAKEIIGWRPACGEAFPTPDTHEVVVFSHFFYGGFSLPTSRFFRGILEFYGISLHHLNPNSIVHIANFIHACEAFLGIRPHFALFRHIFFLKPQPNKSKPCIVGGAGFQLRGTLSQKYFSMPSKTSNKGWHANWFYVQNPEPALPEYTCLPPEFSLMKSDPPIAQHRSPCRQAGQASGRPKIRSDAQPNTSKPTNQSDSRKRKLVLSDDEGDDVEKAGSKGVTGKQPRQANPKKKTSSRPIPKIRKSSRKPYDIDPSGKDSEPTGAETSPTTETGPTAKDRLSSNQPATDNVQASNEPXTGNQSAEAEVSTDQEPPTRNQSGTERNEDIPEAEAQASSPP

SEQ ID NO: 108266 - protein, 172 aa, Oryza sativa
  Clone ID: PAT_MRT4530_12536C.1.pep
MARKVGFVLVLLAAATLAMEAGTAAAQSSPQDFLDAHNAARRGEGVDLPDVAWNATLEAFAESVVASAAAGGACDLRHTSGSGYGENLYWGPAGKAWSAADAVGLWMEEKASYVYSSNTCTKGALLDCGHYTQIVWRSTTSIGCGRAVCNNGDVLISCNYFPPGNVPNERPY

SEQ ID NO: 108267 - protein, 91 aa, Oryza sativa
  Clone ID: PAT_MRT4530_12537C.1.pep
MLSSSSSLLPWQSRARGLADLAPATVCLLLHLAGEERKGRVEMNTLPDLLVVGPPCHEQFDHLPASDVAKGVAAEASGGAANSSKGEGDEV

SEQ ID NO: 108268 - protein, 602 aa, Oryza sativa
  Clone ID: PAT_MRT4530_12538C.1.pep
MPFKTSKKGWHANWFYVQNPEPALPEYSCLPPVYQDTWNSLPMGDEAAQALSLMDRMLKLKEQGLQGEQITRHFIKSRLAPIKERSRTAFEFDGKHDPNREDPESLEFKIMKERMYKILSNAIVVNYSHLLPVVPYNAFNPPPPAGQASGGPKIRSDAQPNTSKPTNQSDSHKRKLVLSDDEGDNVEKAGNKGVTGKQPRQANPKKKTSSRPIPKIRKSSRKPSDIDPSGKDSEPTGAETGPATETGPTAEDRPSSNQPATDNVEASNEPPTGNQSAEAEVGADQEPPTGNQSGPMIGDEEEVLRIRSAEDSCPPILVKWWDDEMRLQGIVINKQKEDEKVSLLTKTLNQATRLRIHLRNEAKTATLEKLVPHLGTLETTIAQLREAKELARKTEHDLRDRIAELQDSNFELSGSSKVQAAKISELEKRIKALEKDKGELTKQRDSARKDVEDSKIKSQAQFDVLVNKIKKLEGARDEVANAATPLIKAMFFNNNGPSSFDAVEIFDKLRAALDTYFKNIKEAGSMGASMALAMTKSLYPKIDIDAVDGFADGTSEEDTLDLINDAQKAADKIAADVVERFQDNNLRPTGSDNSDDEKTESD

SEQ ID NO: 108269 - protein, 125 aa, Oryza sativa
  Clone ID: PAT_MRT4530_12539C.1.pep
LSWPFAVWGLDMVGPFKKAIGGYTHLFVAVDKFSKWIEAKPVITITTDKAGDFFINIVHWFGVPNRIITDNGTQFTGGVFKHFCEDFGIKIYYASIVHPMSNGQVERTNGMVLQGIKARVFDRLH

SEQ ID NO: 108270 - protein, 162 aa, Oryza sativa
  Clone ID: PAT_MRT4530_1253C.1.pep
EAGALLGGDLRPDLLPEKEEEEDSSELSLAGASCASIHVAGGCSGCCAARPHQAREAPAAADPQLPRPAAVETDAGTASGEGGGSRRGERRPAAAETEAGGLIRVAMFIKNRNRNQGPSQFGLLQETFIDRSRCEPAEPDGFQEKPLNRGLPAHTSWATERH

SEQ ID NO: 108271 - protein, 132 aa, Oryza sativa
  unsure (1)..(132): unsure at all Xaa locations
  Clone ID: PAT_MRT4530_12540C.1.pep
MNTNFTIYPSHIDYDASLSRKCNGVGIMIVYTMTLYHDDDIRVVFGNLSVVFRLLDVIIWGYMLRKRSGSLMVTAXYGYSSARVYSPKLLSWGGYSSVFSPGWMVMTDCRKKLGNQGWLLETPGGHWKEGIR

SEQ ID NO: 108272 - protein, 247 aa, Oryza sativa
  unsure (1)..(247): unsure at all Xaa locations
  Clone ID: PAT_MRT4530_12541C.1.pep
MTEWHWKVYNNKSEGYDGPEKKKRKVSCTRASVQDMGAKSWRKGGDPRPHQFHGVRRRGTERRQFRERCLQVKGEPHRWALPVGDTKEGGTGDRRIRLAAHTGTXAIRFYDQPRKVVDWLMCNAKAAIDELPDRXAEAPPPPDVASTEQPEATEQATSTSYGFGNTGSAMTSSASAAGSFLPHSLGADRVSDNVKSLFPSSSTASGAASAGHDECRGSPPDLLSRTTSNQQLQELCLTLLVETRFRQ

SEQ ID NO: 108273 - protein, 89 aa, Oryza sativa
  unsure (1)..(89): unsure at all Xaa locations
  Clone ID: PAT_MRT4530_12542C.1.pep
MAWRRRRTTAGNDKRRRGRXARTARKVAASAECDGAHAEGGGAHGREERKKERGSLTEAMTAIGAGRDERRXAVRRTVDKVRHNLGKAM

SEQ ID NO: 108274 - protein, 290 aa, Oryza sativa
  unsure (1)..(290): unsure at all Xaa locations
  Clone ID: PAT_MRT4530_12543C.1.pep
MEDSRSRTIPSYHSLGMESLTTYLLKIKLGEGSEXASVEYDWFMXSKVVDSNAMFCKDFVGHIMKLYPWRXNETVIVGYVHMVHXSSHHVTTNXTXDMMEMIEKFVDTKVIPLIIRLHGINENVDEXINHTLVKVSVEVLDTPLLRTSSQVNFSQPSSSTXPSHALVPSNTYLENPYPMAKHVGVDEQGMYLDDGDEVAACCHAEKTRLQGVVSEESKYESXMDVHEDKSQDGLEDESQDDCVDESMVSDGIPXHLPTATYDKNDLPMIVENIYPKMNEFRLKIVQHAMK

SEQ ID NO: 108275 - protein, 205 aa, Oryza sativa
  Clone ID: PAT_MRT4530_12544C.1.pep
MELFVSTVASARATAPLCFASSFHHRRAAPPAVAAAATLRRSNRHLPTRGWRCASAAAPDPVPSEEPASASASTVVVTEDKPDPPPAEEKSEEVAAVSNGGSLETVAAAPVSSGAAEEDGGLDDILSKLDIQVTPTLVLYGSGALVVLWVLSSVVSAIDSIPLVPKVLELIGTGYSIWFTSRYLLFKESRDKLFAKFEDLKERII

SEQ ID NO: 108276 - protein, 252 aa, Oryza sativa
  Clone ID: PAT_MRT4530_12545C.1.pep
MDVLLLPPLPAPETTAPAGRDWSELPADVLSVVFAKVGAVEVLAGAGLACRSWLDAARVPELWRAVDMLRGAVRCLHLGQDRDLMCAMAKVAVDRSGGRLEVFKGEDFVSDELLEYIGDRSPSLKVISVWCSDETRMSTEGFAELTRKCPLLEEIVLSSGGHRRPPLPRLALAVAELRHLRRLTVQGIGVSNDELTAIVDGCPRLELLDVCSCWDLCVDDDAQLLAKCARIRTLKLPPSEEDDYYDYYYYYN

SEQ ID NO: 108277 - protein, 131 aa, Oryza sativa
  Clone ID: PAT_MRT4530_12546C.1.pep
YIRCPPNSPKWKNIQGTLPKNILTTNQREQNRTGEHLQPSKYLQSLVCVLLTPESSVWCIHFAGYPTRYNSSNSLARCAYPRKQLQASISGAFNSFQLGQVGRRADNQITGKQSRWKKETPGLFLALAHSV

SEQ ID NO: 108278 - protein, 61 aa, Oryza sativa
  Clone ID: PAT_MRT4530_12547C.1.pep
MAPPPPSQSDAATLPCRPRRRLAVTAKKPPSTSSATSRRRPTKKLSWELYAFHGCRIKEAD

SEQ ID NO: 108279 - protein, 87 aa, Oryza sativa
  Clone ID: PAT_MRT4530_12548C.1.pep
MGRGPSSSLGPPQSPMPRSSSTRFLRRILRALNSPELPLGHAARLAKKAECRAIFVFGAEERSLHNIRDLVDAARHTLGLLHRGRLP

SEQ ID NO: 108280 - protein, 69 aa, Oryza sativa
  Clone ID: PAT_MRT4530_12549C.1.pep
MVRVMQNHCNMKRCNDIMDMPTRRGLSELLEGESEMHCDRLVHRTELNEILQIVGYTIPLGRKLYNFQK

SEQ ID NO: 108281 - protein, 81 aa, Oryza sativa
  unsure (1)..(81): unsure at all Xaa locations
  Clone ID: PAT_MRT4530_1254C.1.pep
SSLHACRSTLEDPPGKQPPPPLTLPLHRYPIASLDSDGGEEGRHGMVSGIATRAEPFSMMRVTVSLLPQSPPPSRXGLSAP

SEQ ID NO: 108282 - protein, 94 aa, Oryza sativa
  Clone ID: PAT_MRT4530_12550C.1.pep
SYIVRGGREKGGISTNSPAHYLQGGRKTPSQEPLVPAIGRSLQNKSHQLKTEAPHLGFVTQKKPEHKEIFKANGPPRGAHERREDPPTGGTQKF

SEQ ID NO: 108283 - protein, 124 aa, Oryza sativa
  unsure (1)..(124): unsure at all Xaa locations
  Clone ID: PAT_MRT4530_12551C.1.pep
PHRPCQPLPPATPPPSPESGGYSRQPPSPRQSPPPLLTPPPPPPAGTVVGSPPSLPLDLAEGRVQPPLPPSPEAARPPIPPPPXPPLPPSPEAAALPPLHAASHLHTPKLLSGRTGTEGRSGEE

SEQ ID NO: 108284 - protein, 91 aa, Oryza sativa
  Clone ID: PAT_MRT4530_12552C.1.pep
MEDTPIKNSMPIVEMHEVPAEAEPTVEDMQEALFQKQKEEQLQLQLFQQEEELEDQQPQVVRSLSFNLMHSFLDDHPILMLHLTINWLLGV

SEQ ID NO: 108285 - protein, 77 aa, Oryza sativa
  unsure (1)..(77): unsure at all Xaa locations
  Clone ID: PAT_MRT4530_12553C.1.pep
VIAAHAQRLSLNSPEVGLIDPFIHDELXLNKQKPTQSYMESALLSRLLMHAEWEEVAARAVXLTHEHTSLYEELKHL

SEQ ID NO: 108286 - protein, 88 aa, Oryza sativa
  Clone ID: PAT_MRT4530_12554C.1.pep
SKGVSKEVSEGVGTGSGTTGLSEGLGQTRGMGVTSMHIVKVGFTDSSHSGSQCQSELVHSMHIERKLIRISRTINVGRKSVDSPRRNN

SEQ ID NO: 108287 - protein, 128 aa, Oryza sativa
  Clone ID: PAT_MRT4530_12555C.1.pep
MGGGVTERLPEGSSEPLLPTKREGGGGGEFAGAVFNLSTTIVGAGIMALPATMKVLGLAPGLVAILLAALLTDASIELLVRSSRAAGAPSYGAVMGDAFGWWGRRLLQVCVVVNNIGVMIVYMIIIGD

SEQ ID NO: 108288 - protein, 96 aa, Oryza sativa
  unsure (1)..(96): unsure at all Xaa locations
  Clone ID: PAT_MRT4530_12556C.1.pep
XIXPIFFSSDKLINAPLAAPGKHLNLPLLRAVLPTQTLPRFLPTPNPIXXAEAAGARAHQVFDGRPXRVGGEDXRGEAGRAAXDGAXRQDHXXAXE

SEQ ID NO: 108289 - protein, 411 aa, Oryza sativa
  Clone ID: PAT_MRT4530_12557C.1.pep
MDAAKDTTAAAADQNPTPNPPTAAAPPDDSAAAAAAGRRPFTSLTQEEADLALARVLQEQERAYMMLSAHHGGDYAASDGGSYEFDEEGEGSDFEGEDGDGDGDGEALDEDEEVADADADAAGDPAELDPARYEDDEAFARALQDAEEREVAGRLMALAGLSDWRVMDHDDDDVDDDDDENDDDDDDDEDEDGDDPQDAWEDVDPDEYSYEELVALGEVVGTESRGLSADTLASLPSITYRAQDKHPLNMARSASCPPFLSSFLLMISAPSVGIAFAPKPPPAAAVGSYRARKVRCAVAVAPAPAPAGTLYDVLGLRAGATVREIKAAYRRLARERHPDVAASAGADDFVRLHDAYATLSDPDSRARYDRDVVAVASMARGAHHRTMAAPAAAPRWYGRRPRRTWETDQCW

SEQ ID NO: 108290 - protein, 118 aa, Oryza sativa
  Clone ID: PAT_MRT4530_12558C.1.pep
KNQRKGLYGDRGPQKSRQKFLSRDGGKGLSGPQQAQGLQRGLVHNKNSQEGKHQFKNPPGGRFGRPGPPPPKLKKRGGLIFNGGGKDPVGRGPLGGGAPNPQGKKCKTREKPNFAPKG

SEQ ID NO: 108291 - protein, 84 aa, Oryza sativa
  Clone ID: PAT_MRT4530_12559C.1.pep
HLPSYFIVLQLGEKFMRENGFNHVSFLAGDGALESYPAVRLHFSNNLLRFLCNLNFLSFLYFFVYLVDILMAQFCSSIIVIFRS

SEQ ID NO: 108292 - protein, 44 aa, Oryza sativa
  Clone ID: PAT_MRT4530_1255C.1.pep
NSIHSQILIQCETLTVERVIHDHAGHCHMNHDIQCPTTPSSAPN

SEQ ID NO: 108293 - protein, 64 aa, Oryza sativa
  Clone ID: PAT_MRT4530_12560C.1.pep
ALKPKKPPALFQKWGNPFFKKPPPQNSCPGNPGGFSFSKPVVNKKSAFPCPMEKRGPKLVFSLP

SEQ ID NO: 108294 - protein, 150 aa, Oryza sativa
  Clone ID: PAT_MRT4530_12561C.1.pep
MGMGTQTAAPRPMFFAAHVGVLSTVKISPCPSTIRPNRSRACRVRVAESLSPSIASGDPNAPEKLFYFEPSVWVNFFINHNPRPLQRSDEWMRHKADKLKENVRKLIWTSNDVVAKMNLVDAIQRLGIGHLFEDEISCILSDIHKSEFTS

SEQ ID NO: 108295 - protein, 771 aa, Oryza sativa
  unsure (1)..(771): unsure at all Xaa locations
  Clone ID: PAT_MRT4530_12562C.1.pep
MHKNLCLARRAMSPLSDLAKPEERRAGVLIDXISLIXRRMSLSTEIAMQDLMDGGKLGPEKVLHGXPEGGRINFVTWSLDGRHLSFSVRVDEEDNTSGKLRLWIADVESGEARPLFKSPEIYLNAIFDSFVWVNNSTLLVCTIPLSRGAPPQKPSVPSGPKIQSNETSNVVQVRTFQDLLKDXYDAALFNHXASPQLVLVSVCGTGKPISPPAVYTSIDPSPDDKYLMISSIHRPYSYIVPCGRFPKKVEFEGFSSMQRSLLFVLEPELVLLAASGKESLHYGVFDWIFAEGCHSSDGKALLMMDIAPXDFTQLFSVGIXNQLNLKIFSPNNGSVVCPSIYKLVPTRTIDDGSTXLNLLVSFMLASVCSVLLFDSNIINNGSYHIDNTYILLNGMGATPEGNVPFLDLFDINTGSKERIWQSDKEKYYETVVALMSDKTDGELPLEKLKILTSKESKTENTQYYLQIWPEKKQVQITDFPHPYPQLASLYKEMIRYQRKDGVQLTATLYLPPGYDPSQDGPLPCLVWSYPGPTIPIIGEGDEEANDRYVEQLVTSAEAAAEEVVRRGVAHPDKIAVGGHSYGAFMTANLLAHAPHLFCCGIARSGAYNRTLTPFGFQNEDRTLWEATNTYVEMSPFMSANKIKKPILLIHGEQDNNSGTLTMQSDRFFNALKGHGALSRLVILPFESHGYSARESIMHVLWETDRWLQKYCLSGSSKTDSDSVADTENKTVSASGGGAPCEGPEAEGFSSMQRSLLWIAIEDGKMSFHDIS

SEQ ID NO: 108296 - protein, 308 aa, Oryza sativa
  unsure (1)..(308): unsure at all Xaa locations
  Clone ID: PAT_MRT4530_12563C.1.pep
FRKDGVQLTATLYLPPGYDPSQDGPLPCLDWSYPGEFKSKDAAGQVRGSPNEFPGIGATSPLLWLARGLAILSGSTIPIIGEGDEEANDRYVEQLVTSAEAAVEEVVRRGIELYFHCSXVAHPDKIAVGGHSYGAFMTANLLAHAPHLFCCGIARSGAYNRTLTPFGFQNEDRTLWEATNTYVEMSPFMSAXKIKKPILLIHGEQDNNSGTLTMQSDRFFNALKGHGALSRLVILPFESHGYSARESIMHVLWETDRWLQKYCLSGSSKTDSDSVADTENKTVSASGGGAPCEGPEAEGFSSMQRSLL

SEQ ID NO: 108297 - protein, 58 aa, Oryza sativa
  unsure (1)..(58): unsure at all Xaa locations
  Clone ID: PAT_MRT4530_12564C.1.pep
IYMNKFHKTTCILIKLXQTIDLXQYLLENYKFRAKYKTIDLILELSQNYRFYSLNLCH

SEQ ID NO: 108298 - protein, 435 aa, Oryza sativa
  Clone ID: PAT_MRT4530_12565C.1.pep
MAAAATAAVPLDEAKAKEVLRQVEFYFSDSNLPRDNFLRKTVEESEDGLVSLALICSFSRMKKHLGLDLDVKQETMPEETVLAVAEVLRRSSALRVTEDGKKVGRSIELSKLDEIMEQVDSRTIAASPFPYNVKLEDVQSFFAQYGKVNSVRLPRHIADKRHFCGTALVEFSEEEEANAVLKNTLVFAEADLEIKPKKEFDTEREAKKEAYEKSQPTKNGHDEGYPKGLIVAFKLKIIQIDGGMAENGGDKEGETDDANKSRTGHDEKIPENSDIKEDLSDDVEKSKEAAAQSVKKGESPSENADDPISREDFKEEFGKFGTVRYVDFSIGEDSGYIRFEDSKAAEKARALAAISDEGGLIMKGHLVTLEPVSGQAEKDYWSAIKGGQGKYRDNRSNRGRDWKNNRGGRHFGGKRGRHSDGHERANKARKVDAAA

SEQ ID NO: 108299 - protein, 185 aa, Oryza sativa
  unsure (1)..(185): unsure at all Xaa locations
  Clone ID: PAT_MRT4530_12566C.1.pep
MQILVMQRATANRRQDGGEGRCWVGRWRRGGRGGMRATATAVALIWPRDGLERGGAAVGGASAIGGASTAVSVGEKGGDHRWRGAGGQRVDGMGALCGEVGVWRRKIGDSRRSGGAAGGGAAVGRGAAVGXKGREGWMRERRGWLAAEXGWWHRDVRSKRGGVEGNKXNFLPGDYACARSPSHRV

SEQ ID NO: 108300 - protein, 90 aa, Oryza sativa
  unsure (1)..(90): unsure at all Xaa locations
  Clone ID: PAT_MRT4530_12567C.1.pep
LVDPPGCTNSAPRQSPNHTPRSCHRKEKKYNSNSRTRRQCDGAHQRRRRRGGSLAVLLLLLLLAALLLSLSLLARVTXPPRFSSPNLYWN

SEQ ID NO: 108301 - protein, 58 aa, Oryza sativa
  Clone ID: PAT_MRT4530_12568C.1.pep
FRQPLRHIYTTEPKLSWLSRYTVVEVAKLARVRLYKMRLWVSEGRNREEAEEVFVITR

SEQ ID NO: 108302 - protein, 289 aa, Oryza sativa
  Clone ID: PAT_MRT4530_12569C.1.pep
MAMASSLIRALDCTATPGTRGAPAPVAPRRRVARVRLAPRCQWRPLTARAQAAATQPDPEHQAPANGGPSAFPTTALKVGAGVALALALGGASWRARGGSAGPVLMQPAAVCSLNVVTDSASRATAERSAAAAATMRTSVDALSDSLFRREDAPRDRATLMDLVFEQVTKEQIGDRGKLTSLLQKEWSASRDSERKLDLGLLLTDVLINQREWQRAKEVCQQLTGRYQRDSRPYLHLAVINMMMAVETMLSPETANSDDIEKMSKNAMDAWKEFKTKYEHAKGSTDSST

SEQ ID NO: 108303 - protein, 115 aa, Oryza sativa
  Clone ID: PAT_MRT4530_1256C.1.pep
PLKIWELDPQHLKWRGNPGGFPLSLQNKSPGGGAQNPPNSLKGKGVWGTWAPRDWLNLTPDGGPPGPRFFKNKRGLRAIPPKNRGDTGGKGDPNFGLTSWGRMNLGAKTILGGGG

SEQ ID NO: 108304 - protein, 379 aa, Oryza sativa
  Clone ID: PAT_MRT4530_12570C.1.pep
MDEKPPASPSSVSPGSVKEKIQQLGLSDVNEGNIVTITPDKLTPDQKKDFEAMMQQAGNQFLSSFMQTRKGTVVQKYKVKVVADVPGTGSSKDGEVKQAPDGSAQPSNKGATDDSQGNQGDNSQGAQGVQGDGAQGVKGEGPNQDGNAAQLQFNNFQDQVDYAVHHALINQSRILINTLANMVKSMVDGSMAEYQATGPVYLPGGVFSNYRPLVINNQPVVQSIPLNAPSAQPTAPSPAPTPAAPLSALGQLVNPRLLVREQPQHSGQNVNRLTQDQVASMFLPPQHAIDPTQQQPIQQTPPRQQVVQPIQQTSPVQQVVQPIQQTPQRRQVLQPVQQTPLRQQVVQPIQQQGSMNASAGFAIPGCRARKNTFSRTLVY

SEQ ID NO: 108305 - protein, 130 aa, Oryza sativa
  Clone ID: PAT_MRT4530_12571C.1.pep
MFLPPQHAIDLTQQQPIQQTPPRQQVVQPIQQTPPVQQVVQPIQQTLPVQQVVEPIQQTPQRRQVLQPIQQMPLKQLVVQQGGNLNYQYQPPSPQVQYQQAGSAQPQFVPQYNQFEPVPQQSQGTPQQRP

SEQ ID NO: 108306 - protein, 101 aa, Oryza sativa
  unsure (1)..(101): unsure at all Xaa locations
  Clone ID: PAT_MRT4530_12572C.1.pep
ESKKERKEKKKENRVSSRLVFVSSRADSRNPRGLDSGDGANXQXEXXXEXXEVRRPKLXYLEFVQXAXXXATVYLAGLFALSKDHXXPLXPXRXRVESXVK

SEQ ID NO: 108307 - protein, 148 aa, Oryza sativa
  unsure (1)..(148): unsure at all Xaa locations
  Clone ID: PAT_MRT4530_12573C.1.pep
MHHRLSRWHHYQLLPPQHTIDPTQQQPIQQTPPRQQVVQPIQQTPPVQQVVQPIQQTPQRRQVLQPIQXMPLRQQVVQPVQQQGLVNASAGFAIPGGQQGGNLNYKYQPPSPQVQXQQAGSAQPQFVPQYNQFEPMSQQSQGTPQQQP

SEQ ID NO: 108308 - protein, 135 aa, Oryza sativa
  Clone ID: PAT_MRT4530_12574C.1.pep
MAGKKEEEEAVVYRGDKLILRGLRFHGTHGVKPEEKKLGQKFVIDVDAWMDLAAAGDSDDISDTVSYTEIYRIAKNVVEGPSHNLLESVAQSIANSTLLKFPQISAVRVKVEKPHVAVQGVLDYLGVEIFRQRKA

SEQ ID NO: 108309 - protein, 63 aa, Oryza sativa
  Clone ID: PAT_MRT4530_12575C.1.pep
NTSTLAYLPVLGYSRLVQAGKHNVVQRLLCIYNKIDNLLVQLISTPLLTNHRVCPHFNNKCCS

SEQ ID NO: 108310 - protein, 146 aa, Oryza sativa
  Clone ID: PAT_MRT4530_12576C.1.pep
MPRGGFSGSISSPRIDVAIDMGNPFLNRTVDGFLKIGAVGACKVAAEDTFDCLHRGDVSKHKLEHMLKKMCKEGAYWGTVAGVYVGMEYGVERIRGRHDWKNAMIGGALSGALISAASNNHKDKIIKDAITGGAVATAVEFINYLT

SEQ ID NO: 108311 - protein, 147 aa, Oryza sativa
  unsure (1)..(147): unsure at all Xaa locations
  Clone ID: PAT_MRT4530_12577C.1.pep
MGESLTQCRVLAAKTPFLGHPRPPNAPLRDIAAXPATGRITMXSKELWYGXPDRVXXLGPFSAQTPSYLKGXFPGRLRGGTRRGLSAEXGSLSXRNRALXSLSXARXWASSAPLGXIPPGSSPKNWVRXLRNPLVQRPGAPNFPPGL

SEQ ID NO: 108312 - protein, 716 aa, Oryza sativa
  Clone ID: PAT_MRT4530_12578C.1.pep
MGKFRKLGRHAAHRVSMLRTMVSQLVKHERIETTVAKAKEVRTKADQMVQLGKEGTLDAARRASAFVRGDNVVHKLFTELAYRYKDRAGGYTRLLRTRIRVGDAAPMAYIETNFNQETVMMTDEIQLAMSSYTGLSTGRMNFERQNLQHHSHLSGSLLIHGPSHSPANNGQVLKSARTPEQKAYDKPERSLALFYVVERVQQGSGGINSIGFAVIRKGSLKLRCYAIGGLGGGENLNDPLKESNNGPVLQGFNGSSASFRTVGAKITQETGDFFVSDAEGDPDKPTDGFSSIDEAIGALHEGKFVIAVDDESGDNEGDLVMAATLADPESIAFMIRNGSGIISVGMKEEDLTRLMIPMMSPIAEIEDISAAASTVTVDARVGISTGVSAADRAKTIFTLASPDSKPTDLRRPGHIFPLKYRNGGVLKRAGHTEASVDLVALAGLRPVSVLSTVINPVDGSMAGMPVLKQMALEHDIPIVSIADLIRYRRKREKLVELIAVSRLPTKWGLFRAYCYQSKLDGTEHIAVAKGDIGDGEDVLVRVHSECLTGDILGILKINSNLCASCIPDKVPDIRMQKPSHQSPPPAPGAPPAAAAAAIAAFFSAAAFLRRLAPRNGAMLSRESGIGAQILRDMGVRTMRLMTNNPAKFVGLKGYGLAVVGRVPVISPITKENQRYLETKRTKMGHVYGSDLPGNVPEEFLNPDDIAGDQDEDDTHN

SEQ ID NO: 108313 - protein, 97 aa, Oryza sativa
  Clone ID: PAT_MRT4530_12579C.1.pep
IMGKLLFLAFWVFKWLDFWHLVWVFNCSIEKQLFIWADSYRVWAFHPITFCRNPNCAIIHAGMLLSTSPWSKLMDLFDVSVPYNFFGVLTFGPLMIG

SEQ ID NO: 108314 - protein, 254 aa, Oryza sativa
  Clone ID: PAT_MRT4530_1257C.1.pep
MEAGYPGTAANGAAADGNGGAQQAAAAPAIREQDRLMPIANVIRIMRRVLPAHAKISDDAKETIQECVSEYISFITGEANERCQREQRKTITAEDVLWAMSRLGFDDYVEPLGVYLHRYREFEGESRGVGVGVGAARGDHHHGHVGGMLKSRVQGSMVTHHDMQMHAAMYGGGAVPPPPHPPPHHHAFHQLMPPHHGQYAPPYDMYGGEHGMAAYYGGMYAPGSGGDGSGSSGSGGAGTPQTVNFEHQHPFGYK

SEQ ID NO: 108315 - protein, 65 aa, Oryza sativa
  Clone ID: PAT_MRT4530_12580C.1.pep
SLTAKLGLGLKGWFFKSGDPFFLAIHEGSGLSRRNLRSQYGAPPRFGKTKGLFLQGLQGKLIRSL

SEQ ID NO: 108316 - protein, 100 aa, Oryza sativa
  Clone ID: PAT_MRT4530_12581C.1.pep
MAASGGYQLLQPWAQRPRRRLRRAGRLRFVLWQMALNMWYVELAVGGSKVHAGSNSRLVWRHTPAAARAGEGKGRRRLRGGVRRRVTEVTARLARMRKRR

SEQ ID NO: 108317 - protein, 54 aa, Oryza sativa
  Clone ID: PAT_MRT4530_12582C.1.pep
ATLHLRPCSSGLPEKKHKFLVIFIVTISAVAILGILLLLYKYLNRRKKNNTKNS

SEQ ID NO: 108318 - protein, 318 aa, Oryza sativa
  Clone ID: PAT_MRT4530_12583C.1.pep
MDELRAPACGGGVGTVIEDLPTDVLALVLRRLDGASLAAVGCACSSFRELAVDQETWRGLCLALWPSVRDVLGCGGGGGGDGYRAFFADAFPFPEAAAAVASAAPAPVPGSLPSRLVSAVDLHHGGVCIMSRVVETDTSSAWFLGSPFRVDALVQEGFSAPSPITPSSLTLSWILIDPASGRAMNASSRRPVAVDRKWLTGETVARFTVMLGGGVALDAAVTCDDRYGHVREVSLCVEDGEGGGVSGQDGLGAVAAAMAGARRGKGAEAAARQRYEEFVKGKRARKEWKARREGIVDLCCSGVGAAAFVGFLVMLTFR

SEQ ID NO: 108319 - protein, 125 aa, Oryza sativa
  Clone ID: PAT_MRT4530_12584C.1.pep
MSRGRSPEPLDFFIWTVEDVGLWLEEINLGSYRQVFEENGVNGEYLESLSMFTTEQILRFIRRCHMKWGDFITLCKELRRIKVACLKGEQEVRRPWWAPSCLSVVFVRAAKRNRQSRVVSLKLEP

SEQ ID NO: 108320 - protein, 417 aa, Oryza sativa
  Clone ID: PAT_MRT4530_12585C.1.pep
MLSYNYLDVAFAPYSDYWREMRKLFVVELTSVSRVRSFAYARAAEVARLVDTLAASPPGVPVDLSCALYQLLDGIIGTVAFGKGYGAAQWSTERAVFQDVLSELLLVLGSFSFEDFFPSSALARWADALAGVERRRRRIFRQVDGFLDSVIDKHLEPERLSAGVQEDMVDALVKMWREQQDRPSGVLTREHIKAILMNTFAGGIDTTAITAIWIMSEIMRNPRVMQKARAEVRNTVKNKPLVDEEDSQNLKYLEMIIKENFRLHPPGNLLVPRQTMQPCLIGGYNVPSGTRVFINIWAMGRGPMIWDNPEEFYPERKVSFLSDKDLYQPMGINMYTRGNCIVYVGIVQGCINTFDLLDYSALSEGPIGLAGQTAVEWPVRPASARSDRHRLGQTEYGSIGSVSATPSNTIPASRGPV

SEQ ID NO: 108321 - protein, 74 aa, Oryza sativa
  Clone ID: PAT_MRT4530_12586C.1.pep
MTHIRPRQSCFALVWGSKLFSLHGLSVLLTRAQARLVIVKSELRHRRGATCDNDDMSPFELCFGMGRGVVLTCS

SEQ ID NO: 108322 - protein, 605 aa, Oryza sativa
  unsure (1)..(605): unsure at all Xaa locations
  Clone ID: PAT_MRT4530_12587C.1.pep
GEVERGRRRAAESRSNGWEMQSVNNKGLVEELEKLLDRLRIPQEFAASLTGGSFEESRMLKNVEACEWLTGAIRSLEVPNLDPCYVNMRAVREKRAELEKLKTTFVRRASEFLRNYFSSLVDFMISDKSYFSQRGQLKRPDHADLRYKCRTYARLLQHLKSLDKSCLGPLRKAYCHSLNLLLRREAREFANELRASTKAPKNPAVWLEGSNSGGQNGSSADTSTVSDAYSKMLTIFIPLLVDESSFFAHFMCFEVPALVPAGAPNAKSRSGGNDPDDDLNLMDPDGNDLKPDDTSAELGTLNDALQELLDGIQEDFYAVVDWAYKIDPLRCISMHGITERYLSGQKADXAAGFVRRLLHDLESRISTQFSRFIDEACHQIERNERNVRQTGILAYIPRFAVLASRMEQYIQGQSRDLIDKAYTKLVSTMFTTLDKIAHSDPKTADLXVLTLQQYLMHIXDAITIFPTTLAKYYHEASESYEQACTRHISSLIYLQFERLFQFSRKVDELTYTIAAEEIPFQLGLSKTDLRRVIKSSLSGIDKSIGAMYRRLQKTLTSDELFPSLWDKCKKEFLDKYESFVQMVTRIYGNEPIMSVADMKDVLANF

SEQ ID NO: 108323 - protein, 58 aa, Oryza sativa
  unsure (1)..(58): unsure at all Xaa locations
  Clone ID: PAT_MRT4530_12588C.1.pep
XXXTMRNIEGWFCFRGSCLLLQIGGTGKIITVHKRWTQSMIILQLDLPGGIATVEGSA

SEQ ID NO: 108324 - protein, 45 aa, Oryza sativa
  Clone ID: PAT_MRT4530_12589C.1.pep
LISLQGIQLLLMEPLVLASKKKKKKKKKKKKKKKKKKKPKKKKNH

SEQ ID NO: 108325 - protein, 466 aa, Oryza sativa
  Clone ID: PAT_MRT4530_1258C.1.pep
MPEKGTVVMSRYELGRSLGHGTFSKVYQARSLVSGETVAVKVIDKEKALRAGAGMVDQIEREVAVMRLVGRHPNVVRLHEVMASRSKIYFVMELVRGGELLARLVAGGGRLGEDAARRYFHQLVAAVDFCHSRGVYHRDLKPENLLVDDDGSGGGGNLKVTDFGLSALSASRRHDGLLHTTCGTPSYVAPEIIGDKGYDGATADVWSCGVILFLLLAGYLPFFDSNLMEMYKKITNGEFKVPDWFTPDARSLISRLLDPNPTTRITIDELVKHPWFKKGHTKRPASSNTMKLNEEEKPANAAMNMKPASLNAFDIISLSQGFDLSGMFCCHGHSSRTQDQLFVTGKPATAIVSRLEEIAETEHFTVKKKQKKRQEEDGMAVKLQGWKEGRKGQLAIDAEIFEVSPSCYVVEVKKTAGDTLEYQAFCNRDLRPSLNDICWTSPATAASEKNQLPAVSEVSPLSSPRN

SEQ ID NO: 108326 - protein, 88 aa, Oryza sativa
  Clone ID: PAT_MRT4530_12590C.1.pep
GCDQQNHAPTARADVIQGGEASCADRWAPLVSAQGEGEGARASGPHWQRHKVAGLPWTGTTRVVHRRSTGPTVRISLTGDRTARGRRL

SEQ ID NO: 108327 - protein, 298 aa, Oryza sativa
  Clone ID: PAT_MRT4530_12591C.1.pep
MMQELSLTGDPGKNVPVERNLSKFGIKEICRTGKIALRREKIGATARFWGFSAASYPDLIEALPKNSLLTSVNKTVNGSFDQPSNAGGDVYPVEPYEGSSMNQVLDAHWGVLDDEDSSGLRSHTLSILVNDCPGVLNIVTGVFARRGYNIQSLAVGPAEKSGLSRITTVAPGTDESIEKLVQQLNKLVDVHEVQDITHLPFAERELMLIKVSVNTAARRDILDIAEIFRAKSVDVSDHTVTLQLTGDLDKMVALQRLLEPYGICEIICANTVTVLTHIVSKTHSPHVMDTFAEVNTCF

SEQ ID NO: 108328 - protein, 84 aa, Oryza sativa
  unsure (1)..(84): unsure at all Xaa locations
  Clone ID: PAT_MRT4530_12592C.1.pep
MGCPNEDPTTEPELGNDLYTLLSHPRNLXHAHFNPRPKLXHSYENQVTVLVGGTDTLRCELLQDMRLTQFHNKHIIHVDTIYVC

SEQ ID NO: 108329 - protein, 143 aa, Oryza sativa
  Clone ID: PAT_MRT4530_12593C.1.pep
MAQPDLWAVPRPLPRHDGLPDLARSNDKGAKIDLLRTYKAQGKLYFDFLNYRTSMIHVLQPQNRAYRLLQLSKPVQTMLRGGSRASCFGEELVLRLAAAAAAPYHRPHRRSAQGQRLGQDRHVGVTPDKTTSKTIKWHCLHRF

SEQ ID NO: 108330 - protein, 57 aa, Oryza sativa
  unsure (1)..(57): unsure at all Xaa locations
  Clone ID: PAT_MRT4530_12594C.1.pep
MFLGPLTTRVVFKGPYFYFRVPSPFFLKKKKKKKKKKTKKNKKKPKKKKKKKKKKXK

SEQ ID NO: 108331 - protein, 450 aa, Oryza sativa
  Clone ID: PAT_MRT4530_12595C.1.pep
MGRELFSSSNSHSVDEPLPSQYQFRAFLGARSIMLDDVDDEPFADGISSPIAQHIYDFCDDGNGGDLFAAVNAAAAAGSDMFTASSEDASASSSSTATAPIAGGGDTLSPPLPSLDSTLSALLEQDEPPGADGELLLPIDDYAFSAVDETQPPPPPEHQQQQQFTQMPLPVMGGAAAEHPALQAQLSSTATELMQYAGFTDEVFAAALAAGAGAGAGGYMGLDDPLCPQQQHSGAMLPAAAAAAGEAFFSKDAHAAPAAFFAAAGGGGGSMVMSMMGMDEIGEYQRMMECGGALLGATHAADGADMAFGNAAAAELQMGGGGSSPARLPATGTTETTSLEDTSFKTVRLSNEERKEKIHRYIKKRNERNFSKKIKYACRKTLADSRPRVRGRFAKNDDYCEASRSIGSQNHEEYEQIGGVKGEDMLDSDALAHISGMSSYMYNHTVESWI

SEQ ID NO: 108332 - protein, 71 aa, Oryza sativa
  Clone ID: PAT_MRT4530_12596C.1.pep
MVYLIYERKKEDTQRCYRDASLLRLSERSEEKILKDVVHSVQLLELKQFFSLDKDSDMEMFGSIKKLKKPD

SEQ ID NO: 108333 - protein, 278 aa, Oryza sativa
  Clone ID: PAT_MRT4530_12597C.1.pep
MTTASASRQRGRKEKRDASLTCEARAARPHSRAVTGNGVTINNGSSLHPWSTEHFVLVHGAGHGAWCWFRLLRLLQDSGHRVSAVDLAGAAGSLVDPNHVRTFDDYNAPLLDLMASLPAGDKAIFIAATMLQFGYQTEQDIKDGVPDLSEYGDVYDLTFGLGADRPPTAVALRKEFQRIILYQQSPQEDSALASILLRPWPTALSTARFTGDDGGVESFIDRVRRVYIKTANDRMVQPEQQEAMIRRWPPSKVMVMDTDQSPFFSAPELLFNLILKSL

SEQ ID NO: 108334 - protein, 426 aa, Oryza sativa
  Clone ID: PAT_MRT4530_12598C.1.pep
MAPEPEDDIMNEKNPRPLDEDDIALLKTYGLGPYSTSIKKVEKEIKEMAKKINDLCGIKESDTGLAPPSQWDLVSDKQMMQEEQPLQVARCTKIISPNTDDAKYVINVKQIAKFVVGLGDKVSPTDIEEGMRVGVDRNKYQIQIPLPPKIDPSVTMMTVEEKPDVTYNDVGGCKEQIEKMREVVELPMLHPEKFVKLGIDPPKGVLCYGPPGTGKTLLARAVANRTDACFIRVIGSELVQKYVGEGARMVRELFQMARSKKACIVFFDEVDAIGGARFDDGVGGDNEVQRTMLEIVNQLDGFDARGNIKVLMATNRPDTLDPALLRPGRLDRKVEFGLPDLEGRTQIFKIHTRTMNCERDIRFELLARLCPNSTGADIRSVCTEAGMYAIRARRKTVTEKDFLDAVNKVIKGYQKFSATPKYMVYN

SEQ ID NO: 108335 - protein, 465 aa, Oryza sativa
  unsure (1)..(465): unsure at all Xaa locations
  Clone ID: PAT_MRT4530_12599C.1.pep
MDPRAAFLGRPIRWRRASTGDGFMLCLKAFALGXAFGRSSSLVVNPLTFVARLRPRPHDKPLSLHPSGFAQVLGHGYRVYSALYCAARSDRNLLFRIPLVTLASRLSPRLSWRLANLLVLGQQAKTLGASPTTELATWASHWSKMPTWPGMVLAGVTTEGQASWPVDDEVQRPGDGRTVVFAAFFDAGLRLLCDDFLASVLEIYEARLPQLSPSAIAKLSVFTAFRFAFYCQRFDEGRTHACRTKEIGVRQREFQPPTGAFGFLAGSCIHAKIGSVLDAEMGLYIDNPYTAKYSDNAGRLRFRCLPISINSKPSMEITGLLESRLILLRNVVCRLSTHDCCEEYCMLQRTCRAGEHPCQLNNIHLFSAGDDRLATLDMTEESCLMCVLDLQLEKMVLFGKLDLAGYEISTESRTICCKFFVLGIELLARNGFVRIADKKTQLAVSIQTTAFRQCNRSSNTIRTQN

SEQ ID NO: 108336 - protein, 470 aa, Oryza sativa
  unsure (1)..(470): unsure at all Xaa locations
  Clone ID: PAT_MRT4530_1259C.1.pep
MRHLARLLNNRILLPASSSPAAAFSKRTYARHHKPARPTADAPAPAAGEGEGGGESVQGWLREKHQAETPRRXTGPFQPRGAEAVRLVGTVGAHVQVQRLPAGRFSPGSVVVQDHHGDHPKFRIPIIFEDDLAQVAASHLQEKDHIYVSGQLTGDIPPTKLMDGQANIQVLAQMLSFVGGKAVQADSMVDEEEGFMQIVEAEKKVETKKFIPKYPPRTVSGAMGMTNKAISFSHAPLFTCPPVSQYSRIRDKPLFSLWTRCVYKMFPFGPVLPLALLFSVTRNLAAPGKLFRSILTLKLKLKETFLDNFCDAKVGYRNKDKLNKLWNDVVANPQDWTDNRPQKKNGSINAKYPDFKNNVSKEALWLDTAPKAVLEKLDDLVFSSDFSAAKKYRPFGGDKGNGELWQDLVDNPGKWWDNRSDKPSIKYPDFKHKENGTPLWIGSQTPKWAIDALPPAKPSKAPFKQETFLS

SEQ ID NO: 108337 - protein, 96 aa, Oryza sativa
  Clone ID: PAT_MRT4530_125C.1.pep
PPGSQPITPIPVCLNFKPPRVGFFWPIFSKKNFSPGQAFILGPPWSCPFDPSFFYLKSFFFSQIFRILLKFGGFTLVSFSPGKFFPPQSKIPPHLF

SEQ ID NO: 108338 - protein, 80 aa, Oryza sativa
  unsure (1)..(80): unsure at all Xaa locations
  Clone ID: PAT_MRT4530_12600C.1.pep
MAAAKSDERIGQWREVPAEPTPDGPIRLXCLDRDPTQMALIEALNVFKPTLDRVIGSDYVADGPDRTIERALARAKVHYY

SEQ ID NO: 108339 - protein, 58 aa, Oryza sativa
  unsure (1)..(58): unsure at all Xaa locations
  Clone ID: PAT_MRT4530_12601C.1.pep
PEEPSSDHLFIIHASRXRGAPILMYLLYTHTYRAELATYTMLVTRSRGPGTDTAYAIG

SEQ ID NO: 108340 - protein, 101 aa, Oryza sativa
  Clone ID: PAT_MRT4530_12602C.1.pep
MALDGDVASTIELLLNLIGNMDDTDVSDAHVFNFRFLFRLARPPFLMLLPSIGWYASRPWSWSLSVDEEKCSSVKMVQLVCGQGSLASPVLQVPYVLVNLS

SEQ ID NO: 108341 - protein, 88 aa, Oryza sativa
  Clone ID: PAT_MRT4530_12603C.1.pep
CCGHSVISCTRPFLHCLLLPPYPQKLRSLPTFTFTSTGPQQHPTSALARSSIITLTIGLLPPSCPILRGRCDPDARVGRMRGNSRDGG

SEQ ID NO: 108342 - protein, 486 aa, Oryza sativa
  Clone ID: PAT_MRT4530_12604C.1.pep
MDSSMPFALLLALLIPTLLRFVIRRKYSSYNLPPGSLGFPLIGQSISLLRALRSNTDYQWYQDRIKKYGPVFKMSLFGSPTVLMAGPAANHFVFSNQDLIFTQTQPRSLAAIIGRRNMLELVGDDHRRVRGALAQFLRPEMLRRYVGRIDGEVRRHLAGRWAGRRTVAVLPLMKLLTLDVIATLLFGLARGAVRERLAAAFADMLEGLWAVPLDLPFTAFRRSLRASARARRLLAATVREKKANLEQGESSPSDDLISYLVSLRDGDGGGGRPLLTEEEIIDNSIVCLTAGHDTSAILLTFMVRHLADDPAILAAMVQEHEEIARSKRDGEALTWEDVARMKLTWRVAQETLRMVPPVFGSFRRALEDVELDGGYVIPKGWQVFWAPCVTHMDPAIYHDPDKFDPSRFDAQAAASAPPPYSFVAFGGGPRICPGMELARVETLVTMHYLVRHFRWRLCCGGEENTFVRDPLPSPANGLPVELDHIA

SEQ ID NO: 108343 - protein, 475 aa, Oryza sativa
  Clone ID: PAT_MRT4530_12605C.1.pep
MAPLLFFAVFLFGTALDGAVGQEDGFLSIDCGMDPNYGSYKNPDDGIVYEPDGQYVDGGENHMVAPEHQSGTFRPYSTVRSFPSGVRNCYALPTVAGAKYLVRVRSAYGNYDGKNSSSTIQFDLYLGVNYWATVKDPWNEFHEALFVAWASWVPVCLLNTGRGTPFASSVVLRRLSSELYPVINAKQSMRMISRKNVGSDISTLSYPYDRYDRHWWGQIAPDPTCKNLSTASTIKNNSMFSVPSPVMQTAVEAANKSSLRIKWENSAPIEYKVFMHFADFQNSQLRQFNVSFNELGSYQVSPPYLDNGVLSNSQWYKAPGGVYTITLEPTAESKLPPMLNAYEIYALISHDDPMTFPRDCLVWLIPLTKELREIERVELIPFNSIQSLSQQNKALRGVELLSPVALVSGNCMHVPDKALVITEGPLSAAAAQLFHHAVVQRELDFLGFLIELIGDIRDYVSTLTCGFSSFYQQQQ

SEQ ID NO: 108344 - protein, 715 aa, Oryza sativa
  Clone ID: PAT_MRT4530_12606C.1.pep
MAPRKPNPAFTTGPDPSRIDDNTTAFLGASLMDDDELAKLVSSGAVAEGQAFAPGKALVPKHGDNRTMVFAVFFEAELRFLCNVLLPEILRLFQVELPQLSPSALVWIAIFDWACRTARFEPSAELFGTVFYATVNSKTMVTPAGTKKMAFGSVNINVRPEQSDLWPVNTAMSKWDRHWMAKWFYHSIPFEARSDAAKTLRCHRRSIAPNRKPKVAVDGGIEARFVLLRKADTEARRMIGDVSVTEYSQLLTRQAAGRANRVYDGDLPPRVKPFKADGDEGTSRKRMRGQVKLAPQKRRAPASSDSDADDEDNIEDHDDEEEGEDEGEVEVAAEKAVDEEQALSKSRAILTVQSNSMTLSTPNTSDDAAADWCLRLHGWPIMPLLLGVYDFTDRFALATDQCLRLHGWPIMPPLLGVYDFIAGLPPSSPTGVSASTAGLLCRRCWACMSSPTGWPLPPLIGVSACTAGLLCRHCWASTSSPPFMDVHVFTDRLGFAAGDWCLCLHSWPIMPLLLGVYDFTAGLPLSPPTGVLAYMVGWPHHRSWASTSSPTGLPLLPLTGMDQLEHHHRLAFAAADWCLRLHGWHIMPPLLGAVGRRLRLHRRLAFTAADWCLRLHGWPIMPPLLGVYIFTDRPPRMTPTGVIVFTAGHVAATASRRHHLQRKLSASAADWFLHSHGCMILILLIGLIVFTVGCLTFYFSNSNYFTGNFGFWTLP

SEQ ID NO: 108345 - protein, 546 aa, Oryza sativa
  unsure (1)..(546): unsure at all Xaa locations
  Clone ID: PAT_MRT4530_12607C.1.pep
MASSSSCTSSTTNPLFGFHVSEKLNKQNYQLWCAQVLTMIRGARLEGHLNGKTVAPXAMVLGFLFSSLSREILSQVATATTAAEAWTMIQXMFNSRTRARRGRGNTPSNRGGSGVGRGNGARGGFNGAGAXPAVEAGSWTTAALRQRHSACVPAASYAYGVDSNWYMDSGATDHITNELDKLTVCDKYKGNDQVHTANGADERVDLTHSATASDGVNGAGNSTPGSVPDVTRETAQAPEQQQHGEDAQPHSASETFPSSCTSSARPVPHQTVPALGHDLTGTSADTSTDGVAVQDIEQGAEGELDLNRPRTRLQGGIRKPKVYTDDTVRGWSLQQLDVQNAFLHGVLEEEVYMRQPPGSTKDAVPALLHDLKEDFALKDLGELHYFLGIEVNKVNNGLILTQGGFAVYLGSNLVSWSARKQATVSRSSTEAEYKALANATAEPSAITDGRIGTGGNSGWYWLLGANPQHQESKIPMFGLVEALAMSSGDLTLQQADEGVLLSSPIAMEILEGWVIALIRPLYLVLQCTLPVHLATTQANLVALIDI

SEQ ID NO: 108346 - protein, 224 aa, Oryza sativa
  Clone ID: PAT_MRT4530_12608C.1.pep
WRRRRRRRRRRCCGCGAPRGRCSSRQHGTAARAPPPPPPPRRRWRPGCRCAPSRRPCCSGLGARWRRRSAASPATATGRPSSCGASSRTGSPRRTSPPPSRSSAALTRSPGWCLTSRWLLQLLPTATRRRLRRRRQAPAATPTPTPAPTPRRIAQPRRAPVDARGGKKRRRRRLIAATARLARLAPPPATTACSRQGPARPLRRRRPGLRCAVGGDCRSCTRCK

SEQ ID NO: 108347 - protein, 98 aa, Oryza sativa
  Clone ID: PAT_MRT4530_12609C.1.pep
RILLMLLVIHPSLVGRVVAGVLGRRRQDLNDGEMAHLAAGTMYADPAVWRRGTYLSSLDSSLVCLSASKLASFSQRLRTSQSSRLISDRSRSRTGRVR

SEQ ID NO: 108348 - protein, 73 aa, Oryza sativa
  Clone ID: PAT_MRT4530_1260C.1.pep
MEERMAAGEAKTVATDTERKPTRTAPTVRRTTSAEEKTPPSVYRDENETERQIEGPKVNLFLWVDAEFISFRL

SEQ ID NO: 108349 - protein, 44 aa, Oryza sativa
  Clone ID: PAT_MRT4530_12610C.1.pep
MTKQRPKSDVTKWCYFFQAIELPSSQERAGAGPGRRPDLVSTNA

SEQ ID NO: 108350 - protein, 260 aa, Oryza sativa
  Clone ID: PAT_MRT4530_12611C.1.pep
MNLDRDPFPVNAIDFNENKVLIWSEQAESTKGKEVVIGEPRPKNDGAKKSGGWGGPRRSAHERLSSPNNGLFYAKNQVNEEKREGKRVKVETRTSEVITIKVGSHDVPIPSGDEAGESQGPKDAVFEKPNESNRHMKPLYIKGYIDGKPVSRMLVDGGVAVNLMPYSLFKKLGRGDDELKKTNMILNGFNDEPTKANGVFSVEHTVGNKTLPTTFLIIDAQEANLEWLQKRVQEYRSTKNDIGETIEDFDGVEKLGQGFT

SEQ ID NO: 108351 - protein, 124 aa, Oryza sativa
  Clone ID: PAT_MRT4530_12612C.1.pep
VTLFCYIVSVLRPPGIIVFECCAAAAATGRHLRPRRPPARRRRARPHRPPHGRLPCGRLAPPPPHGRLAPPPPHGPPPPDRLPDGRRYPSAAATGRLLAADWRGPTGRLAPPPPHGRLTPPPPH

SEQ ID NO: 108352 - protein, 61 aa, Oryza sativa
  Clone ID: PAT_MRT4530_12613C.1.pep
LYFREPKQQQRGGFQLNHHHHQIAGLPRYPPMENPHDKRACAANIATGERCNTTGPLPHDS

SEQ ID NO: 108353 - protein, 69 aa, Oryza sativa
  unsure (1)..(69): unsure at all Xaa locations
  Clone ID: PAT_MRT4530_12614C.1.pep
LRRHRRPASVAAEWCLXPPFMGVHVFADRLAFAAADWCFCLYGWWTSPPLMGFIITGLVPLAPTGVFVT

SEQ ID NO: 108354 - protein, 93 aa, Oryza sativa
  Clone ID: PAT_MRT4530_12615C.1.pep
MASWAAKSRVRATAGWLLSNGGDAGRCSPFDCSSSIPLPWSRGRDNGAPSKSRVKCYGLCLTPKYLIVFPFIFHRHCHPSLRGFDNEKKCQQQ

SEQ ID NO: 108355 - protein, 463 aa, Oryza sativa
  unsure (1)..(463): unsure at all Xaa locations
  Clone ID: PAT_MRT4530_12616C.1.pep
MGRPAQDARAGGEGREGAGGLGPSRVVPGGTRLSATRLTVSEVHAGRARVWGGRRGACARFAEDAVRRAHAQPHGSRWTARARGRRETVDRGLLDPVAAEVALTWRLRGCHAGRREVDDDAGRNGRRTTAASGGANHGDTGEGEHTGMLHRTRGDEPTARIRQRESVGGGLWRRQPAKRKGGNGDEVTRGRFPAMRASTRLQESVASVGLGGATPSEAGDERVLRSTGGDGGEHTASGGNGVEAVGQTRGEGKEGAWAYRAAMSVWKPTLGGQGXELALGACGQNGDRGXDAGGEEKREKGRRKRGLAPLPLWGKGGGREGDAARGELCLRPLEARAGRGGAESMTTAMTAGRNDIGIVRFKYYWHMYPVNRQPNALQASQSFSLGSRAASWKLLTSCKKNQAPAISDNYSSTSITRLLPESSINVYLSHTFRWRANHSFLSPDVAVLEDASTAFLDRFQANM

SEQ ID NO: 108356 - protein, 242 aa, Oryza sativa
  unsure (1)..(242): unsure at all Xaa locations
  Clone ID: PAT_MRT4530_12617C.1.pep
ETLKLIVADLLLEELLINGIHFIFFSNWGRIIYIEQGLITSAEGVHFTHTTLLTRITQPVQSGHVWRPXGFHDKAFRKPTQVHHMPTRGVPDQHQVHTAWSLPHGSRWTARARGRREAADRGLLDPVAAEVAPTWRLRGCHVGRREXTRGDEPMARIRRRESVGGGLRRRQPAERKGGNGDEVTRGRFPAVRASTRLRESTSCAGLGGNASRKVGDERXLPSSGGDGGEHTASDGSSRGGAS

SEQ ID NO: 108357 - protein, 328 aa, Oryza sativa
  unsure (1)..(328): unsure at all Xaa locations
  Clone ID: PAT_MRT4530_12618C.1.pep
MGRLAQEGSPRRARGRGGEREXGGPGPSHVGPGGTHLSATWLTVSEVHAGRARVWGGRRGACARFAEDAVRRXHAQPHGSRWTARARGRREAADRGLLDPVAAEVAPTWCLRGCHAGRREVDDDAGRNGLRTTAASGGANHGDTGEGEHTGMLHRTRGDEPTARIRRRELDGGGLRRRQPAGREGGNGDEVTRGRFPAVRASTRLRESVASVGLGGATPSEAGDERALRSTGGDGGEHTASGGNGRRRAPGVPFRVHERIGSPXLGDERRRRDRXRQWRCGGERNGRRNRWEGALVYRTTMSVWKPTLGGQGXELALGARGQNGDRGG

SEQ ID NO: 108358 - protein, 312 aa, Oryza sativa
  Clone ID: PAT_MRT4530_12619C.1.pep
MVRMAGVDREWLHSMAHALALDTWTWPREDVPGLGVVFLLESVPDKIRDNAFVSPDSIRRHRRGLAVLIPEVDIRRLVLAYVGLYVVASVVPWATAAAAARRGGSGDGARVAGRRPRARARRRPRVREAAAEGVRRRSLARATGPFLTATACLLPVRQQIDDKKGKRPMSEELTEKVHANAVQIAKWEPPPEGVAKVNIDAGFRKETGDACAGIIVRDCRGLVLLAACKKLPRCSSATQAEALACLEGVRLATNWIHMPIILESDNADVVAGLNITQASRAEWGGIIAEIRVAMQCLLQVQVHKVKRDSNRG

SEQ ID NO: 108359 - protein, 164 aa, Oryza sativa
  Clone ID: PAT_MRT4530_1261C.1.pep
GRVGVANPQDWTDNRPQKKNGSINAKYPDFKNNVSKEALWLDTAPKAVLEKLDDLVFSSDFSAAKKYRPFGGDKGNGTNWAKKSQDSSSISKQKQGELWQDLVDNPGKWWDNRSDKPSIKYPDFKHKENGTPLWIGSQTPKWAIDALPPAKPSKAPFKQETFLS

SEQ ID NO: 108360 - protein, 151 aa, Oryza sativa
  Clone ID: PAT_MRT4530_12620C.1.pep
GRALPGPPRPPPWARLSSPHRVAQWRRFLSPTGALPHPPPALPFLLVGVPPPPPSSQDPVGRRLPTARQVSGSMAARLISGVAATRRRGSSPAQRRVDGSPVAAAAQDLAPELGTSTAARRRGGGSARSSGASGSTFPLLSSSSCVDILSR

SEQ ID NO: 108361 - protein, 36 aa, Oryza sativa
  Clone ID: PAT_MRT4530_12621C.1.pep
MAFTNHGGFKIFCEEAATAVVCREREQRAGLSAITG

SEQ ID NO: 108362 - protein, 55 aa, Oryza sativa
  Clone ID: PAT_MRT4530_12622C.1.pep
EQPSSTKCTLGCTYYMSVANIKISMSNTANHTLQQPLCSPPRHLTLSPIFEPASP

SEQ ID NO: 108363 - protein, 240 aa, Oryza sativa
  Clone ID: PAT_MRT4530_12623C.1.pep
MWRVVRAAEALALAVLLSRSLPLLPVAAGAAGAVLRVGASFLLHPCSVFLLANGIVVLLVALSRRDRPSSSSSSSSSSSCSDDHDDVHDQFLSFAGAHLPPLPAAITGAAAADQEEGAVFEDKQAVHVTPARAAPRRSRSEKVGRGRRPTRAASPELRRSESERCRRRRRSLSSSSASLADWGMEEDDGGEKEEEEFRRAVEAFIAKQQTRFHREESFVLVAGAGAGDETSAAAAAVEVK

SEQ ID NO: 108364 - protein, 93 aa, Oryza sativa
  Clone ID: PAT_MRT4530_12624C.1.pep
GLPYNGFCFFLVEFVFRLHLTKKYRSLTLSARVRHRIQGPTSLVLFWRPFTFFKRETFLSIYFKENPPQRGIGFWSPALFFFFFLRGKGFFFF

SEQ ID NO: 108365 - protein, 176 aa, Oryza sativa
  Clone ID: PAT_MRT4530_12625C.1.pep
MVGARRRWVKGEVRSGRRPSERREKSGGQQGWRLATEARGRPHAAVGPSRSSREFEVEEDDDATTASRSSASSTRSGSKAEAEQSGCYGSEEAGSAAPLPIRSIFLHIAAAIRCRVLVRRLQKRRRGVARQLVLRGQESGLRWRISARLVGFAGRRMRLGGGRGGTGVAWRVCMAS

SEQ ID NO: 108366 - protein, 181 aa, Oryza sativa
  Clone ID: PAT_MRT4530_12626C.1.pep
MPRATILLLVLALVAPQLSAADADALVDDGHTPPPFHMCGILPGPYAANSTYEANLRYLAATLPAKVMNGSSSSSVDVLAGERPNLIAASASCNSSSSEYHDCGACVAEAFRCARRLCPYSRHAVVHLGGGACSVRYYDVERTEHAEVLMVWCPPEASPRSVSDLYSLYKTCLLDYEYGHV

SEQ ID NO: 108367 - protein, 348 aa, Oryza sativa
  Clone ID: PAT_MRT4530_12627C.1.pep
MEREAGGLNSETVERRVGKVMISSPTIASNIPVPLCQKGVAECEAVINALPLTDVIGPLADHQAAASLKEGVAKEASDVAAAATTSGSNVPKKGRKFSSVPGTHWKAPNPSGGAGKGDARRVRCGLQHVPCGGLDRCRGGAPSRDKAHPPGWCSRVGREIKEARAAGSSANHSAEQLARGLAEAREDLLKMRELVAGNEWRRQGLEHRMSELENLSEIRSSLRVSYTGLHQLVGECGVTTTIPATPDEFSLTSSLADLAVAMEEIPSKHAARIGVETCNGIYTGACHVLACVKLAYPDLDIKRVLDQELFSFVFLACDSEYLVVVVEMSTLRMSSSAGSLRRRWSSRH

SEQ ID NO: 108368 - protein, 556 aa, Oryza sativa
  Clone ID: PAT_MRT4530_12628C.1.pep
MAAMATPQQCWLPTRARAPPPPPPRAPSSASPVSGAPASLRFRGRRAASASASAARRRRGASLPCSPRCALETAGPGFDPLGLYNDGPSRNDTQSPLSNFFGVLSPVFGSSSGGRKEKSYGRGAAAAIEDSSIDIGDFFKGPLPGKFLKLLGYLALSRLGIYIPLGGVNRDAFAGNLDQNSLLGTLDSFSGGGIGRLGICSLGIVPFINAQIVFQLLAQLYPKLQDLQKKEGEAGRKKVLQYTRYASVGFAIVQAIGQVLFLRPYVNDFSTEWVLTSVTLLTLGSVFTTFIGERISDLKLGNGTSLLIFTSIISYLPASFGRTVAQAFQDGNYVGLLTIILSFLFLVLGIVYVQEAERKIPLNYASRYSSRSGGLQRSAYLPFKVNSSGVMPIIFSTSSLALPGTLARFTGLEFLKKAAISLNPGGALYIPTNVLLIAFFNYYYTFLQLDPDDLSEQLKRQGASIPLVRPGKSTAAFIKTVLSNISVLGSAFLAVLAAGPSVVEQITHLTAFRGFAGTSVLILVGCATDTARKVQAEIISQKYKNIEFYDVNRFDQ

SEQ ID NO: 108369 - protein, 90 aa, Oryza sativa
  Clone ID: PAT_MRT4530_12629C.1.pep
AYGRVGTRNIFIFSNRLFLFGSMGQRCWTKQAEAQRWRNDLVCPDWSRDASSYAKQRQSLSPPIDRVHPHRFAPTSLPRRCAGGHEPDFT

SEQ ID NO: 108370 - protein, 78 aa, Oryza sativa
  Clone ID: PAT_MRT4530_1262C.1.pep
HQVSNLCPLPLHACIALYFSTILHTHSSLIHHIPGHPAHHPTGGDIASSADKCQSVQDSIPTSCAWHSYNVRSKCFEL

SEQ ID NO: 108371 - protein, 131 aa, Oryza sativa
  Clone ID: PAT_MRT4530_12630C.1.pep
FEMAQTYLKPTTGGIIVDASGGSGLFSRLFVKSELYSLVVALDFSENMLKQCNEYVKQENISDKTLALARADISRLPFVSGSIDAVHAAAAIHCWPSPACAVAEISLVLIPGGVFVASTFVAYILPPAVPV

SEQ ID NO: 108372 - protein, 361 aa, Oryza sativa
  Clone ID: PAT_MRT4530_12631C.1.pep
MWSRCSAGSAVALCGGRGGHRLLSCAAARRRAPGASASAKGIPRSALRASVTPEFVTAAPDEAVEESSVEREPAAENKLRKLACPICYYPLISSSDQSAPVSAASSSSLECSTCKKFYPNRGDYWDMTVAVGSTEYSESTTVTTEVFRTPLVSFLYERGWRQNFIWSGFPGLERERDMINIYAQMFTQPFSLRQARKVLFASKLGLAQSDFSENMLKQCNEYVKQENISDKYGPQFPNHQHLTLALARADISRLPFVSGSIDAVHAAAAIHCWPSPACAVAEISRVLRPGGVFVASTFVADILPPAVPVLRIGRPYISQFTGSNIFLSEAEFEDLCRACGLIDFKFVRNGFYIMFSATKAS

SEQ ID NO: 108373 - protein, 75 aa, Oryza sativa
  Clone ID: PAT_MRT4530_12632C.1.pep
FSLTNVEPVLEVSSIHHRAMKILDILCLLELGGRGGSRQCDACTYGQWQKQMHMKEITNPCKEFERPQCTPRRRR

SEQ ID NO: 108374 - protein, 84 aa, Oryza sativa
  Clone ID: PAT_MRT4530_12633C.1.pep
KVGFPKKKNQVWKPPNPWPPQSLGPPPSAPPRGGALKKGFLPGPIKKTPPPGKKPNPKPKSPKKVLKNPSPPPKPFRKFQNFSP

SEQ ID NO: 108375 - protein, 106 aa, Oryza sativa
  unsure (1)..(106): unsure at all Xaa locations
  Clone ID: PAT_MRT4530_12634C.1.pep
MGGRNGIRGRGLWRQGSAWGIGVQVTGRDAAQNNRRGWAVAAACEGAVAQLDGGGCNASSEEGREPSVAGAAVRAHRLPEPSLSRHRSXSVLGLPPPPPDLPCLPS

SEQ ID NO: 108376 - protein, 128 aa, Oryza sativa
  Clone ID: PAT_MRT4530_12635C.1.pep
TRATTPPPAPRWPPPRPPTRPPPSPQVTTSPARSLLPCPPPPDTRAAAVAILSLLPPHPPTRRPGPPDPVTPASSPADPAVVRGGEAGSCPLRPAPPLSPSPSSSFLDRRTPAIRRPRAHGQQGHTAV

SEQ ID NO: 108377 - protein, 71 aa, Oryza sativa
  Clone ID: PAT_MRT4530_12636C.1.pep
AWGRVVFLPLNNGVRPPGLSGGFGFFDSSRGGRVPSPLVRAQRGFFGAPPSERVDMAGSFPPEWFKFGGAV

SEQ ID NO: 108378 - protein, 102 aa, Oryza sativa
  unsure (1)..(102): unsure at all Xaa locations
  Clone ID: PAT_MRT4530_12637C.1.pep
SKTWPFPKVKXYPPATCTXAVENHPELHRHVHMIPPANYCPQHPIRRLRLLPPSVNDVGAVVLDPPVERPSVYPSKNTFIRRLQQHQLPCHVLLQDAPRPSC

SEQ ID NO: 108379 - protein, 96 aa, Oryza sativa
  Clone ID: PAT_MRT4530_12638C.1.pep
MAGCFFFFGTRFLGPSKKWASWALGDVKRVVQRPNDDVLDLQMLAQRSSASLRVAAAAVAPWRWWRRSTGSRRLAETAGADDQAAAAASAGEPWRR

SEQ ID NO: 108380 - protein, 153 aa, Oryza sativa
  unsure (1)..(153): unsure at all Xaa locations
  Clone ID: PAT_MRT4530_12639C.1.pep
GAAAACPDLRGAAAVPFAARWAAWHGSRATGAPAGCAGTGVAVASPASVQAQMAVXRELTVVSRLPRCRSAPSPFLELLPFXCGEFLGWIEAAARQRGKLRMPKQCHLVPGSLSAKTGEAASGWWNGGAGSGYVFGLRNLLGALSRVTLSLSR

SEQ ID NO: 108381 - protein, 61 aa, Oryza sativa
  Clone ID: PAT_MRT4530_1263C.1.pep
MGCSGLGEYGWGREGAKGKVGAGAAGGRRCLRRHRCSRATVLEEMQGWLAGATGLYGVCYS

SEQ ID NO: 108382 - protein, 374 aa, Oryza sativa
  Clone ID: PAT_MRT4530_12640C.1.pep
MSQEGPNNHPQGTQETHDCPFTIATNTPLGSTKMGYSDSRKSDENNTSSKPASPVVSSDVVEIKETWENVVVADEEGEGGEDGFASDASESKSKSSSDEVDYELLDLLAGASEGCSGGNNNDEVKNFAYADHKMHVLRERERRKEMKNKFEILHALIPNLPEKTDKATIVEATINYIKNLQDKIHKMEMLKVEREHAIALATAATATAAASADTALQAPPPSEEENEEHDSVVAAATREMALADMVHAWEQQQEAAATGGSHGGHAVPPPPPAASLQTWTGPNMTASLTGDDGFITLSLPHQGGQKNLVAGAVSVLERHHIDVVTATVSASEQGDNLISLHCHLSPGSSSSQNLTPLDKFKLAMSELMLWVISV

SEQ ID NO: 108383 - protein, 331 aa, Oryza sativa
  unsure (1)..(331): unsure at all Xaa locations
  Clone ID: PAT_MRT4530_12641C.1.pep
FVSKRKGGAXGXGAXXKDLFHVVHKVPAGDSPYVRAKHLQLVDKDPETAIVWFWKAINSRDKVDSALKDMAVVMKQQDRAKEAIEAIRSFRHLCSRQAQESLDNLLIDLYKKCGKVDEQIDLLKQKLKMIYLGEAFNGKATKTARSHGKKFQVSIQQETSRILGNLGWAYMQQSNYSAAELVYRKAQSIEPDANRACNLGLCLIKQSRHDEARQVLHDVVLRRISGSEDDKVVARAKQLLHELEPVTHVTSPNNAGLSVSEEIMERLDLVLNEWTPFRLQEIQVYTSLGLLESKTGRLKWFGFKFAAQNVSFSELIVTVQIYFPMSENRAK

SEQ ID NO: 108384 - protein, 327 aa, Oryza sativa
  Clone ID: PAT_MRT4530_12642C.1.pep
HEGETNHPRISLSLSLRRAPPPPLLLPPMASSSKRRGGAGGGGAEKKDLFHVVHKVPAGDSPYVRAKHLQLVDKDPETAIVWFWKAINSRDKVDSALKDMAVVMKQQDRAKEAIEAIRSFRHLCSRQAQESLDNLLIDLYKKCGKVDEQIDLLKQKLKMIYLGEAFNGKATKTARSHGKKFQVSIQQETSRILGNLGWAYMQQSNYSAAELVYRKAQSIEPDANRACNLGLCLIKQSRHDEARQVLHDVVLRRISGSEDDKVVARAKQLLHELEPVTHVTSPNNAGLSVSEEIMERLDLVLNEWTPFRSRRLPVFEEIATLRDQIAC

SEQ ID NO: 108385 - protein, 181 aa, Oryza sativa
  Clone ID: PAT_MRT4530_12643C.1.pep
TRALEGIEEVQFEVELVQFVQVRDMLGDGRLIKRRVVDGKGEFPMDCPLHDSLLRVHYKGMLLDEPKSIFYDTRVDNHGEPLEFCSGEGLVPEGFEMCVRLMLPGEKSIVTCPPDFAYDKFPRPANVPEGAHVQWEIELLGFEMPKDWTGFTFQEIMDDAEKIKTTGNRLFKEGSHTRLKV

SEQ ID NO: 108386 - protein, 77 aa, Oryza sativa
  Clone ID: PAT_MRT4530_12644C.1.pep
YFLKNGGDQSFSSTSKKKEIQKKRKNEIRHLFDEPPRREPVEGAHQGVRARGDEQRGGAIPQRRGRRRGRERRHGRG

SEQ ID NO: 108387 - protein, 73 aa, Oryza sativa
  Clone ID: PAT_MRT4530_12645C.1.pep
NASFSLYPILATISQENQQESAEQRTSCFQGPAPDTQRNRIREHERGKYKRMEMSDMRSSHSHQRKTSQTRHD

SEQ ID NO: 108388 - protein, 106 aa, Oryza sativa
  Clone ID: PAT_MRT4530_12646C.1.pep
MSIFFIIIGCYTAIVWIANIVIFINILSSLFNIAYSAAVDGQLPHHSRLSLLPLIIITVADYFLHLHDLWISPSPLMRVYVFIVSLLSSPPTALSLLLGAFIFTAS

SEQ ID NO: 108389 - protein, 114 aa, Oryza sativa
  unsure (1)..(114): unsure at all Xaa locations
  Clone ID: PAT_MRT4530_12647C.1.pep
MAKSSSFGVYPSPFDLRLGCTWFRQVWSKGLVXTANKPLTGKGEIGASAETVQTMWYGMRRPLSTDAPAETNIGILQRKQXMGFSSWARHCAARSMGIYRFAYPYDTWRVVIGW

SEQ ID NO: 108390 - protein, 43 aa, Oryza sativa
  Clone ID: PAT_MRT4530_12648C.1.pep
QILMSVRWHQLLAVNSNISVVLDYIDCLSSFCFWRSVGVTSLS

SEQ ID NO: 108391 - protein, 307 aa, Oryza sativa
  Clone ID: PAT_MRT4530_12649C.1.pep
MRMSCNGCRVLRKGCSDNCAIRPCLQWIRSPDAQANATVFLAKFYGRAGLINLITAGPEHVRPAIFRSLLYEACGRMLNPVYGSVGLLWSGNWQLCQSAVESVLRGMPIAQPPPSATAVPPLPTCDIRHVGARRGDVHGAAAGPVADLHRLDISSRAKFKRPGGGAAAAHRSDHAAFELVFSKPAAAMAVDVIRQAQPLNWAPGALSHESASHDAAPPESEGHSNDTADTVDGSHVSQSEPEPRATSAATEVHDAGLDLTLGLPPPPPPVQKTEPADSDGGSQQQHDHRKEKPVELGLAISTKVAAQ

SEQ ID NO: 108392 - protein, 84 aa, Oryza sativa
  Clone ID: PAT_MRT4530_1264C.1.pep
MAGDTVVRRGGRASYIAGEHVSHGGKRHGERPRPGPPVRPRHWTYRAEDGGGLGCLCAMHGDAGRGPSSRRRTAYAVDTNADCR

SEQ ID NO: 108393 - protein, 217 aa, Oryza sativa
  Clone ID: PAT_MRT4530_12650C.1.pep
MARRLWHVVLAVCHMLRRGLCRKRLMVDLHVLLGRGKLAGKAPSWSSCPTNPAWGRAPPSGVEFSCTTTPSSYPHYGLFPFKSRGGGGGRRGGGGGGEYGGLDAAAVARAFEMMSAEVEGTPSSSAAAVQGGGGGGWATATPSPMVAWILGRSPAGVRPLRVTDSPFPAVPENGGGGGGEQRVDDAEFEDFINKFYEQLRMQPSAATPDCQLRRRGR

SEQ ID NO: 108394 - protein, 250 aa, Oryza sativa
  Clone ID: PAT_MRT4530_12651C.1.pep
MDLATTPARRPMEAGMARRLWHVVLAVCHMLRRGLCRKRLMVDLHVLLGRGKLAGRALRGLLAHHAAVGHGHHLAASSSSSAALASFYGRRPREVEFSCTTTPSVYPHYGLFPFKSRGGGGGRRGGGGGGEYGGLDAAAVARAFEMMSAEVEGTPSSSAAAVQGGGGGGWATATPSPMVAWILGRSPAGVRPLRVTDSPFPAVPENGGGGGGEQRVDDAEFEDFINKFYEQLRMQPSAATPDCQLRRRGR

SEQ ID NO: 108395 - protein, 141 aa, Oryza sativa
  Clone ID: PAT_MRT4530_12652C.1.pep
PPARRNGGMGLYAQIFRGAPNLHPGGPKKPKGGTPENRKGLAPEMGPPFKGLVWAWPGEPPKPQPPPTGLKTLPRARFLPFEGASQRLGISAAFGPPGIPFPSPRMGNIKIEAIPQWGFIWKKKKKKQKGEKAEKTQKKPQ

SEQ ID NO: 108396 - protein, 73 aa, Oryza sativa
  unsure (1)..(73): unsure at all Xaa locations
  Clone ID: PAT_MRT4530_12653C.1.pep
AVKKSAKVIIERYYPKLSLDFETNKRICDEIRIIASKRLRNKIAGYTTHLMKXRIQRGPSGISFSSSAQEEER

SEQ ID NO: 108397 - protein, 619 aa, Oryza sativa
  Clone ID: PAT_MRT4530_12654C.1.pep
MASSPASAASEEEAVKAAKVLMVGAGGIGCELLKTLALSGFRDIHIIDLDTIEVSNLNRQFLFRQSHVGQSKAHVARDAVLKFRPNINITSYHANVKDAQFNVEFFKQFNVVLNGLDNLDARRHVNRLCLAAEVPLVESGTTGFLGQVTVHVKGKTECYECQPKPVPKSYPVCTITSTPSKFVHCIVWAKELLFAKMFGDKNQDNDLNVRSNESGTSKSDVFERNADEDLDQYARRIYDHVFGYNIEVALENEETWKNRRRPNPIYIRDTLPEEAIRQNGSSRDINNEQEEPSAMVSLGLRNPQEIWSLADNSREIGNLVFDKDDQLAVEFVTTAANIRASSFGIPLHSLFEAKGVAGNIVHAVATTNAIIAGLIVIEAIKVLHGDYKKYRMTYCLEHPSRKMLLMPIEPFEPNKSCYVCSETPLLLEVNTKTTKLREVIEKIIKSKLGMNLPLVMIGSTLVFEDGEGLEEDEAANYALNLEKVLAELPAPVVNDTKLTVEDFQQELSCSINIKHRDEFDEEKEPDGMVLSGWSAPVEKQVTSNGGNQSVASSSGADYADGIVEDISTKPGMKRKLDEVLELKENCDASSSAQVVEDDDDDDLVMLDENPKLAKKKRLQ

SEQ ID NO: 108398 - protein, 76 aa, Oryza sativa
  unsure (1)..(76): unsure at all Xaa locations
  Clone ID: PAT_MRT4530_12655C.1.pep
WATRSAAPAPGRPPSPRRRRSTGTLRSRAPPRRARGAPRRRTTSSPPSRGCSDAASTRHRSXRPSHRRRLRGGRSS

SEQ ID NO: 108399 - protein, 163 aa, Oryza sativa
  unsure (1)..(163): unsure at all Xaa locations
  Clone ID: PAT_MRT4530_12656C.1.pep
WSASGAPAASVGLHQMVRDNYTQGLIRAFGRRRHDEALLHKWFSQLDVEWVLLLHAGQRDLDSSSVEDLMALMERWMRALLIMVQVLSMTLLELRDRRSSSSLAGTDDDDAFLLRTKGSAGNRSPAPELPDFVCVQEVVQFAEASILRMLAFVDAITLAXLND

SEQ ID NO: 108400 - protein, 266 aa, Oryza sativa
  Clone ID: PAT_MRT4530_12657C.1.pep
MAVAFPPHIMVLSKMQRLYDACDMIFSSPASAAPTIGEIRWLQHLLDGMEAADVGIDDGESPPSSSSSSCSSSDDEVSSKDGRLLPARAFTRITYMHIHQCADFSMGVFCFPAGATLPLHDHPEMVVLSKLLYGSVRVKSYDWVTPPPPCSRKSGLARVVAADEVRHAPCKTSVLFPRSGGNMHAFTAVTPCAILDVLTPPYSEELGRPSTYFNDIPIPSLPGFAFLEETDLPEDFSVAGAPYVGPELELVVDMDDDDDDYDDYDE

SEQ ID NO: 108401 - protein, 92 aa, Oryza sativa
  unsure (1)..(92): unsure at all Xaa locations
  Clone ID: PAT_MRT4530_12658C.1.pep
MAAPDVEYRCFVGGLAWATDDRSLVAVFSTYGEILVSKIFXDWETGRSRXGFGFVTFSSELLLRDAFVGLNGLDAFGRCFPVLXALSRRSGG

SEQ ID NO: 108402 - protein, 170 aa, Oryza sativa
  Clone ID: PAT_MRT4530_12659C.1.pep
MGGSRNNNGGKTAEAAAAASGTANTVVALVLLLVAASAVVFLLSPPTPAATRIGRHGDGGPRREPVELAIGLAGHESWLDAVRAWAKLACLKLRPPEPRTARRSRYDLRSPAAVKAAAKEALEMGKVAVEHAAESAATAAEEAVGKTTVKLKRKLSPPTSPAGGRLDEDL

SEQ ID NO: 108403 - protein, 741 aa, Oryza sativa
  Clone ID: PAT_MRT4530_1265C.1.pep
MLLINSVTLPEPSGAAGDGHCHGAVVNMVVPPREPCASPVHHRAALEGVDGGAEEGDIGGREAVKHNVLYRACLVDANVVPWLLCLLSSTAVAMQDNVVASLLNLSKHPARRMTIVEVEGVGLVVNVINISTKAEAHHNDPGGDPDAGPAHPGRRVRQPEECHDRPHTPRRAFDFVGAIGLHHCAPREVGARSDAGEAKYRGPNCKYIATLDRHWSSKKDRRGKSIAPRGGIGMTSMGVDDSGAVNTESDCVDRWHGSGDTALMLYALLMNYCTSKLCDTSCFSFLMAEAVASAVVQETVSGVFSYLSSNRTEKASKRHNMERLEMAHSELDLALERSSKLPITDASLLRQRKIYKRAYDECGDVLHRCKLQILEGEDSHMVKGGFTKRIFRAVKSSISSLIGMDKDEASYSDDAVRRFEWFADKAGKFVRDVETGCSLAHYRFFSPLIKHLLEGKRLCYELVQRSQTLRLEIDPVRSKERGVEAEIRLCNDNVTMLTRSFNLRLILRLSESTDIVGIIISCLQSFGPHFKSLVENAKNTVAELPTQDVLNSSARIFFALPSDTLYEGSATTYRPDPLCCRTHGHGVGSLELSYRFPEQVSNVHFNGYVVASDCNYRSANSTNEVIDRNIMRDWPPLQLTIAFAPHQPHHEDVQGSYEIIGGNNERIDTSMHQMEEMVVSKAIGCFNSQPEVATYSIFSWSVHGCAYFAVQKSIVPVALPLSPRPTNSTPRPEEFSREEPY

SEQ ID NO: 108404 - protein, 257 aa, Oryza sativa
  Clone ID: PAT_MRT4530_12660C.1.pep
MAVRGGVWIATCRPTAGGRATPCGRRTREGGGRRPLRMMGDRVILLDEFLHVRLGQILKCLKKPEANLVKGKHVVCAKVKKVHRTVNPQDDVLHGWKPPDQGLMKLNIDGSFQPDTGKGGLGVVLRNRLGEVIFAACGYIQRCTGALEAELMACREGLLMALQWTLLPIIIETDCQEMLNLLQSKELVRSELMFLVKEVHDLMMGNRVVSLAKVHRNQNRISHVLANKGRVEELTHFWPDNSCNAIAQLVCVDALIE

SEQ ID NO: 108405 - protein, 73 aa, Oryza sativa
  Clone ID: PAT_MRT4530_12661C.1.pep
MPSSLALPAAASSPSLPCYDGSRPEPRRAATVRPPMPLAGSGELIGGREKEPGETPAAAESKLEVDGEVVDPG

SEQ ID NO: 108406 - protein, 440 aa, Oryza sativa
  Clone ID: PAT_MRT4530_12662C.1.pep
MDAATRPAVVIDNGTGYSKLGFSGNSEPCFTIPTVVAVNESFLDQSEMCSSANWIAQYNAGVMADLDFFIGDEALSLFKSSGLYTRKHPINHGQVDDWDTMERFWQQCIFNYLRCNPEEHYFLLTDSPVSTPESRECAGEIMFETFNVPGLYISVQSVLSLSAGYAFLKSISDEDSVSVFCFAIPLYTGVVVDIGDGAPHVVPVVNGYVIGSSIKSFPFSGSDVTQFVLQLLQERGELIAPEDSLDIARRVKEMYCYTSSDIVKEFKKHDKKPDKYIKHWSAIKPKTGVPYTIDIGYERFLGPEIFFHPEIYSADFSTPLPELIDSCVQSAPIDTRRDLYKNIVLSGGSTMFKDFHKRLQNDIKKIVDERVAATNARHHVEVKPVEVNVVAHPIQSYAAWFGGSVAASNPEFYESCHTKEEYEEHGASICRTSTVFKGMY

SEQ ID NO: 108407 - protein, 433 aa, Oryza sativa
  Clone ID: PAT_MRT4530_12663C.1.pep
MGKLSMCMPMKENAARDGAGVLRDKGRWVVLQVAGLAGELREEDDKGVAVEAAEDSLPCPGRHRLCPRRCAYQARAAAATSVRIDHVRGATAVSVRAVVPTRVKQKASKRITQHNDVHCIEGPEIVEKQPLPTDDEMLAIEYKKDDDSNQQEGVQYNHQNVVNAASHYNTRNDDITLKRKCQDGERGSPGTSKKKKLKVANTGKHTGCSNEDKAHQDQDHSGSKKLKSPCIDDAKKVMLAEADVTLEKEQISKRYVNYATSIRDNQTKLNSETKEDDCNTQSDIKKVSRSARRKKLKRQLRQKAKEQLKEKEHCQEQPTVADCPSSNNRDVLPSPSSNQNNSSLPFVRHEADEEESDTSDDIVPVVVRPGHIRFESAGKKKINQSYPDYRVNLPCTNAIILVQVDICVLPSKFKVIFFWPYLMLETEKYVKNI

SEQ ID NO: 108408 - protein, 48 aa, Oryza sativa
  Clone ID: PAT_MRT4530_12664C.1.pep
SYNDCLILHYIAKNVSTFLKFCPCKWGNTDPQGFLKPFRRAIACKTFF

SEQ ID NO: 108409 - protein, 219 aa, Oryza sativa
  Clone ID: PAT_MRT4530_12665C.1.pep
MRPFSPHLRQAAAAAAAAATGAPPLAAALLKNSSAPLIHGRLSFSHTSLQSPNNRGKRTGWAVRVLPLTEENVEMVLDQVRPSLMADGGNVALHEIDGLVVVLKLQGACGSCPSSTMTLKMGIETRLRDKIPEILAVEQIVDTETGLELNHDNVDKVLDEIRPYLSGTGGGSLDLVQIDESVVKVRLTGPAAGVMTVRVAVTQKLREKIPSILAVQLTE

SEQ ID NO: 108410 - protein, 90 aa, Oryza sativa
  Clone ID: PAT_MRT4530_12666C.1.pep
PTRPQKAKEQLKEKEHCQEQPTVADCPSSNNRDVLPSPSSNQNNSSLPFVRHEADEEESDTSDDIVPVVVRPGHIRFESAGIFIQQESDL

SEQ ID NO: 108411 - protein, 795 aa, Oryza sativa
  Clone ID: PAT_MRT4530_12667C.1.pep
MRRGFADGTSRDQVEDGNGTNRSIAASSGTATRRNAGSPVALSSSDKVRYRYMMAIHALQLDVKLEAPNRLGEVAARMSVPAIAVYTSPPGAVYTSSSSSELEASSRGSAPCATAAPPSPASSHRHQAIAGGLSCLFSSPTAAPRAAAAQDELGALWHDRSGEATAVGGGGGGGGYSYPQPSSPFKWRDMLHHSPVPLFHSPASSPASRSPSASWLAGRERERLFSSFVRNALGSCVDYAPVAALPLGVSAAVGVGAGELAFELDEHLSEAEPSCEPYARDLLAGAQARHRIFHDELVVKAFFEAERAHRGQTRASGDPYLQHCVETAVLLAKIGANATVVSAGLLHDTIDDSFMDYDQIFRMFGAGVADLVEGVSKLSHLSKLARDNNTASRTVEADRLHTMFLAMADARAVLIKLADRLHNMKTIEALPLVKQQRFAKETMEIFVPLANRLGIASWKDQLENICFKHLNPEEHKELSSKLVISFDEALLTSTLDKLDKGLRDEGISYHSLSGRHKSLYSIYSKMIKKNLTMDDVHDIHGLRLVVDTEQDCYQALDIVHKLWPRVAGRFKDYILHPKLNGYRSLHTVIMCEGIHPFEVQIRTKEMHLQAEYGFAAHWRYKEGGCKHSFVLQMVEWARWVLTWQCEAMSKERSSGLGRSDAIRPPCPFPSHSEDCPYSYTRQCNHDGPIFVIMLEHDKMSVQELPANSTVVDLMERVGANSPRCSPYSFPLKEELRPRVNHKPISDPNRKLCMGDVVELTPALPHKSLTEYREEIQRMYERGGFALATTRDGPAS

SEQ ID NO: 108412 - protein, 45 aa, Oryza sativa
  Clone ID: PAT_MRT4530_12668C.1.pep
RRADTSPSGPTSPKVPGHVGDCVCLKPRFLRVVWAAQGSPMPCWI

SEQ ID NO: 108413 - protein, 93 aa, Oryza sativa
  unsure (1)..(93): unsure at all Xaa locations
  Clone ID: PAT_MRT4530_12669C.1.pep
LVVAVAGAGAGGGGGDGAGCGDGDKSAXLPLEALLALGLDQRTAENALVNSKVTANLAAVIAEVTRGRLLPSLVRFQFDSMMCGVLFAFDMAS

SEQ ID NO: 108414 - protein, 162 aa, Oryza sativa
  Clone ID: PAT_MRT4530_1266C.1.pep
PPPSPRARQAVAAAFLSSSLDQPLLPPPCGASGYHHRLPIKLAATAAAFLRVRCPLLPPFLLLPHPTRTWFCKICAASSTHKHAVIKRSGAIFGRTIVRITSESLYFFHQKHIQILNGNLLYMYISSTLTLTKPGSYTISSQWNQRKNLHERLDFSNILCSY

SEQ ID NO: 108415 - protein, 133 aa, Oryza sativa
  unsure (1)..(133): unsure at all Xaa locations
  Clone ID: PAT_MRT4530_12670C.1.pep
MATTIFSRFSIYFCAXMLLCQGSMAQLFNPSTNPWHSPRQGSFRECRFDRLQAFEPLRKVRSKAGVTEYFDENNELFXCTGTFVIRRVIQPQAFCVPQYSNTTGLVYIIQDLYNNKYTRKLYQMQLGAYDLHG

SEQ ID NO: 108416 - protein, 123 aa, Oryza sativa
  Clone ID: PAT_MRT4530_12671C.1.pep
TFRCNTSQETLGVLYVASGGGSLSGVPPHQGFARRRRRDRKKLVVTKETAEAAAMAPSPAAAVGPTFEDLERDLQAALMDQNHSATDDELSMFRSGSAPPTVHGARTASGSLYPAAPDSRQQL

SEQ ID NO: 108417 - protein, 397 aa, Oryza sativa
  unsure (1)..(397): unsure at all Xaa locations
  Clone ID: PAT_MRT4530_12672C.1.pep
KFHKSEILFALIKPSKWRILFGCNFGYFSFRYLCIPIHYXKVQNVDWXVEDRFEKKLHTWKGKNMSYGGRLVLLNSVLSSIPLFMLSFIEIPRGMLERLDYFRSLFFXNDDRKRKYRLTKCKDICRSKYQGGLSVHNFDIKNRCPLRKCLFRLVNGEGAXQDLLRNKYLKGKSLXMSNKTCISQFXAGVMKVKDHFLRFGYFRYGNRTDIKFWEDTWFGSCALKYQYPTYTYVAXKKLSTVAEDMSTKPLNIPFRRAIVSQNLIEWKNLIIRLANITLSNEKDCFVWSLHKNGXLSVNSMYNMIMNSNIRIQNRIIXRLKGSTKDLGFMWFLHKKVILTKDNLVKRKXGYKHCSFYYAQEKIQHLFFEFHGEXDTMRNGVTLLESVAKGLLFHYGWR

SEQ ID NO: 108418 - protein, 122 aa, Oryza sativa
  unsure (1)..(122): unsure at all Xaa locations
  Clone ID: PAT_MRT4530_12673C.1.pep
ISSSKCVSNCGKXVFDGVLSPRTIMDQFPNNYPVLKKPEREGSQIYRNQDKTLTLRHHLPGKNSSIPCPAKLNVVANAYRISREQARXLKNNRGEEHGPFTPRFQQQYYPGLSNESESETSE

SEQ ID NO: 108419 - protein, 83 aa, Oryza sativa
  unsure (1)..(83): unsure at all Xaa locations
  Clone ID: PAT_MRT4530_12674C.1.pep
CQYIAIKTNXANALRQPPCRVKTLVFRALPVDVVANAYRISREQARSLKNKHGEKSTGAFTPRPHTXYPGLSNESESVDFRVM

SEQ ID NO: 108420 - protein, 423 aa, Oryza sativa
  Clone ID: PAT_MRT4530_12675C.1.pep
MVTFVVSINILLNSNGLLLQQKTNIPGVVYIIQGRGSMGLTFPGCPATYQQQFQQFSSQGQSQSQKFRDEHQKIHQFRQGDIVALPAGVAHWFYNDGDAPVVAVYVYDVNNNANQLEPRQKEFLLAGNNNRAQQQQVYGSSIEQHSGQNIFSGFGVEMLSEALGINAVAAKRLQSQNDQRGEIIHVKNGLQLLKPTLTQQQEQAQAQDQYQQVQYSERQQTSSRWNGLEENFCTIKARVNIENPSRADSYNPRAGRITSVNSQKFPILNLIQMSATRVNLYQNAILSPFWNVNAHSLVYMIQGRSRVQVVSNFGKTVFDGVLRPGQLLIIPQHYAVLKKAEREGCQYIAIKTNANAFVSHLAGKNSVFRALPVDVVANAYRISREQARSLKNNRGEEHGAFTPRFQQQYYPGLSNESESETSE

SEQ ID NO: 108421 - protein, 99 aa, Oryza sativa
  Clone ID: PAT_MRT4530_12676C.1.pep
WPGEPKGLIFPSLRKINFCPSGKRGANGIVFKKTRGLKKVPLRGFLKLKPKKPLFRRFPPGRKKGVENGAPIVFAPIANGAREVSKKPNIFPGGVPPLN

SEQ ID NO: 108422 - protein, 114 aa, Oryza sativa
  unsure (1)..(114): unsure at all Xaa locations
  Clone ID: PAT_MRT4530_12677C.1.pep
WRRGERRQRLAAGRAAATAAGRATAKAGACGAGRWCMQAAGMAMAAGMALAEGAKAAAVVPTRRWCGARRRRRRXPQICASWQDLEGGRRWWSATAGDGSDGGGRGSWQRRCRL

SEQ ID NO: 108423 - protein, 174 aa, Oryza sativa
  unsure (1)..(174): unsure at all Xaa locations
  Clone ID: PAT_MRT4530_12678C.1.pep
RQVGTVTYRWVSYKCLLVFLTTIDKSASARNTDVALHLRVTPKGYQTQGTVTRTGFMVVTTCRLPLTNSWDTQQIKRSFSEPRVECIDNSGTPLEFLLESYTSRGRSQXSANLPVTPPKLPFTLXYFITYKRYNRVSCNSAQSCGCWNEVSSSFYRLQMMVTPIGMKSGAYMWK

SEQ ID NO: 108424 - protein, 209 aa, Oryza sativa
  unsure (1)..(209): unsure at all Xaa locations
  Clone ID: PAT_MRT4530_12679C.1.pep
PPSSSSSSPDPSPTTASHAPVTPPRSPPPRWHPPAATAAGKGRTPPRRAPWLRPCRRASPSRGTRSPRPRPPPAAASSPSSPARASQQAETARPTATTRSGSGSKAPSSSSTTTTTTSAPSPATAPTSRTTAPTTTTTPPRRRHRPAPPPKSTSCCPPSSSYRQTTCSAATTTSPXPPAATAAAPVVVVASPGLRLVGHGRGAEAREPH

SEQ ID NO: 108425 - protein, 147 aa, Oryza sativa
  Clone ID: PAT_MRT4530_1267C.1.pep
PPPSPRARQAVAAAFLSSSLDQPLPPPPCGASGYHRRLPIKQAATAAAFLRVRCPLLPPFHLLPHPTRTWFCKICAASSTHKHAVTKRPGAIFGSTNVRITYVRYYLFLQIHIHHLDVHTHSALLYMLINLIEQMFAALIGRCLKVQ

SEQ ID NO: 108426 - protein, 50 aa, Oryza sativa
  Clone ID: PAT_MRT4530_12680C.1.pep
PADSRGHVSWAALRTDHINQIASAIFRKYVSSTNILHQHHFDNFSQLYTI

SEQ ID NO: 108427 - protein, 121 aa, Oryza sativa
  Clone ID: PAT_MRT4530_12681C.1.pep
MPSAAAGDGKGKRRLVGMPPARAAAADFAMGGAAAVVAKTGAAPVERVKLLLQNQAEMLRRGSLTRPYRGIADAFGRVLREEGVAALWRGNQANVIRYFPTQAFNFAFKGYFKSIFGYDKE

SEQ ID NO: 108428 - protein, 73 aa, Oryza sativa
  Clone ID: PAT_MRT4530_12682C.1.pep
MLVQVESGSEAAAAAMAATTAGGNASTTASGTRGSGACETATSAAMDGPRWPPKPSSRQCNKGNVIKILLRRV

SEQ ID NO: 108429 - protein, 89 aa, Oryza sativa
  Clone ID: PAT_MRT4530_12683C.1.pep
MGIIQDPLGGEGTRNNRSHKPIQAYIRQDKLPDIDIRDKPRKTPYGTYGNQREESSAISDLVGHRFEEEDYSVVDYVMIFQSVMSTTVR

SEQ ID NO: 108430 - protein, 159 aa, Oryza sativa
  Clone ID: PAT_MRT4530_12684C.1.pep
PPLLPLRRRRRRALNRRRGLSQPLSSSCASLPCAMFSCLNPRRLGAGRPLPTSTPPDNLYPCRPPLHRVLAFFVIYTPEKRGFLPRLSVVPVSSSMNDFTTAAKWLPNAGIIPGLLFRLLFSNPLCALVQIAFTFFFSFLLSNRINELFRECLLYYENF

SEQ ID NO: 108431 - protein, 63 aa, Oryza sativa
  unsure (1)..(63): unsure at all Xaa locations
  Clone ID: PAT_MRT4530_12685C.1.pep
MATSGLRSCRSGGDPSLLAPSANRNPLPVXAYATTCWRVTMERDPVKNKYPFGTLDPLAFSKD

SEQ ID NO: 108432 - protein, 54 aa, Oryza sativa
  Clone ID: PAT_MRT4530_12686C.1.pep
ATTVGPLRRHGSCGSGIILDEPVHNGSDLAPVDLKSASGLSLLSPGQHIYHSHM

SEQ ID NO: 108433 - protein, 248 aa, Oryza sativa
  unsure (1)..(248): unsure at all Xaa locations
  Clone ID: PAT_MRT4530_12687C.1.pep
MNHAIQKRFTGTNGRDRSIQNGRPRSIGSTAAQGRRTLMTSAVTSPPAAARACTLAGERRFGTNGGHQDVERDAANSPMTKTSAEDQRTATATRKKRRRSSAXMTTAVLRXLQRRRRGGRGRRXLGDHDGNLPERRRRPERRRRTAGATAMTATRGYTALGRFRRRETKARVAVGRGDTGDPFIGARRQRRRPTATGDAKETSGFGGKRPIRFDLESTNFQSNLEDDSKREKVEEISGNISPQSISPD

SEQ ID NO: 108434 - protein, 359 aa, Oryza sativa
  unsure (1)..(359): unsure at all Xaa locations
  Clone ID: PAT_MRT4530_12688C.1.pep
ERGRRRHAGPTWQWLRVVVRGGPGPRTGEGXRTTRCTRGADVARTWRPRGSHAASXDWVAPIYPRVDRTAGXSTRPARLGGSNRPGGHGAWQRGATRRRRKAASGRWXATATRVALAAEQLGGGAMAKRRGRERKGGVPHRXDDRRNEDGXRAAELRDHLRNQKRGIREXRDHGWLGRRPKAAAMAKLTGXGANGAPAAEIGGGGADGVALGLANPTEMVKKREGGAVVVYIGSRGSIVAEIAAISQAEWGEVXEEREAGFEIRIPAVSSSSAGGREREWARGTRGRQRRGRRGLGGEGETGAAVGEAGLLLWLEVGDGPDRWAPPVGNPGYLVPTQKLFTLSHRMFGYMHGVLNIEKK

SEQ ID NO: 108435 - protein, 282 aa, Oryza sativa
  unsure (1)..(282): unsure at all Xaa locations
  Clone ID: PAT_MRT4530_12689C.1.pep
SGCSRSRCRRTRRCWRRCRRGTTPTARSSSTRRPSPRSSASSTSRRSRPSSTPSLAPPPAPRRRRRLRPRHAARCHGSTSPTPPPPTTTTTRARMTPRSTPSSSRPGRRAAAPPXAERELLPQELDVAAALHRGARVGEHRGRRRHGQGRRRQRRRRRQRDGRGRRRQRRRRRRGGRRRXGAGGKENRPPPPPPSFPPPIRSIGRGGKPSVCFRSVRAEGRFVLMEVVIPGKDLLRATREGGRLRLQFSNAAAAAAAAVGVIDDEEMHGQEAAACVGGDTFA

SEQ ID NO: 108436 - protein, 47 aa, Oryza sativa
  Clone ID: PAT_MRT4530_1268C.1.pep
MEFGHAAATMESGRCCQNMNCNKSFLSETSLHLHGRGSEVAHPSTAR

SEQ ID NO: 108437 - protein, 41 aa, Oryza sativa
  Clone ID: PAT_MRT4530_12690C.1.pep
MAERNKSKLVDRKVAVIYGKLGGSLFNDIDTILIIGLGMAL

SEQ ID NO: 108438 - protein, 76 aa, Oryza sativa
  Clone ID: PAT_MRT4530_12691C.1.pep
YLVWYVVCIIFVTVSLMSTIVEHYKIVMNHRREMFCIVCSGREVEPVCVSCTKRSLSGVTGLVKQRSHPWSTVLVE

SEQ ID NO: 108439 - protein, 155 aa, Oryza sativa
  Clone ID: PAT_MRT4530_12692C.1.pep
DFSLDTYVYTHHAPLVSLSILIWHARICLYGEADDGEAPWCIGSGPLGTSLSPWTLGGGGGATARLRVNAAIPTNSFLCSGCAPPLFPRSPPPPPPPLTATTAETSPLCTIIIVIVLAAPVGVHARSRVQARNSAMTTAAFAAIAEEEAAAAAMN

SEQ ID NO: 108440 - protein, 26 aa, Oryza sativa
  Clone ID: PAT_MRT4530_12693C.1.pep
RLRNRTVGSLIDIYISIIPAVNCLCV

SEQ ID NO: 108441 - protein, 151 aa, Oryza sativa
  unsure (1)..(151): unsure at all Xaa locations
  Clone ID: PAT_MRT4530_12694C.1.pep
LLXNPPLFPSGMGQIAGTEFLNXGSPSXKQPQSXKTEKSSXRAGPTXVSFLRCNGGGAEIASPKRTGDVRDNFGQAVGGXGGKRRACRXRRPRAAAAMRPASLGNDDDGSGGSRRPQAIRGGGGVGESXSAAARAEWRRWARTRGAVAAAG

SEQ ID NO: 108442 - protein, 133 aa, Oryza sativa
  Clone ID: PAT_MRT4530_12695C.1.pep
MAAAAFNQRWEGSSRSLHFANGSGIFSSHFAAGVEKLMRSNVLARMRASRGGGDPDAAEMDKRAAGQCSYAEYCAMFPRIEMGWDAARWTTKLGRMKVQKLRYDFLEFPTLNSFSPDMSSGRRRRAKGVDGNG

SEQ ID NO: 108443 - protein, 47 aa, Oryza sativa
  Clone ID: PAT_MRT4530_12696C.1.pep
IKVGEDFPLVFVLPPEYVLCGVWPATFKFNWPCLHACMVVRPAQLAS

SEQ ID NO: 108444 - protein, 306 aa, Oryza sativa
  unsure (1)..(306): unsure at all Xaa locations
  Clone ID: PAT_MRT4530_12697C.1.pep
LSFSSPLLLLAHPTRRPPQPERRQERWCDNAAVAAEPGGGRVGGGXGVGPTTVDEASMERSKSFVKALQELKNLRPQLYSASEYCEKSYLHSEQKQMVLENLKDYAVRAVVNAVDHLGTVAYKLTDLFEQQASEVSTVELKVARLNQQILTCQIFTDRAGLRQQKIGGTTFKHHKHYILPSKTLSWHLSSENSISTTGAQKYTFTLGDTISSKPASNGSMYLLGKDIPASPMHKPLQPNGNTSFDAKKNVGSKVSISGAIPVDEQNVVILHQRPISSMLLLCYSASKKPRLSADNKIHIRNGAAGL

SEQ ID NO: 108445 - protein, 148 aa, Oryza sativa
  Clone ID: PAT_MRT4530_12698C.1.pep
MASHINRDDVTNKDGDIGAPYKGFSLARRSGNHTLLTASVLTNFYRQMFNERLSNTVYRHLPCSLKAGSILSRAIEGTPVAKFKTRELRMFSYIETSEPLNIYKEEDNKDKKEEAEESSSSSLKDEEEEEEENNEDEDTEEEVAVVNA

SEQ ID NO: 108446 - protein, 136 aa, Oryza sativa
  Clone ID: PAT_MRT4530_12699C.1.pep
MPLSGHCLCKAVTYKVDDEPLVVGYDHCDDCQRQSGSTYSLVAVVKKDKLTINGPVKTYSGTKGSSGNIVHRLFCSECGSPIAHDPDAAPEIIALKAGTLDTEIKKNLKPDTEIWTVGKLPFCQEHLAKPFKHMPE

SEQ ID NO: 108447 - protein, 36 aa, Oryza sativa
  Clone ID: PAT_MRT4530_1269C.1.pep
YSIYIDICIDKPEFFTKFNLIENSNNIYNNKFIIYT

SEQ ID NO: 108448 - protein, 139 aa, Oryza sativa
  Clone ID: PAT_MRT4530_126C.1.pep
MCLLVAILPYAAAAEASKHPQHTALGSFLLSLSGDGEKLDRLRHLLRSITDGSGRVISDADWEQLNAMMIQERLMITKKIGRKRALPPPSAAPQDLAELSKRRSAYVKRQRNQVTNLMSYVEWRNPNPITGEVTMLTSQ

SEQ ID NO: 108449 - protein, 150 aa, Oryza sativa
  Clone ID: PAT_MRT4530_12700C.1.pep
LLDLFEQQASEVSTVELKVARLNQQILTCQIFTDRAGLRQQKIGGTTFKHHKHYILPSTGHKRTQAARLQTDNGQDSKPKPYPSAKTLSWHLSSKNSISTTGAQKYTFTLRDTISYKPASNGSMYLLGKDIPASPMHKPLQPNGNTSFDA

SEQ ID NO: 108450 - protein, 589 aa, Oryza sativa
  Clone ID: PAT_MRT4530_12701C.1.pep
MSMYSVIAAGDDHPTPASSVAAEAADGSAAAGGGAAVQPAALPPLLPPPQMVVLALDATRDHREEEIRMALRAVVTRGDILRAGGDSLLVLGVLHAITNPMKEMSNRCAYCNSVLLVINIGATSRWVGQPIMSLGYQTKACIDSFAGTNLRLLSDQVKAKAEFYQNKLRHDVEELSKVGINVTLKVSPGSPAKFVIINEVKSSKAAWVVLDRHFRRDFKYLEKHIACKVAVFQDNLVVQPLKIIRTIPPSKSMGEVKALQHLAVSLDLRSETLDTDTHSVLTKSSPVSYFASLSYHEMHETSSVVGSSMSYLTPSMSAMSLTTIDGTDSLSNGKGVEGNMFYHYDSSERPVLCAGCGLKSVLYIKESMKFPFSEIQAATSEFSNENLLGEGGFGHVYKGQLKDGQVIAAKVRKEASSQGYTEFFSEVQVLSFARHRNIVMLLGYCCKESYNILVYEYICNKSLEWHLFGLTVPVFLVIIVRYLAPEYAEYGIVSVRTDVYAFGIVLFQLISGRKAEPLVESLALHELIDERIAETYDTYGLYHLARAAYLCVRINPEQRPSMGEVVRLIESENEHIRDLSRQFIPHFTK

SEQ ID NO: 108451 - protein, 52 aa, Oryza sativa
  unsure (1)..(52): unsure at all Xaa locations
  Clone ID: PAT_MRT4530_12702C.1.pep
XXXXXFFFFFFFFXXXXCLLSXLVXCFCFFPLALLFRXQSGFIVLFSXWRYH

SEQ ID NO: 108452 - protein, 53 aa, Oryza sativa
  unsure (1)..(53): unsure at all Xaa locations
  Clone ID: PAT_MRT4530_12703C.1.pep
LSTKSISIXSQYLFCNCFSFVFTLAQKGSSESILSLSWHSTGMIHENFWIHCT

SEQ ID NO: 108453 - protein, 33 aa, Oryza sativa
  Clone ID: PAT_MRT4530_12704C.1.pep
MKSLGVRRVRRGNRQRERGQVSEMKIRSKQNQR

SEQ ID NO: 108454 - protein, 103 aa, Oryza sativa
  Clone ID: PAT_MRT4530_12705C.1.pep
MVACAVSTGDCGRETMRRWIRLPLCAPCAWIQLWRRGAGGASVDPVPPSSRVDPARMKTMGRRQDGGNLRGAYGINAKSMHAMISQFLDRRIRRHGVDFYPVN

SEQ ID NO: 108455 - protein, 264 aa, Oryza sativa
  Clone ID: PAT_MRT4530_12706C.1.pep
RLLLFECHCSLPRQRRRWSAGTGRAAASRWPATTPGMASCPSLFSGRTRAGSSRRAPASRRTRRRPWSRGIGRRRAAVTLFTAGLPSRRRRSRGTPSVAAAGTVILTPPHLRRLTPLDRPRLLTTPSMPSTAAHWLSSRARARRAGAHAAAAAACLGQRTRRRAASGRPYTDEILQYMGRSCKQEHELTSPQASGGGSSRPASRYLRPIDIVLDGHGLMKLPPLESPSAATTLSSTPSTAAMRPRRPPPPTTCCSTTTTTRTGP

SEQ ID NO: 108456 - protein, 210 aa, Oryza sativa
  Clone ID: PAT_MRT4530_12707C.1.pep
MTFSRSLSKKYLQFDYLDMMFLSQKEEIKPLQILKLTKLVGAAHTCRTYGNSWPFLEIRVVSIPLFQLWQWRSDRREGDLARSSSFSGDGERDGSPHGVDADLLGGRRARRRGGGRRGARHEHGGEVVRHREERPAAAGRRRRRRSSSASSSSSPRASASAAPAGTPVAGRSALPADVGVTPPSDDWTTAGRAPRTRRGHHHHHHHLAAR

SEQ ID NO: 108457 - protein, 124 aa, Oryza sativa
  unsure (1)..(124): unsure at all Xaa locations
  Clone ID: PAT_MRT4530_12708C.1.pep
RPRGFIDNHDTGSTHXLWPFPSXQVMQGYAYILTHPGNPCIFYDHFFDWGHKEEIERLVSIRNRQGIHPASELRIMEADSDLYLAEIDGKVITKVGPRYDVEHLIPEGFQVVAHGDGYAVWEKI

SEQ ID NO: 108458 - protein, 434 aa, Oryza sativa
  Clone ID: PAT_MRT4530_12709C.1.pep
MQVLNTMVNKHFLSLSVLIVLLGLSSNLTAGQVLFQGFNWESWKENGGWYNFLMGKVDDIAAAGITHVWLPPPSHSVGEQGYMPGRLYDLDASKYGNEAQLKSLIEAFHGKGVQVIADIVINHRTAEHKDGRGIYCLFEGGTPDSRLDWGPHMICRDDPYGDGTGNPDTGADFAAAPDIDHLNKRVQRELIGWLDWLKMDIGFDAWRLDFAKGYSADMAKIYIDATEPSFAVAEIWTSMANGGDGKPNYDQNAHRQELVNWVDRVGGANSNATAFDFTTKGILNVAVEGELWRLRGEDGKAPGMIGWWPAKATTFVDNHDTGSTQHLWPFPSDKVMQGYAYILTHPGNPCIFYDHFFDWGLKEEIERLVSIRNRQGIHPASELRIMEADSDLYLAEIDGKVITKIGPRYDVEHLIPEGFQVVAHGDGYAIWEKI

SEQ ID NO: 108459 - protein, 127 aa, Oryza sativa
  Clone ID: PAT_MRT4530_1270C.1.pep
QGFHYSICPFLGEQRANPPQGFNLTQREIVNKKRAPLQHPYKGPQGGGLLFSTPILPPSYTRVVGGPPPDRARSNKQRGAQAPPKHRGGLLPIHFGGPSKKKGLLSCLRLEKKFGVKQTLWESKNIG

SEQ ID NO: 108460 - protein, 55 aa, Oryza sativa
  Clone ID: PAT_MRT4530_12710C.1.pep
MGTPRVDACLKFSIPRCVDRISIADSSCTNASSRAFADVFPPFSNRTDDVLGYCS

SEQ ID NO: 108461 - protein, 666 aa, Oryza sativa
  Clone ID: PAT_MRT4530_12711C.1.pep
MAAPPQPWPLIHGPIELLRVGRGVSGSAANPLIGQNKRGRISTCGQLPDHLPLEALVDYSTLRIRLAGCYKDEHRKARSLEEDATHLLLSEHAFLRRPLEARANSARGASGHPMNPLIIEISGAPAQAQRHWTTGGSDTWAELHRLLADDDQAFEQEDGGGRHTRPPYIYGLPSRFVNGSRLGRIPPRALSLVTPTGLADNMNKNAAPEDVESGEHERTGTVWTATAHIVTAVIGSGVLALAWSVAQLGWVAGPLALAGFACVTYYTSTLLANAYRAPHPVTGTRNRTYMDAVRSYLSPREVFMCGIAQYVNLWGTMVGYTITATISMVAIRRSDCIHRNGAGAAARCDNTSATVLMLAFSIVQVVLSQFPGLEHITWLSVVAAVMSFAYSFIGLGLSVAEWVSHGGHLSGRIQGATAASSSKKLWNVLLALGNIAFAYTFAEVLIEIQDTLKPSPPENKTMKKAAMYGIGATTIFYISVGCAGYAAFGSDAPGNILTASGMGPFWLVDIANMCLILHLIGAYQVYAQPIFATMERWISSRWPEAKFINSEYTVNVPLIQRGSVTVAPYKLVLRTVVVIATTVVAMMIPFFNAVLGLLGAFSFWPLTVYFPISMHIAQEKITRGGRWYLLQGLSMVCLMISVAVGIGSVTDIVDSLKVATPFKTVS

SEQ ID NO: 108462 - protein, 51 aa, Oryza sativa
  Clone ID: PAT_MRT4530_12712C.1.pep
EATVHREEVGNGGDQRPEVANGGGLGLMAKVRWKEVVRVAAALRRRRGEIE

SEQ ID NO: 108463 - protein, 114 aa, Oryza sativa
  Clone ID: PAT_MRT4530_12713C.1.pep
MDDDKVNAWMAKKTMSTMFLGPKGNTTTTTSTQLPIDVVVGGPLAASLNMDHELGHYGPRDRYRDPPSARRIEELGDSVEHGGCSAEIIEGSTYNNCHGSSYDRWHDLEKSTKM

SEQ ID NO: 108464 - protein, 99 aa, Oryza sativa
  Clone ID: PAT_MRT4530_12714C.1.pep
CCQQLQDVSPECRCAAIRRMERSYEESMPTPLEQGWSTSTTEDYGGEGPSPEHGHYREGSPDEGYYGQQHQQPRMTRARPTTARQYAAQLPPMCRVEPH

SEQ ID NO: 108465 - protein, 81 aa, Oryza sativa
  Clone ID: PAT_MRT4530_12715C.1.pep
LFFIWIAIKEDSCPPFITLSLVSSLLFGVGSELTELHLLCYCLRPLEPLLLQIAIIALCRTIQFGRATADRNSFLPKWGYP

SEQ ID NO: 108466 - protein, 183 aa, Oryza sativa
  unsure (1)..(183): unsure at all Xaa locations
  Clone ID: PAT_MRT4530_12716C.1.pep
FFFFFFFFFWFNQVPKLSPAXVADRDKPIDDPTAVELTISXDGNLAVLNQSAKTIIWSTQAKITTNNTIATHLSSGNXLILTNPSNSLEVSRWSFDYPTDTYFPRAKFGWNKVTGLNHHIISWKNSRDPAIGVYCNELDPTGVDQTSLSPLKLRFLCSSVSSGYCSNLKFSLQKSERASDTQS

SEQ ID NO: 108467 - protein, 127 aa, Oryza sativa
  Clone ID: PAT_MRT4530_12717C.1.pep
MAIMPPKAGQGHQSLSAQSPSNPRIQPRAPEPIKPPDSRGYQARLMHLAFGANQGLRSWPRLRSAEEAPGRRRRRTPRAQWAVINTHYAPANHIWRHYRDGPAQATTRKARLCPGNSQHPREALSPS

SEQ ID NO: 108468 - protein, 62 aa, Oryza sativa
  Clone ID: PAT_MRT4530_12718C.1.pep
QRHPSCRRSSRRAHARLRSRPAVEHAPRDSSALAYRIVILIGGPSSSDVPTAMEVAVEIIRS

SEQ ID NO: 108469 - protein, 211 aa, Oryza sativa
  Clone ID: PAT_MRT4530_12719C.1.pep
MAKDSRCTDRSGYRGRGRDSPTLTVASSDMILRIRLRCLSAVMRNAGSTGHQRLGPWVWPGRPPDFRALGAPIISANALRGPMSGVVLGATVGDMGPGVCKVRGSYLPALPPRLASRRSSQGASGCHVTHLGPSRCLAPRPSPNRHVAGGASGEETQAKPLSLRATPQLPLTVFNAAAVPPCCLCIHAEWRAVPRVRWGATMGPTEGRTAT

SEQ ID NO: 108470 - protein, 89 aa, Oryza sativa
  Clone ID: PAT_MRT4530_1271C.1.pep
GVVFFKPNVLGLSPNPLKGLKNFPFLAWTLPRGKNLPPLPLFPMGKVFSPVFFFFYFGPIFPQKKKKKKKKKKKKKKKKKKKKKKKKKK

SEQ ID NO: 108471 - protein, 187 aa, Oryza sativa
  unsure (1)..(187): unsure at all Xaa locations
  Clone ID: PAT_MRT4530_12720C.1.pep
PIQLQPRMEDNLIWRWSNNTAXRSTSSAYKAFFTGQHLFACTDPLXHAQALAKCWFFLWLVLQKCCWIADVMLRHTMESHIACPFYTQEQETXNHIIIAYVFDSSLARXVPNPRAAGWADVALDHHFWVQDRWPQTWHRLARDHHRPFDSIVSLTSWQLWXSVMRVFDAVLSSVLIIVERIKQEGRL

SEQ ID NO: 108472 - protein, 41 aa, Oryza sativa
  Clone ID: PAT_MRT4530_12721C.1.pep
ELTVNTVDIYITQGNCVRSRNKDVCRTVHKLKIERDVLGTL

SEQ ID NO: 108473 - protein, 149 aa, Oryza sativa
  Clone ID: PAT_MRT4530_12722C.1.pep
MAAGPCRVAAVLGAASTRGQGEELAVAPVVQAVAGGDADGGRAKGKRRGRKGALLLAVSGKVEGGRGNIFACSLVWAKGKPRSAKPPLLARDVFGEMPLGRTAEGVDQDCSVKEQNVLNISTACLQIICLHELMGMEALSVYTIDRLAS

SEQ ID NO: 108474 - protein, 382 aa, Oryza sativa
  Clone ID: PAT_MRT4530_12723C.1.pep
MQRLQKQLLPALRAAFPLPASHFSSRLLSASTATLSPTRFVDEDALVAACGLTGAEALKASKRLQKVPSNLDAALTFLAFLADFRLSKDDIAAASSRYPRFLHLKVDETLTSQVARLRDIGLSTPEIGRLITIAPCILSNPRTISRLEFYLSFLGSYPRVHSALRNNSSLLRRNNIESEVKPNIAFLEQCGLTTCDIAKILMSGSRILIMQPEHVKEIVACADKFGMPRESAGFRYALMAVTGISPVRVSAKLDFLRMVIGCSDAQLHIAVSRFPLILTYSEVKLSRSLEFLKAEVGLEPQYIVLRPALLGYSIQKRLMPRYHVMKVLNEKGLLKKDTDFYSMVKIVEESFFKKFLLPYHRSVPGLEKAYLAAREGKMFPEI

SEQ ID NO: 108475 - protein, 88 aa, Oryza sativa
  Clone ID: PAT_MRT4530_12724C.1.pep
TNAADAAALEPPWRHGQSTPRLVVEQLLLLFPYHRIALCRHVSFHVIESTYTESTHTLYATDNVGAEEHFASEHAVQGQYWDQGKCTL

SEQ ID NO: 108476 - protein, 58 aa, Oryza sativa
  Clone ID: PAT_MRT4530_12725C.1.pep
LGAPHVGPPMAEVFPRCREGDLEGPRATLPAFFNVDIPKGAGGVCYWVGYPRAPKTGP

SEQ ID NO: 108477 - protein, 59 aa, Oryza sativa
  Clone ID: PAT_MRT4530_12726C.1.pep
LYILPLSIVKVTIENFILVWRLDCTECRWYGSSRSGCDQNKIENTNEDESIVHNIYTTT

SEQ ID NO: 108478 - protein, 431 aa, Oryza sativa
  Clone ID: PAT_MRT4530_12727C.1.pep
PRVRPRVRPRVRGRVGVQLGEVKVGWMHKDELVEKNLKMGDVLHIDAGSTFYMVNSGKGQRLKIICSIDASDNIGFGPYQAFFLGGGGGGGSRHPQSVIAGFDPKTLVIAFNTTFEDLDQTLLVDTGRGPIMYYTTEPVMSGGQGGVGVGYSGARRGAAAGQWRPVGRGEEEEEEEEELVVDEASSTWSWTKLVGRLLGVVGGGAPSNSVAAQPKKKKDKTVRAPEPYNLYEQGTGFRNAYGSSVAVDKHDYEPLGHSDIGVYLVNLTAGSMMAPHVNPRATEYGVVLSGTGCIEVVFPNGSKAMSATVRAGDVFYIPRYFPFCQVASRGGPFVFFGFTTSARRNHPQFLVGGSSVLRALLGTELAAAFGVPEKAMRKLVLAQNEAVILPSWPEKKKKKKWEEEPEDERWEEKKKAAKQRKPWVIEQVPAK

SEQ ID NO: 108479 - protein, 582 aa, Oryza sativa
  unsure (1)..(582): unsure at all Xaa locations
  Clone ID: PAT_MRT4530_12728C.1.pep
MAAVAMDAKIPPSYLERAISIDHFTHCKTATATDNCIMRIKPWDRSVMHKCSSAAYPLQSHGTESRTSGGRLVRRSGAIKREPKTTMGDQVWNMDCFRFEEAAAVTGLGTILRTNAELNLCSQQEDGRTTTLYTHEHIDINKLKATDDNDGYLMNRACNSRPQLANRAFNLATIISSFPSIVLIIASAQCSSTAPTTYYHRSKKNQCQETVEGYRNRQRTYISIHPDLRWSGIGRSSATRGCVHRRSNGCQQNGSPMIRSRLXLGDTARSRSYPPGSMGERASELIQPPRTHAYGSVHRRRRGQGAQAVGPSTIHKTTTMSARRRTLVTCHDSRPSRAICRAQRYYTFVVNGSSVDFRLYQPATKENQAPFSGLFLDRLKRLRQRTTTRRLRRPCRADRHNASTSHAFSQLRAGRRGDDTGRDRDRSIAIKIGACIALVHMDVLDRLIGRCTVTASDDATGRGRACTEVEHDATKSSGPGLTFARSFLQLQAGLIDPISSCTAQQPAYMGSRRSSCHQIILSAMISLINPSRRTTGHRSVYVCAMIISFDLTEGNVDWLAVGSVAFPRSREMGAGEMSLTVQ

SEQ ID NO: 108480 - protein, 178 aa, Oryza sativa
  Clone ID: PAT_MRT4530_12729C.1.pep
MSVWERGTDIGRLRRELALGACSQSGGRRMTPARRKKGKRRGRKGLAPLPIREKEGEGNGSIAAEGGGARLRPLAACARRGGGRAMTTVMTAGRFGAERRHWRQARAEANGGGDRAVGHHGTRAREATGGVRAGAHTLAREDERLRGCAAAGAAERGEREGALGAAAYAHARAACGRG

SEQ ID NO: 108481 - protein, 414 aa, Oryza sativa
  Clone ID: PAT_MRT4530_1272C.1.pep
MAPMLASAVILLLLVSGYFELPSISSYSAAPAPPLFATALDAVGTRERSPFTSLLSAFADWDAAVGCPRIRAKLDAVGAPGYGANSTAAAAASITGGAGWGGGGGGRCEGVRTRHVGVLVKGWTWIPDALDGVYTCRCGVSCVWSKSAAAVDRPDALLFEGATPPPQRMKGLPLRVYLDLEAARKPTGFEDIFIGYHAKDDVQVTYAGKSFHTSRSYHVSTEKRNDALIYWSSSRCLPHRDKVAKDFLSLVPHHSFGKCLNNVDGPDMALSMYPVCSTNDNGKPHWWDHLHCAMSHYKFVLAIENTKTESYVTEKLFYALEAGSVPIYFGAPNVWDFIPPNSIIDASKFSSLRELASYVKAVANDPVAYAEYHAWRRCGTLGNFGRSREMSLDTLPCRLCELVSKRGGRNADAL

SEQ ID NO: 108482 - protein, 67 aa, Oryza sativa
  Clone ID: PAT_MRT4530_12730C.1.pep
NCWRAAKLAKLYKLVRSEAYRAHDLLVDSCCLPLRKVSYLLGGGSRGRIVVHNSHVQPPARVLSACD

SEQ ID NO: 108483 - protein, 433 aa, Oryza sativa
  Clone ID: PAT_MRT4530_12731C.1.pep
MATVDVLTSEVVVPAGETPAGAVWLSNLDLAARRGYTPTVFFYRHNGEPGFFAADAMRDSLARALVAFYPVAGRLGLDGDGRVQVDCTGEGVVFATARSGHYALDDLMGEFVPCDEMRDLFVPAAPAAASCCPRGGALLLVQVTYLRCGGVVLGMALHHSIADGRSAAHFVETWASIARGAPAADAPVPPCFDHRLLAARPARAVLYDHPEYKPEPAPPARAATASTYASAIITLTKQQVGALRAACAGASTFRAVVALVWQCACRARALPPEAETRLHSMIDTRQRLSPPLPPGYFGNAVIRTSTAATAGEVVSSPVGHAARRARAATSQGEDYARSVVDYLEGVDAMNLPRSGVSRADLRAISWLGMSLADADFGWGSPAFMGPAIMYYSGFVYVMNAPGKDGAVALALSLEPESMPEFRKVFADEVARLA

SEQ ID NO: 108484 - protein, 61 aa, Oryza sativa
  Clone ID: PAT_MRT4530_12733C.1.pep
IVLITKKLIIGYRTFISNYIHLLLEILTIYYNMYILIQPTSRIHTMNCKRNYYDNNMIYYS

SEQ ID NO: 108485 - protein, 53 aa, Oryza sativa
  Clone ID: PAT_MRT4530_12734C.1.pep
GKAVAQRYRAGIAGPTDGSAHDDRHDMRSVSRACRPRTAASPPHHWCFYRCLD

SEQ ID NO: 108486 - protein, 281 aa, Oryza sativa
  Clone ID: PAT_MRT4530_12735C.1.pep
MSPSTSRRPAAPSLFLVSYDDADGGRPTTTLYNVANGVHRPCDVDDELLRTKRSWATSHGSWVLTWDPATLATFLWNPQAAAAAGEVTSVALPSFGQAPPAIKACCAISTGEPTGAGGFTVVMVERGSNVLCAVQFSPPVAASPRRRLGFGNGERREGAEPGRDGSWRESERGPSGRVLRPCCHAGVAAASLASWAKHEYDIGGQRTICSFTPCGGKLYYLIKPGGSSYGVLEFSPDHHRPVFTAVRVRPTHLFATADLLVYSVFPVDVNGELHLVLQRKK

SEQ ID NO: 108487 - protein, 384 aa, Oryza sativa
  unsure (1)..(384): unsure at all Xaa locations
  Clone ID: PAT_MRT4530_12736C.1.pep
VGYKVAGGFFPYGANGMLAGSATVFFAYIGFDSVASTAEEVKNPQRDLPLGIGTALSVCCSLYMLVSVVIVGLVPYFAMDPDTPISSAFARHGMHWAMYLVTTGAVLALCSTLMGSILPQPRILMAMARDXALPSFFSDVXRVRPRVPGKSTIVTGIWAGGLAFLMDVSQLAGMVSVGTLLAFTIVAVSILILRYAPPDEVPLPSSLEASFRLSQEYDEEKVRGPPVDANHEQLSSVVESINDTLIEKKQDTSVEESKRRKAAVCSISSVCVGVVVLTTSASFTFLPFLLRCFFCVFGGLLLLAGLGVLCYIDQDDGRHSFGHSGGFICPFVPLLPVMCILVNTYLLVNLGGGTWMRVGVWLVMGVFVYIFYGRTHSSLTDVVY

SEQ ID NO: 108488 - protein, 435 aa, Oryza sativa
  Clone ID: PAT_MRT4530_12737C.1.pep
MMADTIRYGPPRVPHRLGTVIAVDLGNTNSCVAGYGDEADAPPLFRLCIPTSVAFTGDGDALVGEAAKNHPAAISGFKRLLGTRFGSPEVRRAAEHLPYKIVDWCTMAHIEVNAGAGGAARSVYASDVASMVIAELKARAEARLAGGGKKVHNAVVTVPYYFSDGPREAAMNAARMAGLTTVRIIDEPTAAAVSHGLHHGRLRDGGNVLVLHVGGGTSAATVLTYDNAVFEAVASRHDAHLGGDDFDARIAGRFSQLIKRDHGGGVDDIAPAKLKSQCELAKRTLSSHDVAQVNLHATNLANGAFSFSGSLTRAQFEELNHDLFEKVISLVDAAMAEARRAVAGFDVIDEVVLVGGSTKIPRIRELIKNYFAGKEATGGARPRARVAQGVLHREGPLRPRARAPPPPVVARDEAPRRAGGRRQIGSPMDRCYHEF

SEQ ID NO: 108489 - protein, 52 aa, Oryza sativa
  Clone ID: PAT_MRT4530_12738C.1.pep
MAAGDEMERSGSEREKPIRFDFESNTFQANLADISKGEKELSSEKSEKISES

SEQ ID NO: 108490 - protein, 234 aa, Oryza sativa
  Clone ID: PAT_MRT4530_12739C.1.pep
MVRMGSGRSSGGSSPCRQRPSWRRRRGAGGAVATASLVGGIGSAGAGGGAGVQEEQRRRRRPSSAGLAAPELEEEMGIRRRSRGGGPRQQGPSWMTFFGNGPLLRPVTDDLNGLQPHPVTVDGHGAAAARAPTVARVAGGWCGQRRRLPGRRELPPGGAQARGGASSRRGSPESGPLHVGAAGSASSAEALASSGGERVVVVTEEAFFFFFFFRVLSSEFTQHVLFRQITCEAM

SEQ ID NO: 108491 - protein, 105 aa, Oryza sativa
  Clone ID: PAT_MRT4530_1273C.1.pep
LHATHYCNGTQSLDTCTGGNDLTRTWSSEKKTGNDRSSGFCSRLARAHALGMSFHQMLINRALEGKPYLQNKNVNLSGFNFNTWHQAEYVGIACEPLCLVGLDIV

SEQ ID NO: 108492 - protein, 71 aa, Oryza sativa
  Clone ID: PAT_MRT4530_12740C.1.pep
MDFFLTMRIAQALKTTVGGTVELGGGGGEVDGRSHGSSVVSDLAEHRFEEEDYPVVDYMMILQSAMSITDR

SEQ ID NO: 108493 - protein, 303 aa, Oryza sativa
  Clone ID: PAT_MRT4530_12741C.1.pep
MGEKVNPWCHWSNPPWTESSANNLHPPDVSLDNTNSVALPTYLNSDGYIYSGVAASMPSIAASVTDRPVSFSSRFVTTLVPSVGLSTAETLRKRPLVFFHNVNNTFTVGPLLSKGTLDTVPELQGSNETNVTDVGAQNTECMHENTEEIDALLCSDSDEGKYPMQNDTMSVESVASAGASQPAKKRRLSSGTDRSVVDTASSARPDHSVDQKHLSHDDDAQSCCIGEVESDHQFALREGEEAEGDDGPDDRKRRRERIQETVAALRKIVPGGIAKDATAVLDEAICYLKYLKLKVKTLGAVSL

SEQ ID NO: 108494 - protein, 96 aa, Oryza sativa
  Clone ID: PAT_MRT4530_12742C.1.pep
HICIVLVERQKKREGRRHHAHSASYTRHHTNTHKEPELTSGAAPPSHLSTFGGQKAIDACSTRPPALHFAWTSFIHSSFLPLLWITPQWRGEKRSL

SEQ ID NO: 108495 - protein, 179 aa, Oryza sativa
  Clone ID: PAT_MRT4530_12743C.1.pep
MASTDPMTRRFAVACGVLSQYVKANSSQPSTAAPVAQGVSGLMAAAAAAAAAPVVQEPGCEVDGGGQQFTIFYAGKVVVIDRCTPAMAAELMRFASAAQGGGGAPEAPPALVDMPIARKASLKRFLAKRKATPASARSSYVVRAAAAEEEQPPAKKAKAAVERREDWLALGSLGHMHSR

SEQ ID NO: 108496 - protein, 98 aa, Oryza sativa
  Clone ID: PAT_MRT4530_12744C.1.pep
LHTLPCMFAKGHFKILSSKMPSSCPRGRFSIIRAMQRAHCTLPPILVMIYKRISERYPIVGIIAPRLNLPCRHSHATKKSIVLLSVDSRSPDQLYTSN

SEQ ID NO: 108497 - protein, 74 aa, Oryza sativa
  Clone ID: PAT_MRT4530_12745C.1.pep
MALAPMERTLRDAGGAGRAGRFPFMRSVAGGGSIGVRWHRIDRYIVPQIIARALPFPQRIINLDDDPATATVFA

SEQ ID NO: 108498 - protein, 707 aa, Oryza sativa
  Clone ID: PAT_MRT4530_12746C.1.pep
MNGGGRRRYSSEQLMFDVPANAGGGAGKWGQRGGVRRGDGEIFVSVEPTTPARLRGGEAAAAAAGESPGQRQQLSPGLLDLHAFDTELISDFQVPGIGMYDGAQKFGYGNGGFDDSDPTFAPNKQMSKSTVFAESNFLKAFPEKEKAAPVAKIKVVVRKRPLNKKEISKKEEDIIDIEQQSNSLTVHETKLKVDLTEYVEKHEFVFDAVLDEDVSNDEVYRETVEPVVPAIFNRTKATCFAYGQTGSGKTYTMRPLPLKASQDILRLMHHTYRNQGYQLFVSFFEIYGGKLFDLLNERSKLCMREDGKQKVCIVGLQEYRVSDVETIKELIEKGNATRSTGTTGANEESSRSHAILQLAIKKRVDGNDSKPPRLAGKLSFIDLAGSERGADTTDNDKQTRIEGAEINKSLLALKECIRALDNDQTHIPFRGSKLTEVLRDSFIGDSRTVMISCISPSSGSCEHTLNTLRYADRVKSLSKGSNTKKDLSLAAAPLRESSPSLLASAVPSFSSAEVMNDITERSNFGWTKQQYVKEHQAPTFVDRMQKVKEDTEFSLSNGGYFKEQRTKGSVPVGIAEVPDTVYQQGRQPTRKARDLTSDNNMRNSIAYPIIRRVVPDEDEHLNELLQEEEDLVSAHRKQVEETLDMIKEEMNLLVEADQPGNQLDDYITRLSGILSQKAAGIVDLQARLAQFQRRLNENNVLLYAQCP

SEQ ID NO: 108499 - protein, 116 aa, Oryza sativa
  Clone ID: PAT_MRT4530_12747C.1.pep
VSEMLEAGHALFKNLAADFEDRLCSIHKERRGWRGGRTRSGSCAPMTPPMSRHAPSAATALVCRRRTVPARRRRTALARRRRLSATVLARHRRRFACSGHHSGAATAPSPAATVPG

SEQ ID NO: 108500 - protein, 98 aa, Oryza sativa
  Clone ID: PAT_MRT4530_12748C.1.pep
KRKTRVYMQNVAVVVVVTNYYTSVKICLAMCTTARSTVACCKGAVKKKIEGEKLKMCSSSEVAVKKQESWCWCMPEFFPFLFFFLFSLLLLYVLFCFF

SEQ ID NO: 108501 - protein, 440 aa, Oryza sativa
  Clone ID: PAT_MRT4530_12749C.1.pep
MGGGRGGAPATASARARRPHQPRVLLLCSPCLGHLIPFAELARRLVADHGLAATLLFASARSPPSEQYLAVAASVLAEGVDLVALPAPAPADALPGDASVRERAAHAVARSVPRVRDVARSLAATAPLAALVVDMIGAPARAVAEELGVPFYMFFTSPWMLLSLFLHLPSLDADAARAGGEHRDATEPIRLPGCVPIHAHDLPSSMLADRSSATYAGLLAMARDAARADGVLVNTFRELEPAIGDGADGVKLPPTAELALGLELSQHRFIWAIKRPDQDTSSGAFFGTANSRGEEEGMDFLPEGFIERTRGVGLLVPSWAPQTSILGHASIGCFLTHCGWNSTLESVSNGVPMIAWPLYAEQKMNAAMMEVQAKVAIRINVGNERFIMNEEIANTIKRVMKGEEAEMLKMRIGELNDKAVCDGSDRGMGVTVRTTDGCVV

SEQ ID NO: 108502 - protein, 123 aa, Oryza sativa
  Clone ID: PAT_MRT4530_1274C.1.pep
AVGPEETRKQTGQTGEGQRSAGRIGLGGRNTWEASVNEAPAHFPRAFLFCPSPLSSLSCKPKQLHSMLALIRVHILDKMGQKSPDKSDMTLKHTTGQHKDLLWNTTCPEQKHYTVSSGAWATH

SEQ ID NO: 108503 - protein, 40 aa, Oryza sativa
  Clone ID: PAT_MRT4530_12750C.1.pep
KSSIAIAPWEFSRQCDRLVPSGGAHDRTIKRQGHRLLRED

SEQ ID NO: 108504 - protein, 396 aa, Oryza sativa
  Clone ID: PAT_MRT4530_12751C.1.pep
MAKMLPPPSQSVPSRPPSWLYIPPRRRHGTFTSSCAFRLSPSSPSSPPPPVLDFQYIQFMDSWIEQTSLSLDLNVGLPSTARRSSAPAAPIKVLVEENFLSFKKDHEVEALEAELRRASEENKKLTEMLRAVVAKYTELQGQVNDMMSAAAAAAVNAGNHQSSTSEGGSVSPSRKRIRSVDSLDDAAHHRKPSPPFVAAAAAAAYASPDQMECTSAAAAAAAKRVVREDCKPKVSKRFVHADPSDLSLVVKDGYQWRKYGQKVTKDNPCPRAYFRCSFAPACPVKKKVQRSADDNTVLVATYEGEHNHAQPPHHDAGSKTAAAAKHSQHQPPPSAAAAVVRQQQEQAAAAGPSTEVAARKNLAEQMAATLTRDPGFKAALVTALSGRILELSPTKN

SEQ ID NO: 108505 - protein, 119 aa, Oryza sativa
  unsure (1)..(119): unsure at all Xaa locations
  Clone ID: PAT_MRT4530_12752C.1.pep
LISCSILCPSIQVEALEAELRRASEENKKLTEMLRAVVAKYTELQGQVNDMMSAAAAAAVNAGNHQSSTSEGGSVSPSRKRIRSVDSLXTPPTTASHPLRSSPPPQPRPTPPPTRWSAR

SEQ ID NO: 108506 - protein, 53 aa, Oryza sativa
  Clone ID: PAT_MRT4530_12753C.1.pep
MHAALVYGALVERELPRACRPQAAHVDIDVGRGVRTAYTAAARPEEIYRWRRA

SEQ ID NO: 108507 - protein, 81 aa, Oryza sativa
  Clone ID: PAT_MRT4530_12754C.1.pep
RTQIAVVIDHCRATLNNLVDVRQSVHCSYSHCSPSSRSVSEISWLAMDLCWWDSTSIVVDPGSCSSPERVAESRRNSAQWY

SEQ ID NO: 108508 - protein, 117 aa, Oryza sativa
  unsure (1)..(117): unsure at all Xaa locations
  Clone ID: PAT_MRT4530_12755C.1.pep
AGCRYLLATVHRVTSCYSSLVAIHHAVGCSVSLAXRCLGTAVRHXAWPWPLRTALQIAGGALGDETKQAEASPMPSASAATTEWSSGLKMENGLALRMIGAVGCATHGDPALNVPLT

SEQ ID NO: 108509 - protein, 95 aa, Oryza sativa
  Clone ID: PAT_MRT4530_12756C.1.pep
MELEFYVVELDCWSSSSSNRGGRARALRQKKELELELGTMEDAKLDIGEDEDRNLQDQLIQWFTVVLGGESSKREKLEKKSGLKVKYVAKISGTN

SEQ ID NO: 108510 - protein, 414 aa, Oryza sativa
  Clone ID: PAT_MRT4530_12757C.1.pep
MTNVEGSKADEDGDEVGEEGHAGSLCSIVADVKEPEADEVDNDGIEAGRAQGDGVAEDSNEVSGESDDENNGGDNEGVLTTEAGECVRDAKVLDIGGRENPNPVVSTATLYKNPPPPPSSLLPSTPPPPENPNPHPLKPAMAERGGERGGERGGFGRGFGRGGRGDRGGRRGGRRGPRQEEEKWVPVTKLGRLVKEGRFSKIEEIYLHSLPVKEHQIVETLVPGLKDEVMKITPVQKQTRAGQRTRFKAFVVVGDNNGHVGLGVKCAKEVATAIRGAIILAKLSVVPVRRGYWGNKIGQPHTVPCKVTGKCGSVTVRMVPAPRGSGIVAARVPKKVLQFAGIEDVFTSSRGSTKTLGNFVKATFDCLMKTYGFLTPDFWRDTKFVKSPFQEYTDLLAKPTKALMIDAPVENVEA

SEQ ID NO: 108511 - protein, 126 aa, Oryza sativa
  Clone ID: PAT_MRT4530_12758C.1.pep
MGEEKLWTAQRRGQQLNGRAPLMPWPSLQSSLMPWQRGKDRQPLERDVALALAAEGPGDACSATEQPDPLGSERSTDASSPVEDLAGVRERRPRTSEEIRCKSELVNYRVDYPPPVLHNGKDLVDM

SEQ ID NO: 108512 - protein, 112 aa, Oryza sativa
  Clone ID: PAT_MRT4530_12759C.1.pep
MSPFFLDVGWPETTFFWVFARARATWFGATLPICRHVEVGRKCAAQAQRRRAFLSAMIRRNVSSWTDVLANYPDDAFQCHGFRLSKPELQVVTSDDKENTSTVTSDDKENIS

SEQ ID NO: 108513 - protein, 424 aa, Oryza sativa
  Clone ID: PAT_MRT4530_1275C.1.pep
MFTCRAEKRSSKRSMQIAAGQDNTGYQRKAASDAGSAGGVKALALLAVTSCNHAPSIFAGQPAGLPALPVTRVRAPKVRCALYWKNRTRAYGRVCPVTISQSRFVGGSSDPYYCAANNTIHVSSGYLTGADERMHAVHGRWTRKGSERHRERGLESTELTAVNSPRQLKSGKILHWDLKYSGIASLEKRYICIAVEGLIGALSMNPRLFQFGIARFLTQAHVAHPHRPSAGQTQASDRPQDAAEGARPERQTKIRRCSCYCATVACNAYEWDLSPLNRSREIREKRLPGSRSARLLGVSTASPGVECERQDRLVQQIHSLSRGESDLLRREIGENFAMGSAKTRAEHCTTTTTGGTSRARGAVQRRVATERAGRQQEAYASSLSARVPERAQRMRPRRQPESEQYENKEKEVVKGGKRKRKKLQ

SEQ ID NO: 108514 - protein, 108 aa, Oryza sativa
  unsure (1)..(108): unsure at all Xaa locations
  Clone ID: PAT_MRT4530_12760C.1.pep
FFIFIFFFFYYYIILFFIIIYIIYYIYIYLFPQRVGYKSARLILSIEIFSENFADIGGVLSRVLYIXGSRREKPPLQRXYITLKSPIFSRSLSLTEKXTISLWGIITV

SEQ ID NO: 108515 - protein, 142 aa, Oryza sativa
  unsure (1)..(142): unsure at all Xaa locations
  Clone ID: PAT_MRT4530_12761C.1.pep
KDPSGTCQFLGRSLVSWAXKKQNSXAVSTAKAEYIAAGHCCAQLLWMRQTLRDYGYKLTKXPLLCDNESAIRMADNPIEHSRAKHIAIRYHFVRDHQHKGDIEIAYINTKEQLADIFTKPLDEQTFNKLRHELNILGSANCF

SEQ ID NO: 108516 - protein, 59 aa, Oryza sativa
  Clone ID: PAT_MRT4530_12762C.1.pep
MTSLKNSTGKRLKRLWMLEGNRWRGSWDWEEKRTLLVRKSEKAGGVVKREMAIPDKNGL

SEQ ID NO: 108517 - protein, 475 aa, Oryza sativa
  Clone ID: PAT_MRT4530_12763C.1.pep
MGSFPAAEETTATAAARPHAVMVPYPAQGHVTPMLKLAVLLHARGFHVTFVNNEFNHRRLLRARGAGALDGAPGFRFAAIDDGLPPSDADATQDVPALCHSVRTTCLPRFKALLAKLDEEADADAGAGAGDARRVTCVVADSTMAFAILAARELGLRCATLWTASACGEADLSNGHLDTKMDWIPGMPADLRLRDLPSVVRSTDRDDIMFNFFIDVTATMPLASAVILNTFDELDAPLMAAMSALLPPIYTVGPLHLTARNNLPADSPVAGVGSNLWKEQGEALRWLDGRPPRSVVYGSITVMSAEHLLEFAWGLAGSGYAFLWNVRPDLVKGDAAALPPEFAAATGERSMLTTWCPQAEVLEHEAVGVFLTHSGWNSTLESIVGDVPMVCWPFFAEQQTNCRYKRTEWGIGAEIPDDVRRGEVEALIREAMDGEKGREMRRRVAELRESAVASGQQGGRSMQNLDRLIDEVLLA

SEQ ID NO: 108518 - protein, 497 aa, Oryza sativa
  Clone ID: PAT_MRT4530_12764C.1.pep
MGSFSAAEETTATAAARPHAVMVPYPAQGHVTPMLKLAVLLHARGFHVTFVNNEFNHRRLLRARGAGALDGAPGFRFAAIDDGLPPSDADATQDVPALCHSVRTTCLPRFKALLAKLDEEADADAGAGAGDARRVTCVVADSTMAFAILAARELGLRCATLWTASACGFMGYYHYKHLDRGLFPLKSEADLSNGHLDTKMDWIPGMPADLRLRDLPSFVRSTDRDDIMFNFFIDVTATMPLASAVILNTFDELDAPLMVAMSALLPPIYTVGPLHLTARNNLPADSPVAGVGSNLWKEQGEALRWLDGRPPRSVVYVNFGSITVMSAEHLLEFAWGLAGSGYAFLWNVRPDLVKGDAAALPPEFAAATGERSMLTTWCPQAEVLEHEAVGVFLTHSGWNSTLESIVGGVPMVCWPFFAEQQTNCRYKRTEWGIGAEIPDDVRRGEVEALIREAMDGEKGREMRRRVAELRESAVASGQQGDRSMQNLDRLIDEVLLA

SEQ ID NO: 108519 - protein, 48 aa, Oryza sativa
  unsure (1)..(48): unsure at all Xaa locations
  Clone ID: PAT_MRT4530_12765C.1.pep
VISXRASSYGPSRMMVIYDVPRLEARLRYGMLSQSGLKLVPVTDDGHL

SEQ ID NO: 108520 - protein, 521 aa, Oryza sativa
  Clone ID: PAT_MRT4530_12766C.1.pep
MGSLPAAAEARPHAVMVPYPAQGHVTPMLTLAKLLYSRGFHVTFVNNEFNHRRLLRARGARALDGAPGFRFAAMDDGLPPSDADATQDVPALCHSVRTTWLPRFMSLLAKLDDEAAAAAAADGAARRVTCVVADSNMAFGIHAARELGLRCATLWTASACGFMGYYHYKHLLDRGLFPLKSRSSMANFLIQFSIHAKKFVRVLAGEADLSNGHLDTTVDWIPGMTGDLRLRDLPSFVRSTDRDDIMFNFFVHVTASMSLAEAVIINTFDELDAPSSPLMGAMAALLPPIYTVGPLHLAARSNVPADSPVAGVGSNLWKEQGEALRWLDGRPPRSVVYVNFGSITVMSAEHLAEFAWGLAGSGYAFLWNLRPDLVKGDGGAAPALPPEFAAATRERSMLTTWCPQAEVLEHEAVGVFLTHSGWNSTLESIAGGVPMVCWPFFAEQQTNCRYKRTEWGIGAEIPDDVRRGEVEALIREAMDGEKGREMRRRVAELRESAVAAAKPGGRSVHNIDRLIDEVLMA

SEQ ID NO: 108521 - protein, 158 aa, Oryza sativa
  unsure (1)..(158): unsure at all Xaa locations
  Clone ID: PAT_MRT4530_12767C.1.pep
MWDHCTGAPCLLAFVCRRPRHTHRQLLLAPRSPPPPPAASHRAAPHRPPPALDAPLAPIRSPATGRASRAKPASTAVDHASXRSMPVSATISRPSXAPSQPPTPPPNIAVPARCGRLPRPRLAIRDRRASSHRSNDPGRHSHHRHSHSNHSHGATASR

SEQ ID NO: 108522 - protein, 98 aa, Oryza sativa
  unsure (1)..(98): unsure at all Xaa locations
  Clone ID: PAT_MRT4530_12768C.1.pep
MIYPVRARGSGRATDTRVTGTEEKTGPAASAGGQVYRANAVAVXGLIKRIQEEEEEEEEEEEEEEGGRSFPSTRRGGRRPRNTKPLRCTCSAAVQVKC

SEQ ID NO: 108523 - protein, 129 aa, Oryza sativa
  Clone ID: PAT_MRT4530_12769C.1.pep
MGRRRRMRTTPLMPPRASLSSHLLLSAQPAQPMPPLLRSCGDRAPSSFLSCRYQCRLPKCDELMLLAVTTSVVLLHVINAQAASIYNVCTMPFNATQSTGEFLLPSPLWDVDGMGDGMGAVHGVAWHVG

SEQ ID NO: 108524 - protein, 101 aa, Oryza sativa
  unsure (1)..(101): unsure at all Xaa locations
  Clone ID: PAT_MRT4530_1276C.1.pep
GPLGFPLFKFANPPPGFKEGXPLFYFLXRQNHGRFGWLPPPPPPFVGFYKTPFLVEPNTRPGEKRGVLFGAPPLSFYMGELGFYSRKRASPQSKKKFAPFN

SEQ ID NO: 108525 - protein, 855 aa, Oryza sativa
  Clone ID: PAT_MRT4530_12770C.1.pep
MKTSSFESASSSGGSGGGGGGGGGEGSGSFNLRNLSKLILPPLGVPAGGHAQSGHAGPNDRRVISPLDSRYRCWDTFMVVLVAYSAWVYPFEVAFMNASPKGGLEVADIVVDLFFAVDIVLTFFVAYIDSRTQLLVRDRRRIATRYLSTFFIMDVASTIPFQGLAYIVTGEVRESPAFSLLGILRLWRLRKVKQFFTRLEKDIRFNYFWIRCARLIAVTLFLVHCAGCLYYLIADRYPHREKTWIGAVIPDFQEASLWIRYTSSVYWSITTMTTVGYGDMHAQNTVEMIFNIFYMLFNLGLTAYLIGNMTNLVVEGTRRTMEFRNSIRAASNFVGRNHLPPRLKQQILAYMCLKFRAESLNQQQLMDQLPKSICKGICEYLFLPVVKDVYLFKGVSREVLLLMVTKMKPEYIPPKEDVIVQNEAPDDVYIVVSGEVEVIYSDGEAEERVVATLGTRGVFGEVSALSDRPQSFTLRTRTLCQLLRLRQAALKEAMQSKPEDSVVIIKNFLKHQIEMHDMKVEDLLGEDAAGEYDHGNIPCNLLTVAATGNSSFLEDLLKVGMDPDVGDSKGRTALHIAASKGYEDCVLVLLKQACNVNIKDAQGNTALWNAIAARHHKIFNILYHFARVSSPHHAAGDLLCLAARRGDLDTLRELLKHGLAVDSEDRDGATALRVALAEGHADVARLLVLNGASVDRAASHNEQQAAAAVSVDELRELMKTRELAHPVTIVVDSPSPAAAAVIREVGSSGDSRNGRRQSARSDGAHWPRVSIYRGHPFVRNRSSEAGKLINLPGTMEEFRIIIEEKLKVDARKTLIMNDEGAEIDSIDVIRDNDKLFIVTEEHMTAVASMDSVSGS

SEQ ID NO: 108526 - protein, 46 aa, Oryza sativa
  Clone ID: PAT_MRT4530_12771C.1.pep
PCTRKQVLSCLTCTLICDSVFHLVLESFTFRVIWLCTNLLIPPQKK

SEQ ID NO: 108527 - protein, 59 aa, Oryza sativa
  unsure (1)..(59): unsure at all Xaa locations
  Clone ID: PAT_MRT4530_12772C.1.pep
VXLRNSFWYMIXLGVCVXXCFILIXRYCEPNSRCFLGEFFVASCLLVGAYISIRINPCL

SEQ ID NO: 108528 - protein, 60 aa, Oryza sativa
  Clone ID: PAT_MRT4530_12773C.1.pep
TLPFSGRAFCPAQEGLYPSSNGLTLPRHLDLVTKERGEKMKDLLQLGQVNDLTFKTLSQV

SEQ ID NO: 108529 - protein, 56 aa, Oryza sativa
  Clone ID: PAT_MRT4530_12774C.1.pep
IGFHMVPTIGGKVYSNFRSGKENHVGLVSSSTLAIGGSTVTVKIPILAHVFHGRNT

SEQ ID NO: 108530 - protein, 46 aa, Oryza sativa
  Clone ID: PAT_MRT4530_12775C.1.pep
LDPSYMDPIDLLEANRNGRDGEHESVARACARLGLSVPSRLHRHRL

SEQ ID NO: 108531 - protein, 637 aa, Oryza sativa
  unsure (1)..(637): unsure at all Xaa locations
  Clone ID: PAT_MRT4530_12776C.1.pep
MDRATGVRDAGRRADEHADGAGVFTCSWRCYCSGCLNGGGGGVAREPSLRRPDQGVVLAWEDLWVSAAGGKSGRVPILCGLNGYARPGEVLAIMGPSGCGKSTLLDALAGNVYTHELIAACTMNNXIMDDLVERMDQAYVTQDDVLMNTLTVREAVRYSAQLQLPSGMSAAAKRERAEETLREMGLEGAADTRIGGWAHKGISGGQRRRVSICMEILTRPALLFLDEPTSGLDSAASYHVVSRIARMARREGMTVVAAVHQPSTEVFGLFHGLCLLAYGKTVFFGPAADTAQFFALSGFPCPSLMNPSDHFLRTINKDFDKVISSKRSINQDIEEGMDGKKMTTAQAIDTLVNSYKSSVHLETWVLTKRSFVNMYRDLGYYWLRFAIYIALCLCVGTIYYNIGHSYGSIQVRQPWPSLTVSHFLFFFSFFCCFLXRTHIFGRERLNGHYGVGSFVIANTLSATPYLALISVAPGAIGYYLTGLQSSIDHFAYFAVVLFTTMMVVEGLMMIVASAVPDFLMGIITGAGIQGVMMLNGGFFRLPDDLPKPVWKYPMYYIAFHKYANQGFYKNEFRDAGRRADEHADGAGGGAVLGAAAAAERDERGGEAGAGGGDAAGDGAGGRGGHADRRVGAQGDQR

SEQ ID NO: 108532 - protein, 139 aa, Oryza sativa
  Clone ID: PAT_MRT4530_12777C.1.pep
MVVGFRRTISFPAPKAATAAKGEAYRVRSASLPCRFHPLVVQLDEDVATMRELVGRLASAASAGSVAGAAEQLGRVLVSLSELLHHPQAQEPLRRLGRSPFAERLLDNFLRLADAHGSFRAALVALFALQAEARACLRC

SEQ ID NO: 108533 - protein, 767 aa, Oryza sativa
  Clone ID: PAT_MRT4530_12778C.1.pep
MASGQHQPTVPRWKPSPPRPQGREADDVDQPPQFDAVSDMSASVRSTDGFPFGSGRSSFAPPPFLPARQPSLEISAAENGGGGGVAREPSLRRPDQGVVLAWEDLWVSAAGGKSGRVPILCGLNGYARPGEVLAIMGPSGCGKSTLLDALAGRLGSSVSQKGDILINGRRQALAFGTSAYVTQDDVLMNTLTVREAVRYSAQLQLPSGMSAAAKRERAEETLREMGLEGAADTRIGGWAHKGISGGQRRRVSICMEILTRPALLFLDEPTSGLDSAASYHVVSRIARMARREGMTVVAAVHQPSTEVFGLFHGLCLLAYGKTVFFGPAADTAQKVHIISAITTNLKTIFERNKSTDYYIGTLCLKISKDKMRTVLKHWVFFALSGFPCPSLMNPSDHFLRTINKDFDKDIEEGMDGKKMTTAQAIDTLVNSYKSSVHLEKVTHHIQDIRATGGAVVKKEERPSFLTQTWVLTKRSFVNMYRDLGYYWLRFAIYIALCLCVGTIYYNIGHSYGSIQARGSMLMFVAAFLTFMAIGGFPSFVEDMKIFGRERLNGHYGVGSFVIANTLSATPYLALISVAPGAIGYYLTGLQSSIDHFAYFAVVLFTTMMVVEGLMMIVASAVPDFLMGIITGAGIQGVMMLNGGFFRLPDDLPKPVWKYPMYYIAFHKYANQGFYKNEFLGLTFPNNQAGGAATITGHEILRDYWQVQLGYSKWVDLAILGGMVVLYRVLFFVIVKLIEKMKPMVQRLRFRSDAPSVHIAENGSAGSL

SEQ ID NO: 108534 - protein, 144 aa, Oryza sativa
  Clone ID: PAT_MRT4530_12779C.1.pep
YTTGDNLELLPSPDDGSRLGLPRSEVKLITSNLAVGDGLEWDGAAQAQACVGGATQRREAHTQARVGGNHHDNASATTMTSTPSSDLNRTTREGYTGSALVLLVAAHRESGRERGTRKERRSKKKKRRKKYLCILGPLAMSVYE

SEQ ID NO: 108535 - protein, 163 aa, Oryza sativa
  Clone ID: PAT_MRT4530_1277C.1.pep
MEGGSSSSSTNRRKGKGRLPLIKCPCCDCETIIRRAANTPENKGRIFYTCPCHQRDGIGCRFWYWEEQYEEYLINTGHLASRAVHIQSPCSAVRVQTNAMVQQGAQPYVENDAEQIAEQIKVLVRRMNLLIDIGRDIVALLRCVVAACVVVAVTNMYAFFRSG

SEQ ID NO: 108536 - protein, 130 aa, Oryza sativa
  Clone ID: PAT_MRT4530_12780C.1.pep
MGERAAGVGGGAVSACGQSRQSGGVSGRAWQRQRQAVGEHGGGQVAALGVGDDGWRRGTRDAQVVAAAGDTKEGLHRAVHAAYVSAVHARPLLAPTSIRPSRAAAAASFIVKTALDWVEGGKLSGIESSG

SEQ ID NO: 108537 - protein, 563 aa, Oryza sativa
  Clone ID: PAT_MRT4530_12781C.1.pep
MGKKGGWITALKKAFTSGPKDKPTNGQLVAQYSHQHRSGGGGAAAARDKKRWGFGRSRQHAEPSPAGALINIPLYREPSSIEKILVDAEMEQQHRQYRAHYQITPAKPATVTAPAAAASLPAPPPPVSARERQRRRDVDDDKPAIVLPLPPPSPPPLIRRFDHDREQQQKLQQMQQQTRAETEWRRPQAQRRRAARPRGPAPPDRARAAAVAIQSAFRGYMARRNYRSLRGLIRLQGVVRGPSVRRQTAHAMRCMQMLVRVQSQVRASRVEAMERRNRHHHAAMLRDAARWRAASQDGGIWEDSLLSRDEMDARTKRKVEAVIKRERALAYAYSHQLLKATPMAAHAILADLQSGRNPWWWTPIERRHEAEAAAALLSRQRVEHVGNGGGGGRHVAVTATPARSVVSSYSTATATTAARPRATRPAKVASSYGGGGSIRDDESLTSCPAFGGALPNYMTPTMSASAKARARAQMLRQQQEKQAQAAQEKPRFSFGLGQSIGSWAKSPFWKGGAAAAPPSISSRVATPAASVAGRHRPTRSSVSELSVDSAVSMPAGIGRRTFK

SEQ ID NO: 108538 - protein, 60 aa, Oryza sativa
  Clone ID: PAT_MRT4530_12782C.1.pep
MGQVGLTPGSAEPGGSAEPPLAPLDPGFGWTMRGGPLMVTAQYGNSAVSGGFSKYQEGIG

SEQ ID NO: 108539 - protein, 445 aa, Oryza sativa
  unsure (1)..(445): unsure at all Xaa locations
  Clone ID: PAT_MRT4530_12783C.1.pep
MLLRLPCARGPAPAAAARWRPPGRAARTAPRLGRGHAAASSADGSGAPSSPLFVLCHSQALTLALPPQSLHYDYDPLADLLGPDVDPTSSQRSFNAGVILVTWLIWKEHNESLRGVQSLRNTAPVAEKGKLRSWVGPNGQYYRELPCPSCRGRGYTPCKQCGIDRSSLDCPMCNGKGIRECVQCAGECVIWQESIDEQPWEKVRSSSPLKVKEDDEVDKLEIKINTSKRSRRTYPSPSPEVALKISRSLRSLNAKTGLFTKHMKIIHQDPKLHAQRVAAIKKTKGTAAARKHASETQKAFFSNPENRLKRSIAMKGVKFFCSKCGQEGHRSFYCPTVREISGRAHFRCRLCGGKGHNSRTCGKPKSENECQRQPRHCSQCGERGHNRRNCPRSTTVEVEDVKIYSEXKQDNVHSSGIYSCSFCSAKGHNRRTCPKRKASIGQQKD

SEQ ID NO: 108540 - protein, 58 aa, Oryza sativa
  unsure (1)..(58): unsure at all Xaa locations
  Clone ID: PAT_MRT4530_12784C.1.pep
GPKKETAGSRRPTASEGSEPSLVGPVRGGGRRRRRRRAKGGGFLXVVRRGANGGVCVR

SEQ ID NO: 108541 - protein, 106 aa, Oryza sativa
  Clone ID: PAT_MRT4530_12785C.1.pep
MGGLGLDQTNRFLGTGPWRDELVRRVGEFGGRINMRRTGKNAPQNIWDGPDRSKVLGPFLEQTPLYLTGEVPGEFRWDTGGVLGDPETFAKNKELEGIHLRWAMLG

SEQ ID NO: 108542 - protein, 87 aa, Oryza sativa
  Clone ID: PAT_MRT4530_12786C.1.pep
ADELKTCAGIFYHGGRSQYTAWFFFLKVNYTFVYIRERHRGGLKKTAHDHSLVVPSCLSIFLPYLALLIFPMNSSKYISPSLICICL

SEQ ID NO: 108543 - protein, 59 aa, Oryza sativa
  Clone ID: PAT_MRT4530_12787C.1.pep
LDESDDFLELERHILEGPLTEDPQGINDIVLFLSTILWCFYNCCILPGANSNATLKCTC

SEQ ID NO: 108544 - protein, 61 aa, Oryza sativa
  unsure (1)..(61): unsure at all Xaa locations
  Clone ID: PAT_MRT4530_12788C.1.pep
LFYVTVNQDSGSKSYIWNTILAVFLDINSLSFTASLFFFSKVSFSQLCXELXXXXLDGPYE

SEQ ID NO: 108545 - protein, 111 aa, Oryza sativa
  unsure (1)..(111): unsure at all Xaa locations
  Clone ID: PAT_MRT4530_12789C.1.pep
TQRDPVPPPPSVVAGGGSNRPRHPSSSPVPDPSAAASDPSPPPRPSSLSAAEPPPLPXRSRRPPSPLPPRPSSLSAAEPXEAEPPPPPAARCSTPPTARCSVPPRWPRAKE

SEQ ID NO: 108546 - protein, 164 aa, Oryza sativa
  unsure (1)..(164): unsure at all Xaa locations
  Clone ID: PAT_MRT4530_1278C.1.pep
MHTVFFYARLAIAGRGAMAQLDAATPDHWHYHLQAHLMVHQLMLIPXCEFLRQESTTAATPFFXHPKNELLHCPDMFEIRCQHLTMIXSNLTDQDITSVHDIVQQLQLQQFADADFHQAHAQAHPMLSLHWPSICGIYTSYNTAPCNVPTGESDLLLNCSSILV

SEQ ID NO: 108547 - protein, 943 aa, Oryza sativa
  Clone ID: PAT_MRT4530_12790C.1.pep
MAESDGGEASPSGGGGGEGSPDPRRPPARPQLTKSRTISGSAASAFDRWGTSNSSSSILVRRSSTAPLPPGAAPRGLLTVAVDEPSYAAPNGGAAMLDRDWCYPSFLGPHASRPRPPRSQQQTPTTTAAAAADSRSPTPAAPPQTASVSQREEEKSLASVVKRPMLLDERRSLSPPPPQQRAPRFDLSPYLVLMLVVTVISFSLAIWQWMKATVLQEKIRSCCSVSTVDCKTTTEAFKINGQHGSDFINSADWNLASCSRMLVFAIPVFLVKYIDQLRRRNTDSIRLRSTEEEVPLKKRIAYKVDVFFSGHPYAKLLALLLATIILIASGGIALYVVSGSGFLEALWLSWTFVADSGNHADQVGLGPRIVSVSISSGGMLVFATMLGLVSDAISEKVDSWRKGKSEVIEVNHILILGWSDKLGSLLKQLAIANKSIGGGVVVVLAERDKEEMEMDIGKLEFDFMGTSVICRSGSPLILADLKKVSVSKARAIIVLASDENADQSDARALRVVLSLTGVKEGLRGHVVVEMSDLDNEPLVKLVGGELIETVVAHDVIGRLMIQCALQPGLAQIWEDILGFENAEFYIKRWPELDGMRFGDVLISFPDAVPCGVKIASKAGKILMNPDNDYVLQEGDEVLVIAEDDDTYVPASLPQVRKGFLPNIPTPPKYPEKILFCGWRRDIHDMIMVLEAFLAPGSELWMFNEVPEKERERKLTDGGMDIYGLTNIKLVHKEGNAVIRRHLESLPLETFDSILILADESVEDSIVHSDSRSLATLLLIRDIQSKRLPSKELKSPLRYNGFCHSSWIREMQHASDKSIIISEILDSRTRNLVSVSKISDYVLSNELVSMALAMVAEDKQINRVLEELFAEEGNEMCIRSAEFYLYEQEELSFFDIMVRARERDEVVIGYRLANDDQAIINPEQKSEIRKWSLDDVFVVISKGD

SEQ ID NO: 108548 - protein, 61 aa, Oryza sativa
  Clone ID: PAT_MRT4530_12791C.1.pep
CAHVCYGTLSDCCCANCGLLRLLYACYYCLFCPVRPLPHQCRIQILYTEHTGQILRAQPAE

SEQ ID NO: 108549 - protein, 375 aa, Oryza sativa
  Clone ID: PAT_MRT4530_12792C.1.pep
MWRPILLQPRRTLLSHLRRRGHDATDDDKAVLRLLRLIGSRGYASSSDATNAAAAADIAAPRADSRRRRRSPAAKAKAKQHLYVVLTDRKDACAIHKLDIDGGSGGVDNGHLMNAGGGMASPKTLPRLPEPPLLRLQSPTVHPCSKFTTVGSSIVTMGEGNTLVYDTKTAALTVVRHLPEGLVVGVSHYVAAIAAGDNRLYVFDATTVDDYHDGRWSWRHPDASTPISWSYDPSRLPFDAITGKIEAYAVHPEGRTFFVSVRKLFRRVPGAVDDEGTFSYSVESGAWTRRGGWMLPFVGHGHYDGELGSWVGLHHSDDDDGRLSACRVVSARQRRAPSEVQVSKEKVSLVEKAFVVPVRNPPLIPVSKPGLPIRD

SEQ ID NO: 108550 - protein, 56 aa, Oryza sativa
  Clone ID: PAT_MRT4530_12793C.1.pep
MCKFLRATMGCFCSRKLSSREHKHRQLMIATSCNWATIVSMLSMHSLSTLEEFSPY

SEQ ID NO: 108551 - protein, 167 aa, Oryza sativa
  unsure (1)..(167): unsure at all Xaa locations
  Clone ID: PAT_MRT4530_12794C.1.pep
MLRSHSKARALPLDGTVEHLGCGQGVVIGAARQGEDQVGFXVRRKLRSAMAWGISEKASGLRSLSWTGWLSQRGSSGARPASXQPQRLLRHGEIAGELRRLGDHAPHLLHVVVVAGPPPAHHHARDDVAGDTHQRGVDVDVLGVGGTPAERADEARHLLAADMAEPV

SEQ ID NO: 108552 - protein, 181 aa, Oryza sativa
  Clone ID: PAT_MRT4530_12795C.1.pep
MATGDATATAERRRDGDAAMGRRGAARGLARGDGGTAAMGDVMAMGRDARRGGDVTGVAVEKELTLLLDNLIRGSSPEGGRGSSVERGLRHRHHQRSTAPLCAFFFIGGSSPEEGACRRMWSDLAGGLLSLQPPLSLAVERKRKLQAGMWIDHIVMIGSIPKDRLESKDVKSRRPAVPFCF

SEQ ID NO: 108553 - protein, 250 aa, Oryza sativa
  unsure (1)..(250): unsure at all Xaa locations
  Clone ID: PAT_MRT4530_12796C.1.pep
MLRSHSKARALPLVSERRKSVLSMGARLGNAPQSPPAIDCATSASIVPSPPTQAPFIAAITGVLHRSMAVTDANTASPEDGIVELLCCVKGVVIGSAXQGEDQVGSSRFLPSIXKKKHVFLTAVRSKLKSIILGGISVXASMLMSLSXRTGLLRSRTIVSXSSTCRLHRGEFFVNKSPNELRRLCDHVPHLLHVVVVAGPPPAHHHARDDVAGDTHQRGVDVDVLGVGGTPAERADEARHLLAADMAEPV

SEQ ID NO: 108554 - protein, 1153 aa, Oryza sativa
  Clone ID: PAT_MRT4530_12797C.1.pep
MLRSHSKARALPLDGTVEHLGCGQGVVIGAARQGEDQVGFLQELRSMPTTESMTVRTVRRKLRSAMAWGISEKASGLRSLSWTGWLRSPTTASSSACRPRREDVLVHEIAGELRRLGDHAPHLLHVVVVAGPPPAHHHARDDVAGDTHQRGVDVDVLGVGGTPAERADEARHLLAADMAEPEEERMEPPPPPPYIHIETNDFLHRRHKRQKEEDIAVCECQYNLLDPDSACGDRCLNVLTSTECTPGYCLCGVYCKNQRFQKSQYAATRLVKTEGRGWGLLADENIMVTEFTLILWSANVVKYIQAGQFVMEYCGEVISWKEAKRRSQAYENQGLTDAYIIYLNADESIDATKKGSLARFINHSCQPNCETRKWNVLGEVRVGIFAKQDIPIGTELSYDYNFEWFGGAMVRCLCGAGSCSGFLGAKSRGFQEATYLWEDDDDRFSVENVPLYDSADDEPTSIPKDILIKDEPNTQDGNNNTIQNTGIPIIASSSEFTPMNVEPSIASSNEFTPMNVEPLNVSSNELTPMTIEPLNAIPMGVDFTQNGSIEYGAQCAEDALQNSTRGVANLQNQSAPRDNNHTELVAVKRRPTLRGGKAKRGMRKQLNVVGICDRLASEVAREEILYCEEMKNEAAAEIDSLYDEIRPAIEEHERDSQDSVATSLAEKWIEASCCKYKADFDLFPLFRISRVMGKSEHGNLLVSLSDGLPHYSLAAAVGLAIGVAGLCKALHSSLVIPPVSQKKLLSNSDRLYYTGGLKNLGNNCFLNVILQALASCDGFVSSLDNLLGSEDVLPEEKSEKMPLIFALSSLIKVENKVLVPVTLVVSGITEQWWSGGIVTYCNTVNTLSLDFENFYCLPLSPVATINGDIINGCSLVDCLEHFTALEHLDNYRCDHCWHNVAAKYLSLKSEVDEEKINKLHTCVDYGTCSCRHIFTPEEMTCSISSQATKQLAITHFPKILCIHLLRASVGLDGEFVKRGGHISFPLLLDLSPFAGGALIPGQGPKPSAMNKQRHGQQTLHLWRQLNAEMPVNMFPAATDGDSSSHHCGDESINTLGRSFYVGNRDADSRFLSSSSLTDKLYGLSSVVEHYGVCGGGHYAAYRRVTPNSDSNEPVQSLASFRKEWLYVSDDHVSHVSECEVLAAEATLLFYERL

SEQ ID NO: 108555 - protein, 82 aa, Oryza sativa
  Clone ID: PAT_MRT4530_12798C.1.pep
MAREPHWSDLAVGDELVGVGHRWGGQAWWPPPVLVVVAGDGGSEVVVAVEVMSPPLPHSDAEMYEYDEEAEKDYEEDLRAPG

SEQ ID NO: 108556 - protein, 67 aa, Oryza sativa
  unsure (1)..(67): unsure at all Xaa locations
  Clone ID: PAT_MRT4530_12799C.1.pep
SVRTIDTYKHYFTAQAAGGIYVYLTTYNGEVLLIANAXANAAXTNCTYTEVIQIYVKYTVQGLEIYA

SEQ ID NO: 108557 - protein, 66 aa, Oryza sativa
  Clone ID: PAT_MRT4530_1279C.1.pep
MEKEALGEIEVNLTGWEAEVIVASSTRVMERTRRQRRIEKISRRGRKEGVRRGNFNDIGRKYSLRP

SEQ ID NO: 108558 - protein, 433 aa, Oryza sativa
  Clone ID: PAT_MRT4530_127C.1.pep
MKRRKIPNPQQQLGQIYVLPRRRQPHRGLHAAPWPPPPRPRRVLGPRLQHHILNALWYHTAYPLPTHQELPQDISDTRAMSPAPSTASSPSSVPSPPPVTHYPNMRPWSTQCDLTDKLQQQHTVTMTKKKNPYAAAAEASKHPQHTALGSFLLSLSGDGEKLDRLRHLLRSITDGSGRVISDADWEQLNAMMIQERLMITKKIGRKRALPPPSAAPHDLAELSKRRSAYVKRQRFARSNLEELLLKYCRQHPWEPRYKLDVICGLEEPKSYHWRSYHANFLASANGTNVLNGGEANPPVRKLFFAEFWDSQSGRFNKSNSKPICSPVQNYNACFGRLCSFCDEPRTILHPPCATGSHSNDDDDADADVIPDYNVDDAIRMYGSVAPELSEGRDLVESDIIYFDHEKDAANLTQVLNDPSFKEEDNNLGRRRKQ

SEQ ID NO: 108559 - protein, 852 aa, Oryza sativa
  Clone ID: PAT_MRT4530_12800C.1.pep
CRRISAVLLQKKKKKKKEQFERQQGWAIKKMYSSSNKKQSSPGPGPGDAAVAEIREPAEEYAPVIFAQDAYKHVISFDMLSGNEDRDNILRARKSGKGVLTAPFKLLNNRLGVILTYTVYKYELPAYARPHERIQAAIGYLGGIFDIQALVEKLLKQLASQESIMVNVYDTTNESPISMYGDDTGSGMCHVSVLNFGDPSRKHEMHCRFEKKPPWPWLAITSSFGTLVIALLTGHIFQATVHRIAKVEDDFHKMSELKKRAEDADVAKSQFLATVSHEIRTPMNGVLGMLQMLMDTDLDTTQQDYVRTAQASGKALVSLINEVLDQAKIESGKLELETVPFDLRTVCDDILSLFCGKAQEKGLELAVYVSDQVPQILIGDPGRIRQIITNLVGNSIKFTERGHIYLTVHVVEEVMSCLEVETGIQNTNTLSGYPVANRRCSWESIRLFNRELHSSEKSFAPIASDSISLVISVEDTGVGIPFEAQSRVFTPFMQVGPSIARIHGGTGIGLSISKCLVGLMKGEIGFASKPHVGSTFTFTAVLMRAHCKGNDIKSSEFKGINALVVDHRPVRAKVTKYHLQRLGVKTELTAELNQFISKLNSGSLTAKLVLIDKETWLKESHCTPLLVNKLRNNDKPDSPKLFLLGSSASSPKGGSDTSREHNLNVIMKPLRASMLQVSLRRALGGVDKVHCRNGVVGNSTLGSLLHKKQIIVVDDNIVNLKVAAGALKKYGAEVTCADSGKKAITLLKPPHNFDACFMDIQMPEMDGFEATRRIRVMERDLNERIERGEAPPECASIQRWRTPILAMTADVIQATHEECLKSEMDGYVSKPFEGEQLYSEVARFFQNHDQVE

SEQ ID NO: 108560 - protein, 142 aa, Oryza sativa
  Clone ID: PAT_MRT4530_12801C.1.pep
MRGNHSGGAAASLRMPVTATPPRSHRGAAAAASLRTPVTAAPPLFLATSIYASLSVAATKHWLIKPLPLSVLSAKGGEVDHHEASIEALYASLGQRRRDPWPPVIPTFPESPILQEKTLRNSKASKASHTDPKQPFEHVDPI

SEQ ID NO: 108561 - protein, 69 aa, Oryza sativa
  unsure (1)..(69): unsure at all Xaa locations
  Clone ID: PAT_MRT4530_12802C.1.pep
RTXRGRHGXRRGRHPSXSXRXGGLKRSRARGGEQEELDLVAMAEQEAAERSRRGEERRGKEGARVGRCR

SEQ ID NO: 108562 - protein, 102 aa, Oryza sativa
  Clone ID: PAT_MRT4530_12803C.1.pep
IANKFCPQIVNVPLYGVCFPCVRYSFEQSPTGRVCFGCLIVPRRTWLSNHPHKDLFPSFNRPSFTWSWVFVMLSNASISNGHGSYGLRLCGSSKNHKIQCSS

SEQ ID NO: 108563 - protein, 49 aa, Oryza sativa
  Clone ID: PAT_MRT4530_12804C.1.pep
MAAAAAAAVERVANWRRAVRARRIGNVPPRVIRSLTWALHRVDGLMGSL

SEQ ID NO: 108564 - protein, 46 aa, Oryza sativa
  Clone ID: PAT_MRT4530_12805C.1.pep
GEEVGLSHNPFRTGYSKIIIHFRGGPNKMAASLEPVSKIFDQRKKV

SEQ ID NO: 108565 - protein, 61 aa, Oryza sativa
  Clone ID: PAT_MRT4530_12806C.1.pep
IIREKNLVYVLTRTCGVLFTYCFLLFLLLLILLHLPRDTKYLWLSVSCNLHFSILIFPYKI

SEQ ID NO: 108566 - protein, 314 aa, Oryza sativa
  Clone ID: PAT_MRT4530_12807C.1.pep
ICNAVAIAGFLNATLVIPNFHFHSIWRDPSTFSDIYDEAHFVKRLQNDVRVVEKVPDFIMERFGHNLSNVFNFKIKAWSPIQYYKDAVLPKLIEERLIRISPFANRLSFDAPPVVQRLRCLANFEALKFSNPIATLSETLVSRMKEKSTASNGKYIAVHLRFEEDMVAFSCCVYDGGDEEKKEMNAAREIGWRGKFTKRGRVIRPGVIRMNGKCPLTLWRAEKNMVPLLEMFPLLQTKETLASAEELAPFKDFSSRMAAIDYSVCVHSDAFVTTQGGNFPHFLMGHRRYLYAGHSRTIKPDKRKLAILFDNPRI

SEQ ID NO: 108567 - protein, 85 aa, Oryza sativa
  unsure (1)..(85): unsure at all Xaa locations
  Clone ID: PAT_MRT4530_12808C.1.pep
PAGTHPHPAAALISRRGDMARNCAADGAGLRPPGLLDLLRYLIELLMAVHVLDLGYXRYRLGTDGVRQPARSKRQYPSPPQHVPW

SEQ ID NO: 108568 - protein, 35 aa, Oryza sativa
  Clone ID: PAT_MRT4530_12809C.1.pep
KLRGRDWYIQGTCAMTGDGLYDGLDWLSKTVSKKK

SEQ ID NO: 108569 - protein, 719 aa, Oryza sativa
  unsure (1)..(719): unsure at all Xaa locations
  Clone ID: PAT_MRT4530_1280C.1.pep
MAEERESFESQWAPSDVTEENLKEMVAHGVLPAKEIIEFFQGILEFYGISLHHLNPNSIVHIANFIHACEAFVGIRPHFALFRRIFFLKPQPNKSKPCVVGGASFQLRGTLSQKYFSMPFKTSNKGWHANWFYVQNPEPALPEYSCLSPVYQDTWNSLPMGDEAAQALALMDHMLKLKEQGLQGEQITRHFIKSRLAPIKERSRTAFEFDGKHDPNREDPEYLEFKIMKESEFALMKSDPPIAQRRSPCRQTGQASGXPKIRSDTQPNTSQSTNQSDSRXKKGVTGKQPRQANLKKKTSSRPIPKIRKSSRKPSDIDPSGKDLEPTGVETGPTTEIGLTAEDRPSSNQPATDNVEASNEPPTGNQSAEVGVEQNEDIPEVEAQTSSPPQKDASTDPGSSSPVRVEGPARPQPEVITGPMVGDEEEVLRIRSAEDSRPPILVKWWDDEMQPQGIVINKQKEDEEVCLLKKTLSQATRLVNRIHLRNEAKTETLERLVPHLGTLEATRDQLREAKELARKTEYELRDRIAELQDSNFELSGSSKVESNTVQAAKISELEKRIKALEKDKGELTKQRDSSQFDVLVSKIKRLEGARDEVANATTPLVQAMFFNNNGPSSFDAAEIFDKLRIAPDTYFKNIKEAGSMGASLALAMTKSLYPKIDIDAVDGFADGTSEEAALDLINDAQKAADKIAVDVVERFQDNDLRPIGSDNSDDEKTETD

SEQ ID NO: 108570 - protein, 98 aa, Oryza sativa
  Clone ID: PAT_MRT4530_12810C.1.pep
SPTRVHRGIEVSKSLSRGQSGLHNSVVGVLCTKCEYVASLSQRKEGRQEAVKAQLIEESEVSGQCHVPVHSTTERIHRRWYKCGEKSVFRSAFVGVKK

SEQ ID NO: 108571 - protein, 123 aa, Oryza sativa
  unsure (1)..(123): unsure at all Xaa locations
  Clone ID: PAT_MRT4530_12811C.1.pep
XXGTXXXXXGKXRXGKKKXKXGGGXXDXWXXXRXWGXPISAAXRGHVQRRRAEDGDXGVTAGEXXAAAASEMXDXDAAIVEEEEEGENEXYLRSLLRPESGRGPATVXSQSCXEEPHXXRSLI

SEQ ID NO: 108572 - protein, 142 aa, Oryza sativa
  Clone ID: PAT_MRT4530_12812C.1.pep
PSLSSREQLSSLCQPPPDPPPSPPRRAAQAPTPSDPRPPSRHHRRPPCWPPPSSSTVVTAVDPVSPVIRVADPATSVVAVADPASPILVAVDAASPVVAAVVPASPLVGRHIWPRAYGAAKRRRSCPAAVKRRRLRAARRPP

SEQ ID NO: 108573 - protein, 137 aa, Oryza sativa
  Clone ID: PAT_MRT4530_12813C.1.pep
PSLSSREQLSSLCQPPPDPPPSPPRRAAQAPTPSDPRPPSRHHRRPPCWPPPSSRQLADPASPSSRRRIRPPRRRGGGSNLHRRHGGGSGLPRHQGGRSGHLRRRSSGSGLPHSRGGGCGLPRRRGSGSSLPSGRAA

SEQ ID NO: 108574 - protein, 157 aa, Oryza sativa
  unsure (1)..(157): unsure at all Xaa locations
  Clone ID: PAT_MRT4530_12814C.1.pep
RSLGGLGILNLEKFXRALRLRWLWYEWKDENKPWINMETPCDELDKSLFRASTKITLGDGKKTSFWHDFWLSGCAPKDVAPSIFRLAKRKGNCVQLELENNHWLTSLRLITTLAEINDLVHLGSQLQHIVLQTNSLDNITWKWTQHGDYTAKSAYEA

SEQ ID NO: 108575 - protein, 568 aa, Oryza sativa
  Clone ID: PAT_MRT4530_12815C.1.pep
MAEDAPSTAAAAEGSQHASAAEGGSAAALAASVAKAARERDGGGGGGELPCASIHLPQAKRLIGRRFSDKSVQEDIKLWPFKVIAGPDDRPTIVVQHEGKEMQFVPEEVSAMVLSKLRDAAVAYLSEPVTDAVITVPVYFNNAQREATLDAAAIAGLNVMRIINEPSAAAIAYGLDKMPPPASGADAAGRTVLIFDLGGGTLDVSLLNIARPGNNSSSNSDNGSFEFEVKAVAGDTHLGGADFDNAMVKHCINEFIRKNDVAEDGVWSNQKAIRRLRSACERAKRLLSFTAQTSIEVDSLHDGVDFCAKMSRSRFEELNKELFGKCVKAVEKCLEDAKMDKSAVHDVVLVGGSSRIPKVQSMLHDFFQEKKLRHSVNPDEAVAYGAAIQASILNGDSDNADADADDKKRVMILRDITPLSLGVEINFDHTMSVVIPRNTFIPTKNTRRYTTLYDNQIRVSFPVFEGESASTLDNNLLGKFVLSGVLPAPRGVPQIDVTFDFDTNGVLHVFAEDMGTGSKNNNTITNHSGRLKKEDVERMSREARSYNRKRKRTRSSLQMNSGNLVILE

SEQ ID NO: 108576 - protein, 150 aa, Oryza sativa
  Clone ID: PAT_MRT4530_12816C.1.pep
MSTTAKLAGLLRDEQGPVAFNDAVDEDAVPVEPLTEHDDAISTMSAAHCNNMQFRCYRGFWISEMWAPGVVAVHRSFAPRADDVLVASLQKSGTTWLKALTFATMARGAWPPSSHDHPLRRLNPHLCVPSLEVLYTLGRDALLDMLPSPR

SEQ ID NO: 108577 - protein, 1363 aa, Oryza sativa
  Clone ID: PAT_MRT4530_12817C.1.pep
MAASNTTKKGGGGGGPAIGIDLGTTYSCVAVRRRYRSEAITNDQGNRITPSCVAFTAADRFVGDAAENQAALNPTNTIFEVKRLIGRRFSDKSVQEDIKLWPFKVIAGRDDRPTIVVRHEGKEKQFVPEEISAMVLSKLRDAAVAYLGEPVTDAVITVPVYFNNAQREATLDAATIAGLNVMRIINEPSAAALAYGLDKMPPASGGAGRMVLIFDLGGGTLDVSLLNIGRPGNNNSSDSGSFEFEVKAVAGDTHLGGADFNNAIVKHCINEFIRKHGVAAEGIWSNQKAIRRLRTACERAKRMLSFTTLASIEVDSLHDGIDFCGKMSRSRFEELNKELFGKCVKAVKKCLEDAKMDKNAVDDVVLVGGSSRIPKLQSMIHDFFDEKKLRRNVNPDEAVAYGAAIQASVLNGDADEADDKKQVMILRDITPLSLGIEVGLDHTMSVVIPRNTFIPTKNVRRYSTIFDNQIAVSINVFEGESASILRNNLLGKFVLSGILPAPRGVPQIDVTFEFDANGVLHVSAKDMGTGSKNNIAITNHSGRLKKEDVERMAREARSYNRTRSSLAFLNFIEPWKGDAAPLTRDVEPSQVGPTSWTMVLEEDGSFLVPFDPNASDCGDQTMAASNTSKKGGGGDGGGGGGPAIGIDLGTTYSCAAVRRHNRSEVITNDQGNRITPSCVAFTADDRFVGDAAENQAALNPTNTIFEAKRLIGRRFSSKSVQEDIKLWPFKVVAGPDDRPTIVVQHEGKEMQFVPEEISAMVLSKLRDAAVAYLGEPVTDAVITVPVYFNNAQREATLDAAAIAGLNVMRIINEPSAAAIAYGLDKMPPPPASGGGAAVRTVLIFDLGGGTLDVSLLNIGRPGNNSNSGDNGSSFEFEVKAVAGDTHLGGADFDNAMVNHCINEFIRKHDVAEEGIRSNQKAIRRLRSACERAKRLLSFTAQTSIEVDSLHDGVDFCAKMSRSRFEELNKELFGRCVKAVEKCLEDAKMDKGDVHDVVLVGGSSRIPKLQSMLHDFFQEKKLRHSVNPDEAVAYGAAIQASILNGDADDADDKKKAMILRDITPFSLGVEIYDENDHTMSVVIPRNTFIPAKNTQRYTTHRDMQTSVSIKVFEGESASTKNNYLLGEFVLSGITPAPAGVARIDETLEIDANGVLHVSAEDMGTGRKNSITITNHSGRLKKEDVERMSREARSYNRKRKRTRSSLQINSGNLMLQLQQQPATGMELFWSPAVLVFDLGGGTFDVSLLNIDPGVNTDMGRLFEVKATAGDTHLGGADFDNDLFRLFGIPPAPMGVPHFDVTFDIDGNGVLNVTAEDKDTGRKNNIIISNRSGRLNKEEIERMALEAERYKMKRIKQLQIEAVQGN

SEQ ID NO: 108578 - protein, 53 aa, Oryza sativa
  Clone ID: PAT_MRT4530_12818C.1.pep
TTGHILNTAAQNNQNHRSQTTSLTARYIHFATKQGTPTPTKHALKCEQNDLHT

SEQ ID NO: 108579 - protein, 477 aa, Oryza sativa
  Clone ID: PAT_MRT4530_12819C.1.pep
MADRIPAVAAAIAIASLILVVTPEMVSSGFIPRFKLSPKANKQIRDIFKDHAADLAGLAADAIPSKGEGEGSSSDPSQAPATTGGTYLITVGVGTPPQYVYGAFDISSQFVWVPCEECVSPYSCPSDKTGVYKTLPRELYSCGEQRCRTIVGQPDCGAPYNGPCKYTCRYGGAGGTETEGHLGLQPFTLGDNTMPVNMIFGCGLEPETNFGVIGLNRGRLSLISQLQLGRFSYYFAPEYDDTAAGNASFILFGEYAVPQTSNPRYTQFWSYENGAYSYLYLVGLSGMRVGSNNLNMLGAGSGGRDPLVAYLSTSVPITFLEKNAYDLLRRELVSTVGSDTVDGSALGLDLCYTSQYLAKAKFPAMALVFWDGAVMELQPRNYLYQDTATGLECLTILPTAVAGGLSLLGSLIQTGTHMMYYDIQIQGRGSLWFESFDQPSKSSNRASSASAAALPRIISTAAAIACSVWSVVACMFV

SEQ ID NO: 108580 - protein, 447 aa, Oryza sativa
  Clone ID: PAT_MRT4530_1281C.1.pep
MARPPQEAIDTFVSITGADEALAVRKLEEHGGDLNTAINAHFNEGDSTVNRASQNNIPESHDDMMDLDGPLDNAFRRSLFPETLRDPFALMDTNFQQNYFDRVGSTDTFGHGPQVSHPREVREIPIEVKDSNPQTGPSGQAPIIEDVTGHESSYGPEVRGAIVIDDDDDEQPSAPSLHANIDSSLQPNPSIPTAPPLVHVTDYDNDIEEKMIRAAIEASKRDAEAMTITAEQGITQPPEGVNITEHSFDEEDKGTASGTAGRRPSLYPHVEHAPSPALTEQRLLREQQDDEYLASLQADQEKELKALQEAELRRLEETAAREAALEKQKQEEEERRKKQLEEEELESSLASKQASLPSEPAADEEGAVTLVVRMPDGSRQGRRFLKSHKLQFLFDFLDIGRTYKPGTYRLVRSYPRRAFTTGEGDMSFSDLGLTSKQEALFLEKITE

SEQ ID NO: 108581 - protein, 118 aa, Oryza sativa
  Clone ID: PAT_MRT4530_12820C.1.pep
ILTRIHWRQVWVHTAVNPAPNSVYLSFPVKKLVVDLGRPPVRLTRAPTCSTFSAMRSCLTAGRAPPVTLKKLECSNNPSLWIHYHGNNIIGFRPIVCLRIGVNDLIGTSGAFVFHSQR

SEQ ID NO: 108582 - protein, 110 aa, Oryza sativa
  Clone ID: PAT_MRT4530_12821C.1.pep
NRGNRFMQKIFRYKLQKKKRTGNEGHKNESFNLYKIEDADRKKFTQLQKLEQNMKSNDFLIYSLQCTMYQFFVLFYFHVLFPSHIFVTICYMACDAGTFNQLTQMNQENQ

SEQ ID NO: 108583 - protein, 127 aa, Oryza sativa
  unsure (1)..(127): unsure at all Xaa locations
  Clone ID: PAT_MRT4530_12822C.1.pep
ERTPGSRFVNMTEIEVGVPPARKIIXPTAGKITAGGDRXLFAKKKESTPHTHRIGPRGIPARASRYQDAEKGRGQTFHISTARDNRSDAKGRPSAIHRKSRKEKNLPQRNKHKGKARDIKAHFFVKR

SEQ ID NO: 108584 - protein, 49 aa, Oryza sativa
  Clone ID: PAT_MRT4530_12823C.1.pep
MEKGYSSIHIIGTELPKRLDSMPSRVMWLDMAMASIGNPNLGVVMTMKK

SEQ ID NO: 108585 - protein, 88 aa, Oryza sativa
  Clone ID: PAT_MRT4530_12824C.1.pep
QTVTILCSLSLSNRMISFKSQILTMITKINYSIQYIGVKRPFLTAQECPFGVGVLTIPASTFADSEMCTYFIFVTLLKCIILMQTLMY

SEQ ID NO: 108586 - protein, 428 aa, Oryza sativa
  Clone ID: PAT_MRT4530_12825C.1.pep
MIEGSRFQNMLGGAGIGGGIGCRGRQENEMNGFHNMPYYHKVGESSHMSVDNADNLNMMNFVGGSVAMSVDNSSVGSNESRTVMLKHPGLRDMPAPSYSVHNSVIHPNRAMAPTLNEDALARVLMDPSHPTEILSNYEEWTIDLGKLDMGAPFAQGAFGKLYRGTYNGEDVAIKLLEKPENDPERAQLMEQQFVQEVMMLSTLRHPNIVRFIGACRKSIVWCIITEYAKGGSVRQFLARRQNKSVPLGLAVKQALDVARGMAYVHALRFIHRDLKSDNLLISADKSIKIADFGVARIEVQTEGMTPETGTYRWMAPEMIQHRPYDHKVDVYSFGIVLWELITGMLPFTNMTAVQAAFAVVNRGSRPAIPQDCVDSLSKIMTCCWDANPEVRPSFAEIVVMLENAEIEVMRNVRRARFRCCIAGPMTTD

SEQ ID NO: 108587 - protein, 372 aa, Oryza sativa
  unsure (1)..(372): unsure at all Xaa locations
  Clone ID: PAT_MRT4530_12826C.1.pep
MRAGLQCLMSTCSSTKATDNHSFSNTYATSCANLPEVAPSEAPLSDMLVDSFGRFHNYLRISLTERCNLRCQYCMPAEGVELTPSSELLSHDEIIRVADLFVTSGVDKIRLTGGEPTIRKDIEDICLHLSGLKGLKTLAMTTNGLVLSKKLPRLKECGLNALNISLDTLVPAKFEFMTRRKGHSRVMESIDAAIELGFQSVKVNCVVMRGMNDDEICDFVEMTRDKPVNVRFIXFIPFVGYLWNVKKLVPYAEIIVKVRQRLNGHEXLQDHPLETAKNFKIDGHAGTISFITSMTQHFCAGCNRLRLLADGNLKVCLFGPSEVSLREPIRAGVDDAGLREIISAAVKRKKAKHAGMFDIAKTANRPMIHIGG

SEQ ID NO: 108588 - protein, 41 aa, Oryza sativa
  Clone ID: PAT_MRT4530_12827C.1.pep
MPAPTPSLSLWLLPVQLSASSSLLVSSYTFLKPKERAHPAA

SEQ ID NO: 108589 - protein, 141 aa, Oryza sativa
  Clone ID: PAT_MRT4530_1282C.1.pep
PQKLIPLQRGKSRRAKKGETTRRGGRPQKRPNTPTPPTKKKTTHQKKEDPGKPKGGKRPKGTQQRRAQQKPRGQTGANQGEGTNQRGGAHQTAGGPQGRTAEGPPPTKGRAEAPGGPGRPPRPGRPGTAKRRGCEWGGGRK

SEQ ID NO: 108590 - protein, 76 aa, Oryza sativa
  Clone ID: PAT_MRT4530_12830C.1.pep
IPLSSTSSEFYCQAWVSNYQVSRRSWSSPPAARMHKGIIQFEQLKKHSEKAVTAKHRSRTQTEQALVSRGDQEKQR

SEQ ID NO: 108591 - protein, 88 aa, Oryza sativa
  Clone ID: PAT_MRT4530_12831C.1.pep
MPSDAVGRQRPFLSVEEVAEFSSPTPVFARGSPADLDNCIAAASVYTEEEGFGVFFPDHQFSWFDEAAEHQRRQGSSGSNTVFSAPVW

SEQ ID NO: 108592 - protein, 245 aa, Oryza sativa
  Clone ID: PAT_MRT4530_12832C.1.pep
MEEQRGEEEWVMWGSAGRRRIIRQSASWEEQAFARDAAANANLGGCVWPPRFYTCSFCQREFRSAQALGGHMNVHRRDRARLRQRQTSSSSSPSHQEEEAEAPQDQQAGPYYTSFSKPSTTSTDNTTCSNDILLLARDQETIKKRVPRQQVQVVADQDEDEPAGRRYKRRRLGLVDQLPSSCEGGDHHHQVLIITPTTAAASPSSIIASASALVVGDQQHQQAGSVLDLELRLGTSTPPKAVVHA

SEQ ID NO: 108593 - protein, 266 aa, Oryza sativa
  Clone ID: PAT_MRT4530_12833C.1.pep
MAAPPPPAMEPEIGPDGLARENPVIAYTEKVILEEQLQLKKEECGIELYECALWYGLTFTKGARFYSLETGNTLAMSILLGAYSKMCMVASTLEHLRKKIEISTERIRLARVKEEQAKKAWEAAAQIVKDEENAKQNLCDDLNRLVQESAASQFSRLEELKKRLESLNPSRASVDVSGMNTAQHATTSSVPQQAAAQNPQNAPSPANNANHDSSGLSQQQRPADAERKRRPSQMGRGRGGVMILPKGRGSSGSGWTGAGFDVDGRT

SEQ ID NO: 108594 - protein, 128 aa, Oryza sativa
  unsure (1)..(128): unsure at all Xaa locations
  Clone ID: PAT_MRT4530_12834C.1.pep
RPVPYPSTTTRPTAAHYRLAAKTKGVFHQSCSFEPFXLTIIEAAAYGLPVVATKNGGPVDILKVLSNGLWWTRRPAAITPLSAVPTSPGGSESPHGLRNIHRSLPHHCRLTFPRRRQCDHPHRTSAPR

SEQ ID NO: 108595 - protein, 115 aa, Oryza sativa
  Clone ID: PAT_MRT4530_12835C.1.pep
MTEPSPPALEPEIGPDGLARENPVIAYTEKVILEEQLQLKKYIQENYSKIRDVEKELENLSLEMKLTAGPKKAALVHLRKKIEISTDRIRLARVKEEQAKKAWEAAAQIVKHEEN

SEQ ID NO: 108596 - protein, 69 aa, Oryza sativa
  unsure (1)..(69): unsure at all Xaa locations
  Clone ID: PAT_MRT4530_12836C.1.pep
VGGEGGLEGAVVGXPARPPXKXRYSTSGAAILTHXTLDEPRNRTEEXKVXRGRRXQPTLKPLXXRXXVR

SEQ ID NO: 108597 - protein, 152 aa, Oryza sativa
  Clone ID: PAT_MRT4530_12837C.1.pep
MAVNNREEEGEMNLELTLCYTPPPSPEPPLVGFFLCMYCDRKFDSSQALGGHQNAHKYERSLAKRRREIAAALRAHGAPPAADGAGAARYSSPAAAQKAVSVEAQQHRAAPKVREEAHQGASAPELGGIARGNSSPEYGVECPHGLDLSLRL

SEQ ID NO: 108598 - protein, 93 aa, Oryza sativa
  Clone ID: PAT_MRT4530_12838C.1.pep
RNTNHVCFTYLIQKENRTMRNKMDDWKTILISNHHLVGCLVLWMSWKQKTTPVRPKSSSNNGTEHNNHHFSSVNRSTSHILLSWRHVCWVGCT

SEQ ID NO: 108599 - protein, 188 aa, Oryza sativa
  Clone ID: PAT_MRT4530_12839C.1.pep
MSATAVSSLNPDAPLFIPAAFRQVEDFSPQWWDLVKTTAWFRDHWFHEHQQLDEMADSLALHDAAADDDDLAGLLPDDAFDDDDDDDLFFDQTHNLLVDPPQPPAALKTDAVLKALSLVSPKGGDAPRGLREKPRHSEKPTKAHGAKNSWRELDVGASLHANDHVPLTLCQRSLFRNIVRSESWLSDR

SEQ ID NO: 108600 - protein, 237 aa, Oryza sativa
  Clone ID: PAT_MRT4530_1283C.1.pep
MVAPATPRPSRILPRASHSHSQPAAVGLASDRAAAATVSSRRRRNFVFVVNPSGANGRTGNQWKQLLPHLRTRFADQCDICECITSAPFDAIDITREAVKDGADAVIAVGGDGTLHEVVNGFFCKGSPVHALDQGPDHSTALGLIPLGTGSDFARTFGWTNDPHEAIDRIVRGVKSKLDIGMMEGPDGNPHYFVNVADIHLSAKAGLFFFYVQEIWQLMLFLERSEPFGDIEFEILE

SEQ ID NO: 108601 - protein, 160 aa, Oryza sativa
  Clone ID: PAT_MRT4530_12840C.1.pep
MSATAVSSLNPDAPLFIPAAFRQVEDFSPQWWDLVKTTAWFRDHWFHEHQQLDEMADSLALHDAAADDDDLAGLLPDDAFDDDDDDDLFFDQTHNLLVDPPQPPAALKTDAVLKALSLVSPKGGDAPRGLREKPRHSEKPTKYAGSPRSGGAPRVIHQPR

SEQ ID NO: 108602 - protein, 190 aa, Oryza sativa
  Clone ID: PAT_MRT4530_12841C.1.pep
FFFFFAREPTSIFFKCIRTHSPPAKPGTISSNTMHHTLHIRFIATPQHGMQSPHSSFTMVTVHGSTGSHTAPASSASLHTQAAPVSSTKQHHHFLAAHITLQTLRGHTPGVPSLHHTPAGRNLHFRWMPMLRGSHRHSLSSTSWGQVHSITSFQTPTHPILTGNPVQCLHHPSAISMHGKCHQGGPYGQL

SEQ ID NO: 108603 - protein, 72 aa, Oryza sativa
  Clone ID: PAT_MRT4530_12842C.1.pep
MGDIVIIIGCDTAIDWINDIIIFINILPCLFGYAYSAVVDGLLHHHTRAYELKHKGHTFKLDFVLDTDNMHS

SEQ ID NO: 108604 - protein, 601 aa, Oryza sativa
  Clone ID: PAT_MRT4530_12843C.1.pep
MAHDPSLGYADYFAAEVDGTGSSELYGLQQHQQVVGVAEMFGVRGLMPAAHAHEQSKGVGALVVGGGGVDDGGATTLPTVHFGGLGELHQHQHRQSQAPLSLSLHRPEAAATSLLMQQQQQHLHHQPSPPAGAASTWQLQQGAWHLRGSRFLLPTQQLLQEFCSLPVKSTTSPSSASKATKPPQEEAASGGGSSSWTAPTQIQSMDAAELQRLKGKLYTMLEEVDRRYRRYCEQMRALAASFEAVAGERAAASYTRLASRTISRHFRSLRDGVVAQLQAVRKQLGEKDTAVPGMTKGETPRLRVLDQCLRQHKAYQAGMLESHPWRPQRGLPERAVSILRAWLFEHFLHPRMFAGFVTMLKLSPRYPSDVDKHILARQTGLSRSQVANWFINARVRLWKPMVEEMYAEEMKDEEGSGQSTQASNPQNPNPSSYTSEVRGGGGGGEDRGEQKPSRAQLLHDAGSLASVVSIGHGGAGRTMVDHHHHQSLNFGTMDQLDFDAYEAAGGGQGFGAGGGVSLTLGLQQQHADPHDGVNVAFAAAAAPPNSSGVAAEYLFMGGGEHQQQLPQTAQFGAVMEGDAASHYRGLSATAAGFHLLHDLAG

SEQ ID NO: 108605 - protein, 48 aa, Oryza sativa
  Clone ID: PAT_MRT4530_12844C.1.pep
KAMVKMGGIQVKTGTTQGKVRLNCRVVNKRRANPEVELELPPPMDYGD

SEQ ID NO: 108606 - protein, 47 aa, Oryza sativa
  unsure (1)..(47): unsure at all Xaa locations
  Clone ID: PAT_MRT4530_12845C.1.pep
MEDDDDIVAVDGGGSRLMAALEXRHCFRPRCRSICFRSMLKRRGRER

SEQ ID NO: 108607 - protein, 88 aa, Oryza sativa
  Clone ID: PAT_MRT4530_12846C.1.pep
MEMETTLVCACHLAPWRTTWAASSLTVLRNSLDYANVNTSITVVVVVATTVLATTVVVVAVVGGPIWHPRGSGNQIRWGLVHGKGVKS

SEQ ID NO: 108608 - protein, 96 aa, Oryza sativa
  Clone ID: PAT_MRT4530_12847C.1.pep
RIRLIYFPSSTWIRLFDLQRYIIKIYFSICVYRGWSCPLQALLHVQLGVETKGNPKHVFPSKETPRPDETQSDSVLPVRPAAYRRSDQPSTGGLTA

SEQ ID NO: 108609 - protein, 112 aa, Oryza sativa
  Clone ID: PAT_MRT4530_12848C.1.pep
MVALGGCMVQCDKREEYELSVRCVGSNNKHNTYIARSQESTDVAVVTDSQSLAHYLPDGDGCGWRDGGAEAVKRRRCNGCTRWWRDGGGGNADTMEAEGGGGAGVMQAEAEA

SEQ ID NO: 108610 - protein, 109 aa, Oryza sativa
  Clone ID: PAT_MRT4530_12849C.1.pep
MVRDLRCPLEAWELKEISVLIIVVEHVNPMRHEEVKSAREHTGADGLDQGQEDKDVAEKLVGKGADLVGTLVSTTLSARSAVGSGYKDAWSTRAGNCVAIAASHGENSC

SEQ ID NO: 108611 - protein, 142 aa, Oryza sativa
  Clone ID: PAT_MRT4530_1284C.1.pep
WPQPQTPGGAPNPAGHAANAGERASAPATSARRTPPRTPDERRCGAPSRRLPSCRLPPSKPREKRAPRSPPPSFAAPPPSPLAPPPPAGSTSPDAEGAERQTTERTWRRTRYRRRHWEPNVGSGMRRRRALGMAAGLAQVET

SEQ ID NO: 108612 - protein, 134 aa, Oryza sativa
  unsure (1)..(134): unsure at all Xaa locations
  Clone ID: PAT_MRT4530_12850C.1.pep
RPPGPPQGAPPLXPQPPGFPLRNPPVPPPPGRPPVPEVRPPCSRPGPYPGSGNWAPAPGPPVCKGFLRPKASPSPRFVGPNPXRPKGGSPPGPPRPPGAFPPPGGSGIELSPFSGPGEKNKVLPPRGGPVETSG

SEQ ID NO: 108613 - protein, 1237 aa, Oryza sativa
  unsure (1)..(1237): unsure at all Xaa locations
  Clone ID: PAT_MRT4530_12851C.1.pep
QWCPIHKTKSHTLEECHIFRRALARKQAVEEXRRIPTKQESTSTLPITHRHATPASHTSLAVLHRISQRRYPIVVEPTIQNITVARVLVDGGSLINLLFTNTLDAMGIPRSELTPSDQPFHGIIPESSSKPLGKITLAVTFGQADVRTEQITFDVAKFNTTYNAILGRTALAKFMAASHYAYQLLKMPGPKGIITVQGNAKLAVQCDKRSLEMVEHTPTIAATVELPNKVSKPNKAPRPDGATKIVSLASTNPDKIELELITFLHDNTDIFAXQTSDMPGVPRDVIEHKLMVRPDVKLVKXSCADFAPCRKHAIQEELDKLLKAGLVLKANGKWRMCVDFTNLNKACPKDHFPLPRIDXLVDSTAGCELLSFLDAYSGYHQISMAKEDEEKTTFITPFXSFCYTKMPFGLISAGNKYQREIQGVLGDQIXGTLIHDLWETFDNLLXDRLKLNPEKGTFGVXSGKLLGFLFSGRGIEANPEKIKPIKNMKSPTRLKEVXKLTGCMAALSSFVTRMAERGQPFFTLLKKQDRFEWTQVAKDVFIVLKHYLXNPPVLVAPQPNEDLPLYIAATPYSVSTVIIVGREKVHTXVYYVSEALHDTKTRYPQIQKLLYVVVMTSRKLRHYFQAHKVTVVSSFPLGEVVRNKDIIGRIAKWVVELCQFDVHFILRTTIKSXVVANFVADWTIPKNRPVSQTDNETWTMAFDGALNSQGVGAGFILTSPTGDKFKHTIHLDFRATNNTAEYEGLLAGIRAAAALGVKRLIVKGDSELVANQVRKHYKYSNPELTNYLAKVRWHRSXHVYHKDNVKPDNLARRASRIEPLEPGVFLDVLTKPSVKESHEEETPTSANVLEAVTTIDNIVASIKKPEDWRTPLIDFLGANKLPEDDAQAEKLSRQTKIYCLTDNNLYKKAPNGVLLKCVSTDDGXHEGICGSHADGRTLVGKAFRXGFFRPTALKDACGMQTHEDDSTSAPNRTPHMAVLVLGARHNQTNSKRMRQQMIXFVAIDKFTKWIEAEPTXEIKVENAIRFMKGVFCRYGLPHRIITANGPQFISADFQDYSIELGIKICYALVSHPQSNGQVEQANGLVLQGIKTLLWAIHTTPTLSNKETLFFLVYGSEAVLPLELRHQSTXVQNYSNEEQEERHNDYVNLLEEHRERVAIRAAAYQQSLXLCRYQEKRVRARTLAVSDYVLRRVQSQAGKNKLSPKWEXPYTVGSSMAGQTPFQIADGEGPGLSISWKH

SEQ ID NO: 108614 - protein, 104 aa, Oryza sativa
  Clone ID: PAT_MRT4530_12852C.1.pep
LPLPQVGEQADEEGLHAVERPRRKLLRGRLGIGHRGGGGGESVDDDVGDQPEEANTAWLVYPEIRQRAGRQRHRPPAASSERGGGGGEWKPDRRRVFTDYAARL

SEQ ID NO: 108615 - protein, 91 aa, Oryza sativa
  Clone ID: PAT_MRT4530_12853C.1.pep
MAFDGALNSQGVGAGFILTSPTGDKFKHTIHLDFRGTNNTAEYEGLLARIRAAAALGVKRLIVKGDSELGAKITSNPPFSWPASGIDPSDQ

SEQ ID NO: 108616 - protein, 248 aa, Oryza sativa
  unsure (1)..(248): unsure at all Xaa locations
  Clone ID: PAT_MRT4530_12854C.1.pep
IRDQVETAISSMKGVSCRSELPHRIITXNGPQFISADFQDYSIXLGIKICYALVSHPQSNEQVEQATGLVLQGIKTHVYDRLMSYDTQWXEELTSVLWAIHTTPTLSNKETLFFLVYGSEAVLPLELRHQSTXVQNYSNEEQEERHNDYVNLLEEHRERVAIRAAAYQQSLXLCRYQEKRVRARTLAVSDYVLRRVQSQAGKNKLSPKWEGPYTVVRVLRPDAFKIADGEGRGLSNSWNIDMLRNFYV

SEQ ID NO: 108617 - protein, 562 aa, Oryza sativa
  Clone ID: PAT_MRT4530_12855C.1.pep
MDSSSLSLLSFSPRVPLPHPLLPGDHLLSADSPTLSSTSSSMPPRKSISRRGKRLQDRSPTPSPSSSEGSDSEWSGEGYAGTGPQVTQVPRGSTLPPRRSTQAGEGSTRQPRAILAEFPAHDDPTLNSMIAMCEEMCVHNFMTLHQPWCKEVIAQFYATVFFDSRRGIHWMTQGEWYSITYEALATLWGFDENWMRYFANLHDYSIPMHHERHPLYLDGGKLGTTEGFKPFHVYLNRILRRTLTPKDGNASNINHHSRNVLLGFNPTGNPFHAYNFVLEEIRMASIQYRRALPFAPHLMRMIEHVTQTQFICEESHSYLTLRVPKACSAAPDIPTSSSWPPTRDIPSSSTQPPPEQAKQNRRARNKIKKASRRAKQTQAHLYSRFQLGAPPSPPGYEAEPDGPEDDIEDPFVDLPPEYDFFGGFGHGYPPPPPPEDPPQAPFVGNTTKSLLDAQDIVMSEKFACLSLDEQLHSDEEEEEEEEEEEEVEEEEDIEEEEVVEEEEEEIEEEEVKEEEEELREQVQEAGEEVNEEQQGADGVVQSMLMPTDINSVLSYRLYIQYR

SEQ ID NO: 108618 - protein, 33 aa, Oryza sativa
  Clone ID: PAT_MRT4530_12856C.1.pep
KNPIFFSSVINLSLFVSRCFFQSYELRLKSNDL

SEQ ID NO: 108619 - protein, 135 aa, Oryza sativa
  unsure (1)..(135): unsure at all Xaa locations
  Clone ID: PAT_MRT4530_12857C.1.pep
IALSASATTAITRYSSHXFYRTLAHGSPRHPHRQDMMYTVDMNNSTAMFISQTMSPLLYQCCMQMQCMMPQCNXDTIYHMMHNMQQNICAELGHHQMVINMAMQMPYMCNMDTDNLQLSSCGVKKIKRGIHGLKK

SEQ ID NO: 108620 - protein, 106 aa, Oryza sativa
  Clone ID: PAT_MRT4530_12858C.1.pep
MEPGQLPVLAGPCLRHCVSLSKYFMSAPHHFLAAFELCLPNHVGSGHLKGSPDPASLRLGLTGSLTWITLHVLGAGAVWLEGDNGDGGGQSKESSKGTKATDPMGQ

SEQ ID NO: 108621 - protein, 116 aa, Oryza sativa
  Clone ID: PAT_MRT4530_12859C.1.pep
MAQTMMTLSEGPCRGGSRSKKTGKRSGRKTKPVKLPKTLRIMVAAVAQLLPRRVHVISALAIPAPRAPGGGEWEGEQQQLLEDERKMEGEGDQQQQLLEVERRAAILRLVLGEGET

SEQ ID NO: 108622 - protein, 742 aa, Oryza sativa
  Clone ID: PAT_MRT4530_1285C.1.pep
MAAPEAPSCYVGIARQSAAFRLMKQMGWEEGEGLGKDKQGIKGHVRVKNKQDTLGVGVDSPHNKWVYDTTQFDNILKKLKVVLFDNIFGVAEFEDDVSNSPDSTPKEAKPTNNEVTKVTRPQGSLRNTYFRYKKRERGKSVSGYSAKDLEGILVRKSDDNCKVDQEVEPTCCDEPDPIICQDTVSQADDVNWWGHKFGFKSGGFLGAKSRKNKSSATKGTSNVRQTFGEEDQENLYNLVQDKATSGKQGLGIKGLPIKVAGHRWKGNKTSFGDSDEENSTQSNELSELEEDGDEEESANDNELIDANVNTVKEMCVDVKQKHKTKVKKLCKTILRQAPAQSMKLKELKVAVEAHSESMFSNFSCRREALLFLKRKLQGSRKFNIDGKRVQLVSLFVLLMSVRKYGAQYALRYRCANGRTGNQWKQLLPHLRTRFADQCDICECITSAPFDAIDITREAVKDGADAVIAVGGDGTLHEVVNGFFCKGSPVHALDQGPDHSTALGLIPLGTGSDFARTFGWTNDPHEAIDRIVRGSFFDSSFIVCAVSPYSWSHSGHSSPGVKSKLDIGMMEGPDGNPHYFVNVADIHLSAKAGYFSSMYKRFGNLCYVFGALRAFWGHSNRDLRIKVNGGEWKTIRKVTALCIGNAKYFGGGMKITPTADPFGGDLEVVILQDFKWHDFLLKLHRLYGGTHLSVTGVSSIRVQSIEVAEKEVSADIFVQSDGEHFGFLPTKFSVLPGAVDFFC

SEQ ID NO: 108623 - protein, 91 aa, Oryza sativa
  unsure (1)..(91): unsure at all Xaa locations
  Clone ID: PAT_MRT4530_12860C.1.pep
NKAQREGCAYVAFKTNPNSMVTPIAGNSSIFRALPPHVLANAYRISREXAQRLKHNRGHEFGAFTPLQNKSYPPPIMWRDPLKLAMRIKHT

SEQ ID NO: 108624 - protein, 166 aa, Oryza sativa
  Clone ID: PAT_MRT4530_12861C.1.pep
MAAILRSLGRSATTAGLFGRRCRLLSEAASDHQVLTTSPWGVEASVWFRSTCDAERARSITNGRNIYDGCCLLDVQHKIAKNSGHMKKGSASAMMQQERDAAESGVQSIGGDDLAPSPRLLFWGRIIRLSIITYASFKLGQNSARNAYKRTKAELPCLEAVDSTTA

SEQ ID NO: 108625 - protein, 288 aa, Oryza sativa
  Clone ID: PAT_MRT4530_12862C.1.pep
MTTDGVGGEETGSRRQSAAEEKKEAARRQSRRRGSTTPRGRGQGRREGEVAPGAPRHAFTLAPAPLVLGDGRRRRERDGRQQSGDGGSATMARWAEAMSVWEGRTDLGGQALGWRQRRFRGRCESGDGVDALGGGGRWIERRKLKRERGLVAWSGQAQATKGWRQGAIAREGKKEGRTVERGTCPFRFGRRRWERECSASGIWTDAGRAAWARAAELAAGSGAERQRGAGADGGGDRVVGHDQRVRGNQRRWRVQKAAAGIGAGERGSREGERRNQGRLKERIRDGNL

SEQ ID NO: 108626 - protein, 75 aa, Oryza sativa
  unsure (1)..(75): unsure at all Xaa locations
  Clone ID: PAT_MRT4530_12863C.1.pep
FTMSKRGKHVSKLSVELNYQLLLRHPYCFLXHMDQPTXDXSDPNXFRSNLTVQXXTGXASFLGGICSXRASTSKC

SEQ ID NO: 108627 - protein, 2069 aa, Oryza sativa
  unsure (1)..(2069): unsure at all Xaa locations
  Clone ID: PAT_MRT4530_12864C.1.pep
NIRNQALRPVAAPAQQQPAKREQGSKPVVCFNCGDPGHYADKCPKPRRVKVVPAQARVNHVAAAEAQDAPDVILGTFLVNLVPATVLFDSGATHSFLSKSFAGNHGMEVEDLRRPLMVSTPSNQALSLQRSPFVRIEIQGIPFLANLILLESKDLDVILGMDWLARHKGVIDCANRKVTLTSNDGRVVTVLALSSESLRSRQNQITLEEIPIVREYSDVFPDDLPGMPPKRDIEFRIDLVPGTTPIYKRPYRMAANELAEVKRQVDDLLQKGYIRPSSSPWGALVIFVEKKDHTQRMCVDYRALNDVTIKNKYPLPRIDDLFDQLKGATVFSKIDLRSGYHQLRIKEEDIPKTAFTTRYGLFECTIMSFGLTNAPAFFMNLMNKVFMEYLDKFVVVFIDDILIYSRTKEEHEEHLRLALEKLREHQLYAKFSKCEFWLSEVKFLGHVISAGGVAVDPSNVESVTNWKQPKTVSEIRSFLGLAGYYRRFIENFSKIAKPMTRLLQKDVKYKWSEECEQSFQELKSRLISAPILILPDPKKGFQVYCDASKLGLGCVLMQDGKVVAYASRQLRPHEKNYPTHDLELAAVVHALKIWRHYLFGTRTEVYTDHKSLKYIFTQPDLNMRQRRWLELIKDYDMGIHYHPGKANVVADALSRKGYCNATEGRQLPLXLCKEFERLNLGIVSRGFLASLEAKPTLIDQVREAQINDPDIQEIKKNMRRGKAIGFLEDEQGTVWLGERICVPDNKDLKDAILKEAHDTLYSIHPGSTKMYQDLKERFWWASMKREIAEYVAVCDVCQRVKAEHQKPAGLLQPLKIPEWKWEEIGMDFITGLPRTSSGTTYSGSRLAELYMARIVCLHGVPKKIVSDRGSQFTSNFWKKLQEEMGSKLNFSTAYHPQTDGQTERVNQILEDMLRACALDFGGSWDKNLPYAEFSYNNNYQASLQMAPYEALYGRKCRTLLLWDQTGDRQVFGTDILRESEEKVKVIQERLRVAQSRHKSYADNRRRDLSFEEGDYVYLRVTPLRGVHRFHTKGKLAPRFVGPYKIVSRRGEVAYQLELPQSLAGVHNVFHVSQLKKCLRVPTEEANLEQIEVQEDLTYVEKPIRSAAVRRRACAVRAAEPPPPVVTSPMPRYKPEYLFGVEGFVQELRTMSFAIGFGTAPFYAQIPHDRHEEKCRVKVTLNSNSEGIPSVMFEAGGRNYIHACQEVARIAIGELRDRYSDQLADTEYRYHPRQPQGSDRGSYLETEGIENDATTRHLVEMLWAMDETRAETVLAAQDREDRNRGKICKLEDKVDRLEKELAALKGEAPPQKARIRLTARKRALFVPRYQLAPKVRVVEKEVAPTLADPPVMIMVNTRSNGNGPNNPNNNNNEGNPTLAQVLAQQTQLMNMMMQQLQNQQNQGNNHAPPQNKLAEFLRVRPPIFSSTTNPVEAGDWLHAIEKKLDLLQCTDQEKVSFASHQLHGPASEWWDHFRLNRTTVEPITWLEFTAAFRKTHIPSGVVSLKKKEFRSLTQGSRSVTEYLHEFNRLTRYAPEDVRNDEERXEKFLEGLNDELSYPLMTGDYSDFQKLVDKAIRQEDNAGNNIRNQAPRPVAAPTQQQPAKREQGSKPVVCFNCGDPRHYADNSPKPRRVKVVPAQSNSTAPAPMARVNHVAAAEAQDAPDVILGTFLVNSVPATVLFDSGATHSFLSMSFAGNHGMEVEDLRRPLMVSTPSNQALSLQRSPSVRIEIKGVPFLANLILLESKDLDVILGMDWLARHKGXDYANRKVTLTSNDGRVVTVHALSSESLRSRLNQITLEEIPIVREYPDMFPXDLPGMPPKRDIEFRIDLVPGTTPIHKSPYRMAANELAEVKRQVDDLLQKGYIRPSSSPWGAPVIFVKKKGHTQRMCVDYRALNDVTIKNKYPLPRIDDLFDQLKEFVVVFIDDILIYSRTREEHEEHLRLALEKLREHQLYAKFSKCEFWLSEVKFLGHVISAGGVAVDPSNVESVTNWKQPKTVSEIRSFLGLAGYYRRFIENFSKIAKPMTRLLQKDIPSFPDSPFSQEKSLKSSKASKASHTDPKQPFEHVDPI

SEQ ID NO: 108628 - protein, 1443 aa, Oryza sativa
  Clone ID: PAT_MRT4530_12865C.1.pep
MVVQNDWAYATGMPRYKPEYLFGVEGFVQELRTMSFVIGFGTAPFYAQIPHDRHEEKCRVKVTLNSNSEDIPSVMFEARGRNYIHACQEVARIAIGELRDRYSDQLADTEYRYHPRQPQGSDRGSYLETEGIENDATTRHLVEMLRAMDETRAEVVLAAQDREDRNRGKICKLEDKVDRLEKELAALKGEAPPQKARIRLTARKRALFVPRYQLAPKVRVVEKEVTPALADPPVVNMVLTRSNGNGPNNNNNNNNNGENPTLAQVLAQQAQLMNMMMQQLQNQQNQGNNHAPPQNKLAEFLRVRPPTFSSTTNPVEAGDWLHDIEKKLDLLQCTDQEKVSFASHQLHGPASEWWDHFRLNRTTAEPITWLEFTAAFRKTHIPSGVVSLKKEFRSLTQGSRSVTEYLHEFNRLARYAPEDVRTDEERQEKFLEGLNDELSYPLMTGDYHDFQKLVDKAIRQEDKYNRMEQKKRRIAQFKAQQGNSQRPRLTLGPQSMPQGGSSSVVRPHRQFFNHNAGNNIRNQAPRPVAASTQQQPAKKEQGSKPGVCFNCGDLGHYADKCPKPRRVKVVPTQSNSTAPASKARVNHVAAAEAQGAPDVILGTFLVNLVPATVLFDSGASHSFLSMSFAGNHGMEVEDLRRPLMVSTPSNQALSLQRSPSVRIEIQGVPFLANLILLESKDLDVILGMDWLARYKGVIDCANRKVTLTSNDGRVVTVHALSSESLRSRLNQITLDEIPVVREYPDVFPDNLPGMPPKRDIEFRIDLVPGTTPIHKRPYRMAANELAEVKRQVDDLLQKGYIRPSSSPWGAPIDLRSGYHQLRINEEDIPKTAFTTRYELFECTGMSFGLTNAPAFFMNLMNKVFMEYLDKFVVVFIDDILIYSRTKEEHEEHLRLALEKLREHQLYAKFSKCEFWLSEVKFLGHVISAGGVAVDPSNVESVTNWKQPKTVSEIRSFLGLAGYYQRFIENFSKIAKPMTRLLQKDVKYKWSEECEQSFQELKNRLISAPILILPDPKKGFQVYCDASKLGLGCVLMQDGKVVAYASRQLRPHEKNYPTHDLELAAVVHALKIWRHYLFGTRTEDEQGTVWLGERICVPDNKDLKDAILKEAHDTLYSIHPGSTKMYQDLKERFWWASMKREIAEYVAVCDVCQRVKAEHQKPAGLLQPLKIPEWKWEEIGMDFITGLPRTSSGHDSIWVIVDRLTKVAHFIPVKTTYSGSRLAELYMARIVCLHGVPKKIVSDRGSQFTSKFWKKLQEEMGSKLNFSTAYHPQTDGQTERTYAEFSYNNSYQASLQMAPYEALYGWKCRTPLLWDQTGERQVFGTDILREAEEKVKTIQERLRVAQSRHKSYADNRRRDLSFDEGDYVYLRVTPLQGVHRFHTKGKLAPRFVGPYKIVSRRGEVAYQLKLPQSLAGVHNVFHVSQLKMCLRVPTEETNLEQIEV

SEQ ID NO: 108629 - protein, 1473 aa, Oryza sativa
  Clone ID: PAT_MRT4530_12866C.1.pep
MVRCGGLCCARGTVTAPFRAPGLEWYIPGLEIELCSRDGCSEWLGLCNRMPRYKPEYLFGVEGFVQELRTMSFVIGFRTTPFYAQIPHDRHEEKCRVKVTLNSNSEDIPSVMFEAGGGNYIHACQEVARIAIGELRDRYSDQLADTKYRYHPRQPQGSDRGSYLETEGIENDATTRHLVEMLWAMDETRAETVLAAQDREDQNRGKICKLEDKVDRLEKELAALKGEAPPQKARIRLTARKRALFVPRYQLAPKMVLTRSNGNGPNNNNNNNNGENPTLAQVLAQQAQLMNMMMQQLQNQQNQGNNHAPPQNKLVEFLRVRPPTFSSTTNPVEAGDWLHAIEKKLDLLQCTDQEKVSFASHQLHGPASEWWDHFRLNRTTAEPITWLEFTAAFRKTHIPSGVVSLKKKEFRSLTQGSRSVTEYLHEFNRLARYAPEDVRTDEQRQERFLEGLNDELSYPLMTGDYHDFQKLVDKAIRQEDKYNRMEQKKRRIAHFKAQQGNSQRPRLTLGPQSMPQGGSSSVVRPQRQFFNNNAGNNIRNQAPRPVAASTQQQPAKKEQGIKPGVCFNCGDPGHYADKCPKPRRVKVVPAQSNSTAPASKARVNHVAAAEAQGAPDVILDCANRKVTLTSNDGRVVTVHALSSESLRSSLNQITLEEIPVVREYPDVFPDDLPGMPPKRDIEFRIDLVPGTTPIHKRPYRMAANELAEVKRQVDDLLQKGYIRPSSSPWGAPVIFVEKKDHTQRMCVDYRALNDVTIKNKYPLPRIDDLFDQLKGATVFSKIDLRSGYHQLRIKEEDIPKTAFTTRYGLFECTVMSFGLTNAPAFFMNLMNKVFMEYLDKFVVVFIDDILIYSHTKEEHEEHLRLALEKLREHQLNVESVTNWKQSKTVSEIRSFLGLAGYYRRFIENFSKIAKSMTRLLQKDVKYKWSEECEQSFQELKNRLISAPILILPDPKKGFQVYCDASKLGLGCVLMQDGKVVAYASRQLRPHEKNYPTHDLELAAVVHALKIWRHYLFGTRTEVYTDHKSLKYIFTQPDLNMRQRRWLELIKDYDMGIHYHPGKANVVADALSRKGYCNATEGRQLPLELCKEFERLNLGIVSRGFVAALEAKPTLIDQVREAQINDPDIQEIKKNMRRGKAIGFLEDEQGTVWLDERICVPDNKDLKDVILKEAHDTLYSIHPGSTKMHQDLKERFWWASMKHEIAEYVATDGQTERVNQILEDMLRACALDFGGSWDKNLPYAEFSYNNSYQASLQMAPYEALYGRKCRTPLLWDQTGERQVFGMDILREAEEKVKIIQERLRVAQSRHKSYADNRRRDLSFDEGDYVYLCVTPLRGVHRFHTKGKLAPCFVGPYKIVSRRGEVAYQLELPQSLAGVHNVFHVSQLKKCLRVPTEETNLEQIEVQEDLTYVEKPIRILEIDERRARNRVIRFCKVQWSNHSEEESTWEQEDELKSAHPHLFASSSESRGRDSV

SEQ ID NO: 108630 - protein, 1596 aa, Oryza sativa
  Clone ID: PAT_MRT4530_12867C.1.pep
MAAKSSHVAASPARLPLPRMPRYKPEYLFGVEGFVQELRTMSFVIGFGTAPFYAQIPHDRHEEKCRVKVTLNSNSEDIPSVMFEAGGRNYIHACQEVARIAIGELRDRYSDQLADTEYRYHPRQPQGSDRGSYLETEGIENDATTRHLVDMLWAMDETRAETVLAAQDREDRNRGKICKLEDKVDRLEKELAALKGEAPPQKARVRLTARKRALFVPRYQLAPKVRVVEKEVTPALADPPVVNMVLTRSNGNGPNNNNNNNNNNGENPTLAQVLAQQAQLMNMMMQQLQNQQNQGNNHAPPQNKLAEFLRVRPPTFSSTTNPVEAGDWLHAIEKKLDLLQCTDQEKVSFASHQLHGPASEWWDHFRLNRTTAEPITWLELTAAFRKTHIPSGVVSLKKKEFRSLTQGSRSVTEYLHEFNRLARYAPEDKLVDKAIRQEDKYNRMEQKKRRIAQFKTQQGNNQRPRLTLGPQSMPQGGSSSVVRPQRQIFNNNAGNNISNQAPRPVAVSTQQQPAKREQGSKPVVCFNCGEPGHYADKCPKPRRVKVVPTQSNSTVPVSKASVNHVAAAEAQGAPDVILGTFLVNLVPATVPFDSGATHSFLSMSFAGNHGMEVEDLRRPLMVSTPSNQALSLQRSPSVRIEIQGVPFLANLILLESKDLDVILGMDWLARHKGVIDCANRKVTLTSDDGRVVTVHALSSESLRSSLNQIILKEIPIVRGYPDVFPDDLPGMPPKRDIEFRIDLVPGTTPIHKRPYRMAANELAEVKRQVDDLLQKGYIRPSSSPWGAPVIFVEKKDHTQRMFVDYRALNDVTIKNKYPLPRIDDLFDQLKGATVFSKIDLRSGYHQLRIKEEDIPKTAFTTRYGLFECTVMSFGLTNAPAFFMNLMNKVFMEYLDKFVVVFIDDILIYSRTKEEHEEHLRLALEKLREHQLYAKFSKCEFWLSEVKFLGHVISAGGVAVDPSNVESVTNWKQPKTVSEIRSFLGLAGYYRRFIENFSKIAKPMTRLLQKDVKYKWSEECEQSFQELKNRLISAPILILPDPKKGFQVYCDASKLGLGCVLMQDGKVVAYASRQLRPHEKNYPTHDLELAAVVHALKIWRHYLFALEAKPTLIDQVREAQINDPDIQKIKKNMRRGKAIGFLEDEQGTVWLGERICVLDNKDLKDAILKEAHDTLYSIHPGSTKMYQDLKERFWWASMKREIAEYVAVCDVCQRVKAEHQKPAGLLQPLKIPEWKWEEIGMDFITGLPRTSSGHDSIWVIVDRLTKVAHFIPVKTTYSGSRLAELYMARIVCLHGVRKKIVSDRGSQFTSNFWKKLQEEMGSKLNFSTAYHPQTDGQTERVNQILEDMLRACTLDFGGSWDKNLPYAEFLYNNSYQASLQMAPYEALYGRKCRTPLLWDQTGERQVFGTDILREAEEKVKIIQERLRVAQSRHKSYADNRRRDLSFEEGDYVYLRVTPLRGVHRFHTKGKLAPRFVGPYKIVSRRGEVAYQLELPQSLAGVHNVFHVSQLKKCLRVPTEEANLEQIEVQEDLTYVEKPIRILETNERRTRNRVIRFCKVNWSNHSEEESTWEREDELKSAHPHLFASSSESRGRDSV

SEQ ID NO: 108631 - protein, 1578 aa, Oryza sativa
  Clone ID: PAT_MRT4530_12868C.1.pep
ACAPEPPPEVTSPLTSSWPSAIPTFPESPFSQGKILKSSKASKATPGLEWYIPGLEIDLYSRMPRYKPEYLFGVEGFVQELRTMSFAIGFGTAPFYAQIPHDRHEEKCRVKVTLNSNSEDIPSVMFEAGGRNYIHTCQEVARIAIGELRDRYSDQLADTEYRYHPRQPLGSDRGSYLETKGIKNDATTRHLVKMLWAMDETRAETVLAAQDREDRNRGKICKLEDKVDRLEKELAALKGEAPPQKARIRLTARKRALFVPRYQLAPKVRVVEKEVTPALADPPVVNMVLTRNNGNDPNNNNNNSNGENPTLAQVLAQQAQLMNMMMQQLQNQQNQGNNHAPPQNKLAEFLRVRPPTFSSTTNPVEAGDWLHAIEKKLDLLQCADQEKVSFASHQLHGPASEWWDHFRLNRTTAEPITWLEFTAAFRKTHIPSGVVSLKKKEFRSLTQGSRSVTEYLHEFNRLARYAPEDVRTDEERQEKFLEGLNDELSYPLMTGDYPDFQKLVDKAIRQEDKYNHMEQKKRRIAHFKAQQGNSQRPSLTLGPQSMPQGGSSFVVRPQHQFFNNNAGNNIRNQAPRPVAASTQQQPAKKEQGSKSGVCFNCGDPGHYADKCPKPRRVKVVPAQSNSTVPASKARVNHVAAAEAQDAPDVILGTFLVNLVPTTVLFDSGATHSFLSMSFAGNHGMEVEDLRHPLMVSTPSNQALSLQRSPSVRIEIQGVPFLANLILLESKDIDVILGIDWLARYKGVIDCANRKVTLTSNDGRVVTVHALSSESLRSRLNQITLEEIPVVREYPDVFPDDLPGMPPKRDIEFRIDLVPGTTPIHKRPYRMAANELAEVKRQVDDLLQKGYIRPSSSPWGAPVIFVEKKDHTQRMCVDYRALNDVTIKNKYPLPRIDDLFDQLKGATVFSKIDLRSGYHQLRIKEEDIPKTAFTTRYGLFECTVMSFGLTNAPAFFMNLMNKVFMEYLDKFVVVFIDDILIYSRTKEEHEEHLRLALEKLREHQLYAKFSKCEFWLSEVKFLGHVISAGGVAVDPSNVESVTNWKQPKTVSEIRSFLGLAGYYRRFIENFSKIAKPMTRLLQKDVKYKWSEECEQSFQELKNRLISAPILILPDPKKGFQVYCDASKLGLGCVLMQDGKVVAYASRQLRPHEKNYPTHDLELAAVVHALKIWRHYLFGTRTEVYTDHKSLKYIFTQPDLNMRQRRWLELIKDYDMGIHYHPGKANVVADALSRKGYCNATEGRQLPLELCKEFERLNLGMVRRGFVAALEAKPTLIDQVREAQINDPDIQEIKKNMRRGKAIGFLEDEQGTVWLGERICVPDNKDLKDAILKEAHDTLYSIHPGSTKMYQDLKERFWWASMKREIAEHVAVCDVCQRVKAEHQKPAGLLQPLKIPEWKWEEIGMDFITGLPRTSSGHDSIWVIVDRLTKVAHFIPVKTTYSGSRLAELYMARITDGQTKRVNQILEDMLRACALDFGGSWDKNLPYAEFSYNNSYQASLQMAPYEVLYGRKCRTPLLWDQTGERQVFGMDILREAEEKVKIIQERLRVAQSRHKSYADNRRRDLSFDEGDYVYLRVTPL

SEQ ID NO: 108632 - protein, 2038 aa, Oryza sativa
  Clone ID: PAT_MRT4530_12869C.1.pep
MGLPTLALTQASASLRGFGGESVQVLGQAQLLVAFGTGKNRREEKIMFDVVDIPYNYNAIFGCATFNKFEAISHHNYLKLKMPGPVGVIVVKGLQPSAASKGDLAIINRAVHNVEAEPHDPAKHAPKPAPHGKVIKIQIDDTDPTKLVSLGGDMGEEEVENILEVLKKNIDNFAWGPDEVGSVSTDLIMHHLAVMPDAKPRKQKLRKMSVDLQEAAKAEVQKLLKARVIQEIDHPEWLANPVLVRKSNDKYRMCVDFTNLNKAWPKDDFPLPRIDQLVDSTAGYELMSFLDAYSGYHQIHMNPADIPKTSFITPFGTFCHLRMPFGLRNAGATFARQVYKPCFAVVPVVAVARGDRHRGRHRVAVLVRPFAVAVDRRSIAVVVKPKDPAAFSSTPPPSVHLPPSFWSSIPTFPESPFSQEKNLKSSKATPGLEWYIPGLEIELYSRDGCSEWLGLYNRMPCYKPEYLFGVEGFVQELRTMSFAIGFGTTPFYAQIPHDRHEEKCRVKVTLNSNSEDIPSVMFEAGGRNYIHACQEGSDRGSYLETEGIENDATTKHLVEMLWAMDETRAETVLAAQDREDRNHEKELAALKGEAPPQKARIRLTARKRALFVPRYQLAPKVRVVEKEVTPALANPPVVNMVLTRSNGNGPNNNNNNNNGENPTLAQVLAQQVQLMNIMMQQLQNQQNQGNNHAPPQNKLAEFLHVRPPTFSSTTNPVEAGDWLHAIEKKLDLLQCTDQEKVSFASHQLHGLASEWWDHFRLNRTTTEPITWLEFTAAFRKTHIPSGVVSLKKKEFRSLTQGSRSVTEYLHEFNRLARYAPEDVRTDEERHERFLEGLNDELSYPLMTGDYHDFQKLVDKAIRQEGKYNRMEQKKRRIAQFKAQQGNSQRPRLTLGPQSMRQGGSSSVVRPQRQFFNNNAGNNIRNQAPRPVAASTQQQPAKKEQGSKPVVCFNCGDPGHYADKCPKPRRVKVVPAQSNSTVPASKARVNHVAAAEAQGAPDVILGTFLVNLVPATVLFDSGATHSFLSMSFAGNHGMEVEDLRRPLMVSTPSNQALSLQRSPSVRIEIQGVPFLANLILLESKDLDVILGMDWLARYKGVIDCANRKVTITSNDGRVVTVHALSSEPLRSRLNQITLEEIPIVREYPDVFPDDLPGMPPKRDIEFRIDLVPGTTPIHKRPYRMAANELAEVKRQVDDLLQKGYIRPSSSPWGAPVIFVEKKDHTQRMCVDYRALNDVTIKNKYPLPRIDDLFDQLKGAIVFSKIDLRSGYHQLRIKEEDIPKTAFTTRYGLFECTVMSFGLTNAPAFFINLMNKVFMEYLDKFVVVFIDDILIYSRTKEEHEEHLRLALEKLREHQLYAKFSKCEFWLSEVKFLGHVISAGGVAVDPSNVESITNWKQPKTVSEIRSFLGLAGYYRRFIENFSKIAKPMTRLLQKDVKYKWSEECKQSFQELKNRLISAPILILPDPKKGFQVYCDASQLGLGCVLMQDGKVVAYASRQLRPHEKNYPTHDLELAAVIHALKIWRHYLFGTCIEVYTDHKSLKYIFTQPDLNMRQRRWLELIKDYDMGIQYHPGKANVVADALSRKGYCNATEGRQLPLELCKEFERLNLGIVRRGFVAALEAKPTLIDQVREAQINDPDIQEIKKNMRRGKAIGFLEDEQGTVWLGERICVPDNKDLKDAILKEAHDTLYSIHPGSTKMYQDLEERFWWASMKREIAEYVAVCDVCQRVKAEHQKPAGLLQPLKIPEWKWEEIGMDFITGLPRTSSGHDSIWVTDGQTERVNQILEDMLRACALDFGGSWDRNLPYAEFSYNNSYQASLQMAPYEALYGRKCRTPLLWDQTGERQVFGTDILREAEEKVKIIQERLRVAQSRHKSYADNRRRDLSFDEGDYVYLRVTPLRGVHRFHTKGKLVPHFVGPYKIVNRRGEVAYQLELPQSLAGVHNVFHVSQLKKCLRVPTEEANLEQIEVQEDLTYVQKPIRILEIEERRTRNRVIRFYKVQWSNHSEEESTWEREDELKSAHPHLFASSSESRGRDSV

SEQ ID NO: 108633 - protein, 131 aa, Oryza sativa
  Clone ID: PAT_MRT4530_1286C.1.pep
MPSQTRKLRDSAKQTRTRTLPVYHENLRPGEPSTGPTETKDISKGAGWRQAAKVEETASVKAKRQKPWHRVDQLRQRRTLPEEHTVESREGKALPRRAWVLPSIKPCKEKAQRANMPSRGFAKDWAESLGH

SEQ ID NO: 108634 - protein, 142 aa, Oryza sativa
  Clone ID: PAT_MRT4530_12870C.1.pep
RWPGKVGTCCGWSAPASTPTTSPAASAGRSATPTSSSSAPCTTPTHVAPPPAATPPPQRAAASAAATAVTTTPPSSPPGAAAPTAPAATSCTAAATTRRTTTRRRSIRTTAATTRRRTAPPRCSTSTTRRAATTIPTAAPSC

SEQ ID NO: 108635 - protein, 1533 aa, Oryza sativa
  unsure (1)..(1533): unsure at all Xaa locations
  Clone ID: PAT_MRT4530_12871C.1.pep
MTSPLTSSWPSAIPTFPESPFSQEKNLKSSKASKATPGLEWYIPGLEIELCSRDGCSEWLGLCNRMPRYKPEYLFGVEGFVQELRTMSFAIGFRTAPFYAQIPHDRHEEKCRVKVTLNSNSEDIPSVMFEAGGRNYIHACQEVARIAIGELRDRYSDQLADTEYRYHPRQPQGSDRGSYLETEGIENDATTRHLVEMLWAMDETCAETVLAAQDREDRNRGKICKLEDKVDRLEKELAALKGEAPPLKARVRLTARKRALFVPRYQLAPKVRVVEKEVTPALADPPVVNMVLTRSNGNGPNNNNNNNNNNGENPTLAQVLAQQAQLMNMMMQQLQNQQNQLNQGNNNAPPPQNKLAEFLRVRPPIFSSTTNPVEAGDWLHAIEKKLDLLQCTDQEKWDHFRLNRTTAEPITLLEFTAAFRKMHIPSGVVSLKKKEFRSLTQGSRSVTEYLHEFNRLARYAPEDVRNDEERQEKFLEGLNDELSYPLMTGDYPDFQKLVDKAIRQEDKYNRMEQKKRRIAHFKAQQGNSQRPRLTLGPQSMPQGDPGHYADKCPKLRRVKVVLAQSNSTAPASKARVNHVAAAEAKDAPDVILGTFFVNSVPATVLFDSGATHSLLSMSFAGNHGMEVEDLRRPLVVSTPSNQALSLQRSPSVRIEIQEVPFLANLILLESKDPDVILGMDWLARYKGVIDCANRKVTLTSDDGRVVTVHALSSESLRPSLNQITLEEIPIVRDYPDVFPDDLPGMPPKRDIEFRIDLVPGTTPIHKRPYRMAANELAEVKRQVDDLLQKGYIRPSSSLWGAPVIFVEKKDHTQRMCVDYRALNDVTIKNKYPLPRIDDLFDQLKGATVFSKIDLRSGYHQLRIKEEDIPKTAFTTRYGLFECTVMSFGLTNAPAFFMNLMNKVFMEYLDKFVVVFIDDILIYSRTKEVHEEHLCLALEKLREHQLYAKFSKCEFWLSEVKFLGHVISAGGVAVDPSNVESVTNWKQPKTVSEIRNFLGLAGYYRRFIENFSKIAKPMTRLLQKDVKYKWSEECEQSFQELKNRLISAPILILPGPKKGFQVYCDASKLGLGCVLMQDGKVVAYASRQLRPHEKNYPTHDHELAAVVHALKIWRLLSVLDYDMGIHYHPGKANVVADALSRKGYCNATEGRQLPLELCKEFERLNLGIVSRVREAQINDPDIQEIKKNMRRGKAIGCLEDEQGTVWLGERICVPDNKDLKDAILKEAHDTLYSIHPGSTKMYQDLKERFWWASMKREIAEYVTVCDVWQRVKAEHQKPAGLLQPLKIPEWKWEEIGMDFITGLPRTSSGHDSIWVIVDRLTKVAHFIPVKTTYSGSRLAELYMARITDGQTERVNQILEDMLRACALDFGGSWDKNLPYAEFSYNNSYQASLQMAPYEALYGRKCRTPLLWDQTGERQVFGTDILREAEEKVKIIRERLRVAQSRHKSYADNRRRDLSFDDGDYVYLRVTPLRGVHRFHTKGKLAPRFVGPYKIVSRRGEVAYQLELPQSLAGVHNVFHVXQLKKCLRVPTEEA

SEQ ID NO: 108636 - protein, 71 aa, Oryza sativa
  unsure (1)..(71): unsure at all Xaa locations
  Clone ID: PAT_MRT4530_12872C.1.pep
HSTNDCNVTCILHSRSLEMQYHYIHPPIQYISKLSNFXFLXLREQQQHICNSITAAVAQWPKAQQQQHXGQ

SEQ ID NO: 108637 - protein, 1588 aa, Oryza sativa
  Clone ID: PAT_MRT4530_12873C.1.pep
MRLVDGRPQGVRVGRFINAAGTTGFPTGKRAMPRYKPEYLFGVEGFVQELRTMSFVKGFGTAPFYAQIPHDRHEEKCRVKVTLNSNSEDIPSVMFEAGGRSYIHTCQEVARIAIGELHDRYSDQLADTEYRYHPRQPQGSDRGSYLETEGIEIDATTRHLVEMLWAMDETRAETVLAAQDREDRNRGKICKLEDKVDRLEKELAALKGEAPPQKARIRLTARKRALFVPRYQLAPKVRVVEKEVTPAPADPPVVNMVLTHSNGNGPNNNNNNNNNGENPTLAQVLAQQAQLMNMMMQQLQNQQNQGNNHAPPQNKLAEFLRVRPPTFSSTTNPVEAGDWLHAIEKKLDLLQCTDQEKVSFASHQLHGPASEWWDHFRLNRTTAEPITWLEFTAAFRKTHIPSGVVSLKKKEFRSLTQRSRSVTEYLHEFNRLARYAPEDVRTDEERQEKFLEGLNDELSYSLMTGDYHDFQKLVDKAIRQEDKYNRMEQKKRRIAQFKAQQGNSQRPRLTLGPQSMPQGGSSSVVRPQRQFFNNNAGNNIRNQAPRHVAASTQQQPAKKEQGSKPMVCFNCGDPGHYADKCPKPRRVKVVPTQSNSTVPASKAHVNHVAAAEAQGAPDVILGTFLVNSVPATVLFDSGATHSFLSMSFAGNHGMEVEDLRRPLMVSTPSNQVLSLRRSPSVRIEIQGVPFLANLILLESKDLDVILGMDWLARYKGVINCANRKVTLTSNDGRVVTVHASSSESLRSRLNQITLEEIPVVREYRDVFPDDLPGMPPKRDIEFRIDLVPGITPIHKRPYRMAANELAEVKRQVDDLLQKGYIRPSSSPWGAPVIFVEKKDHIQRMCVDYRALNDVTIKNKYPLPRIDDLFDQLKSATVFSKIDLRSGYHQLRIKEEDIPKTAFTTRYGLFECTVMSFGLTNAPAFFMNLMNKVFMEYLDKFVVVFIDDILIYSRTKEEHEEHLRLALEKLREHQLYTKFSKCEFWLSEVKFLGHVISAGGVAVDPSNVESVTNWKQPKTVSEIRSFLGLTGYYRRFIENFSKIAKPMTRLLQKDVKYKWSEECEQSFQELKSRLISAPILILPDPKKGFQVYCDASKLGLGCVLMQDGKVVAYASHQLRPHEKNYPTHDLELAAVVHALKIWRHYLFGTRTEVYTDHKSLKYIFTQPDLNMRQRRWLELIKDYDMGIHYHPGKANVVADALSRKGYCNATEGRQLPLELCKEFERLNLGIVSRGFVAALEAKPTLIDQVREAQINDPDIQEIKKNIRRGKAIGFLEDEQGTVWLGERICVPDNKDLKDAILKEAHDTLYSIHPGSTKMYQDLKERFWWASMKREIAEYVAVCDVCQRVKAEHQKPVGLLQPLKIPEWKWEEIGMDFITGLPRTSSGHDSIWVIVDRLTKVAHFIPVKTTYSGSRLAELYMARIVCLHGVPKKIVSDRGSQFTSNFWKKLQEEMGSKLNFSTAYHLQTDGQTERVNQILEDMLRACALDFGGSWDKNLPYAEFSYNNSYQASLQMASYEALYGRKCRTPLLWDQTGERQVFGTDILREAEEKIPTFSESPFSQEKNLKSSKASKASHTDPKQPFKHVDPI

SEQ ID NO: 108638 - protein, 1600 aa, Oryza sativa
  Clone ID: PAT_MRT4530_12874C.1.pep
MSFVISLTLLTIVNDAIIGNNLISSWFGMMPRYKPEYLFGVEGFVQELRTMSFVIGFETAPFYAQIPHDRHEEKCRVKVTLNSNSEDIPSVMFEAGGRNYNHACQEVARIAIGELRDRYSDQLADTEYRYHPRQPQGSDRGSYLETEGIENDATTRHLVEMLWAMDETRAETVLAAQDREDRNCGKICKLEDKVDRLEKELAALKGEAPPQKARIRLTARKRALFVPRYQLAPKVRVVEKEVTPALADPPVVNMVNTRSNGNGPNNNNNNNNGENPTLAQVLAQQTQLMNMMMQQLQNQQNQGNNHAPPQNKLAEFLRVRPPTFSSTTNPVEAGDWLHAIEKKLDLLQCTDQEKVSFASHQLHGPASEWWDHFRLNRTTAEPITWLEFTAAFRKTHIPSGVVSLKKKEFRSLTQGSRSVTKYLHEFNRLARYAPEDVRNDEERQEKFLEGLNDELSYPLMTGDYPDFQKLVDKAIRQEDKYNRMKQKKRRIAQFKTQQGNNQRPRLTLGPQSMPQGGSSSVVRPQRQFFNNNAGNNIRNQAPRPVAASTQQQPAKREQGSKPVVCFNCGDPGHYADKCPKLRRVKVVPTQRNSTVPASKARVNHVAAAEAQDAPDVILGTFLVNLVPATVLFDSGATHSFLSMSFAGNHGMEVKDLRRPLMVSTPSNQALSLQCSPSVRIEIQGVPFLANLILLESKDLDVILGMDWLARHKGVIDCANRKVTLTSNDGRVVTVHALSPESLRSRLNQITLEEIPVVREYSEVFPDDLPGMPPKRDIEFRIDLVPGTTPIHKRPYRMAANELAEVKRQVDDLLQRGYIRPSSSPWGAPVIFVEKKDHTQRMCVDYRALNDVTIKNKYPLLRIDDLFDQLKGATVFSKIDLRSGYHQLRIKEEDIPKIAFTTRYGLFECTVMSFGLTNAPAFFMNLMNKVFMEYLDKFVVVFIDDILIYSRTKEEHEEHLRLALEKLREHQLYAKFSKCEFWLSEVKFLGHVISAGGVAVDSSNVESVTNWKQPKTVSEIRSFLGLAGYYRRFIENFSKIAKPMTRLLQKDVKYKWSEECEQSFQELKNRLISAPILILPDPKKGFQVYCDASKLGLGCVLMQDGKVVAYASRQLRPHKKNYPTHDLELAAVVHALKIWRHYLFGTRTEVYTDHKSLKYIFTQPDLNMRQRRWLELIKDYDMGIHYHPGKANVVADALSRKGYCNATEGRQLPLELCKEFERLNLGIVSRGFVAALEVKPTLIDQVREAQINDPDIQEIKKNMRRGKAIGFLEDEQGTVWLGERICVPDNKDLKDAILKEAHDTLYSIHPGSTKMYQDLKERFWWASMKREIAEYVATDGQTERVNQILEDMLRACALDFGGSWDKNLPYAEFSYNNSYQASLQMAPYEALYGRKCRTPLLWDQTGERQVFGTNILREAEEKVKIIQERLRVAQSRHKSYADNRHRDLSFEEGDYVYFRVTPFRGVHRFHTKGKLAPRFVGPYKIVSRRGEVAYQLELPQYLAGVHNVFHVSQLKKCLRVPTEEANLEQIEVQEDLTYVEKPIRILEIDERRTRNRVIRFCKVQWSNHSEEESTWEREDELKSAHPHLFASSSESRGRDSV

SEQ ID NO: 108639 - protein, 167 aa, Oryza sativa
  unsure (1)..(167): unsure at all Xaa locations
  Clone ID: PAT_MRT4530_12875C.1.pep
XAXXFXSXLXAXXXXXXFFPXLXXXXXPXXHPPXEXXAXERXSRXSSRXXRGXQXXXVXSXXXVRXXXAXXVVXRGXPXRRXDXXLRGXXPPDLSXXXFISAAAXIEEEDEVEVRGXXYTFAXRVGRPSEGGXXXKXAHXXVXXPXXNXXXXXPPPXXPLXXXPXXX

SEQ ID NO: 108640 - protein, 97 aa, Oryza sativa
  Clone ID: PAT_MRT4530_12876C.1.pep
MHRPGGKLPSQAVETKPSAPSASLRLQLSSSSAVDSTEAGTGFLHSTASTTVNSEQHPSLPLIISVEWSGGGVHTRGREGIGEVGAVDGEWMENAME

SEQ ID NO: 108641 - protein, 123 aa, Oryza sativa
  Clone ID: PAT_MRT4530_12877C.1.pep
YSRAFSMPTNTKTIPDVVDAPSSQTGGPPVLADNPFLNAAGGSAARDAQSGRAPPPPLARRRTTGLGGGRSRPSTSSSIAATAGLHPLALLPSASSLATDPAALLPLASAPTALSAQLVKLLP

SEQ ID NO: 108642 - protein, 89 aa, Oryza sativa
  Clone ID: PAT_MRT4530_12878C.1.pep
LTSLQDSSFLQYDYDHKRRSFNPENAGQHRSHISCCRPKDDPETWQRAQTKQKQGTSVVRLELRICDGSAHCCCSSKPPRSVTCYVLTS

SEQ ID NO: 108643 - protein, 732 aa, Oryza sativa
  unsure (1)..(732): unsure at all Xaa locations
  Clone ID: PAT_MRT4530_12879C.1.pep
AVEHLRFIFANSTSDDPSYTEQKGSDSNDGGHGFTTSERLGRFVNCKKVLTILRAASCEVQRGQKLGFVEAAEAAEDTEASVGGRPEDRHGRGVRGAHENIRIAFLSQEFEACASRPGREEFLAAFEEEMVERSRLEKVPVGLEGATEGMHLMGGLLEELDVLQRRSQDARVGMVEVKIQKLMPELELAPQDAERLVDSFRGECQMRLSLGKILLQFLVXLGMLYAEIECVQDPDLLLLDEPTNHVDLDTIEWLESYLKTQEVPMVIISHDRAFLDQLCTKIVETEFGVSKTYKGNYSEYVLAKAIWVETQYAAWEKQQKEIEQTKELINRLGAGVNAGRASSEQKKLEKLEKEGLIEKPFQRKQLKIRFPERGQSGRTVLTIRNLEFGFGEEKLFNNANLIVERGEKIAIIGPNGCGKSTLLKLILGMEKTQGGEVLLGEHNVLPNYFEQNQIHVHDLYQAEALDLEKTVLDTVSEAAEDWKIDDIKGLLGRCNFRDDMLDRKVQFLSGGEKARLAFCKFLVTPSTLLILDEPTNHLDIPSKEMLEEAISEYTGTVITVSHDRYFVKQIVNRVIEVKDQTIQDYQGDYNYYLERNLEARERELAREEELEEKAPKVKAKSKMSKAEKIARKKQKMQAFQQSKQKSKSLKNAKRWKRFLMEACFILYQVAIPIHVLPAFTHTEEPHIGVFEGKGIEEIGKIRKTRLAKSQRQRHLLTSILEGLRHKCNNLSL

SEQ ID NO: 108644 - protein, 267 aa, Oryza sativa
  Clone ID: PAT_MRT4530_1287C.1.pep
DAIDITREAVKDGADAVIAVGGDGTLHEVVNGFFCKGSPVHALDQGPDHSTALGLIPLGTGSDFARTFGWTNDPHEAIDRIVRGVKSKLDIGMMEGPDGNPHYFVNVADIHLSAKAGYFSSMYKRFGNLCYVFGALRAFWGHSNRDLRIKVNGGEWKTIRKVTALCIGNAKYFGGGMKITPTADPFGGDLEVVILQDFKWHDFLLKLHRLYGGTHLSVTGVSSIRVQSIEVAEKEVSADIFVQSDGEHFGFLPTKFSVLPGAVDFFC

SEQ ID NO: 108645 - protein, 61 aa, Oryza sativa
  Clone ID: PAT_MRT4530_12880C.1.pep
RGVGWGKNARPSELSDSKKVAEPDEKLICRSCSWALDVISVQEYERVLSPRGSPYSALSSC

SEQ ID NO: 108646 - protein, 48 aa, Oryza sativa
  Clone ID: PAT_MRT4530_12881C.1.pep
ELEKKAPKVKAKSKMSKAEKIARKKQKMQAFQQSKQKSKSLKNAKRWK

SEQ ID NO: 108647 - protein, 635 aa, Oryza sativa
  Clone ID: PAT_MRT4530_12882C.1.pep
MPVARPEPQEPRVIAHVDMDCFYVQVEQRRNPELRGQPTAVVQYNDWKGGGLIAVSYEARKFGVKRSMRGDEAKMVCPSINLVQVPVARDKADLNVYRSAGSEVVTILSTKGKCERASIDEVYLDLTDAAKEMLLESPPELLELIFEEATKSNILGLPSVIFVLHDLIVVSLQFDMNVTNRASYVQDVSNREDSVRAWLCRADADYQDKLLSCGAIIVAQLRVKVLEETQFTCSAGIAHNKMLAKLVSGMHKPAQQTVVPSSAVQDFLVSLPIKKMKQLGGKLGSSLQDDLGVNTVGDLLSFTEDKLQEYYGVNTGTWLWKIARGISGEEVEDRLLPKSHGCGKTFPGPKALKNNASVKTWLDRLCEELSERIQSDLNQNKRIAQTLTLYARACKKNKSDSIKKFPSKSCPLRYGTVKIQEDAMKLFESGLHDFLGSQNTKWSITSLSVSASKIFDIPIGTSSILRYIKGPNSTVSPANLDCSSLPEDPSLGNKLYIAPNHEEHCEPSLSEKEDYGNNSNLAKQCQIKEEKKVSKKLTEVKIILGPESSSEPNKAEEHKAAQYVDRNKFNTAGSNSASSSTWMFNVEDIDPAVVEELPPEIQREIHGWIRPPKQSSSKTRGSTISSYFQPAKRSG

SEQ ID NO: 108648 - protein, 85 aa, Oryza sativa
  Clone ID: PAT_MRT4530_12883C.1.pep
VKTSIKFFLKFLSPRCLKLAKTRRQDFFFFSWTNIRGQLKTRYPPRGEFSRGQCFNLGKNPILTGFLGPKKLGLELDFYQKKPLQ

SEQ ID NO: 108649 - protein, 48 aa, Oryza sativa
  Clone ID: PAT_MRT4530_12884C.1.pep
SRPMIGEEEEVPRIRAAEDSRPPILVKWWDDDLQPQGIVINLSPLVCH

SEQ ID NO: 108650 - protein, 749 aa, Oryza sativa
  Clone ID: PAT_MRT4530_12885C.1.pep
MDFRSGSSNDSGSASNPSGNTGFDASRPSSGSGSTMGGHARSILNAARVIPPNDDEKKPLWRYVELLEKTGKGQGGNARFRCRFCNQVIHGSYSRVKAHLLKIGTIGVATCKKVTVDILGQLQDEMTRAEAISARNLPKDIPLPTESVSRGKRRAVSAIESSFNLDARAKLDALIARMFYTSGIPFNVARNPYFRKAFQFACNNQLGGYTPPNFNKLRTTLLVQERTNVERLLNALKSTWSTKGVSIVSDGWSDAQRRPILNFLAVTEDGPMFLKAINTEGEIKRKEYIAEKMFAIIEEVGPNNVVQVITDNASNCRAAGLMVEQKYSHIFWTPCVVHTLNLALKSICAAKNSSGDAFLEFQWISEVATDASAIKNFIMNHSMRLSMFNDFSKLKFLAIADTRFASTIVMLKRFRAIKENLILMVASEKWNTYREDNQVQAQHVKEKILNDLWWDKVKYIIDFCEPIYSMIRAADTDKPCLHLIYEMWDSMIDKVKKIIYRHEGKELDEQCSFFFHVNEILHFRYYYETWLEEAPNHQAPHMDEEISDMRNKCFRRYFSGDELRKIKQQFADFSLFGSGFNSFDSIEDRAHMNAKQWWGIYGNSAPELKKLALKLLGQPTSSSCAERNWSTYGFIHSSMRNKFSSFSYLFSFLLRPARAEDLVFVHQNMRLLSRRSEEYYSGPSIMWDVAGDRYELFDGGADFLQQAELTLDEPDLERLLEDLGALDIQGDNGPSSTSVPMDEINNQFI

SEQ ID NO: 108651 - protein, 394 aa, Oryza sativa
  Clone ID: PAT_MRT4530_12886C.1.pep
MDHSGPWGAALSWLLFLLLAVAVPAAAHFLLAFRASRRPFSAVVQVSLSAASAAGFLCLSSSFRRIGLRRLLYLDKLRTKSDRVRLNYTARLSFSFRLLASLVAPCFAAEAAYKVWWYATSGDRVPFFGNDVLSNAVACSVEMAAWMYRSAIYLLTCVLFRLICHLQGLRLEDFAGTLLVEVEEGRAGVERVLREHLDIRKQLKVISHRFRKFIVASLLIATASQFASLLLTTRHDSVDDLLNTSELALCSVVLMSGLIIILSSAAKITHQAQALTGQTTKWHACCTIEPVPDEEAEPGSNHSSMLEVEPVSDSDGESSEETGDEDLLENTKIMLPQAHVISFQKRQALVTYLENNRAGITVFGFTLDRSYLHTIFMLEWTLFLWLLGKTIGFS

SEQ ID NO: 108652 - protein, 68 aa, Oryza sativa
  Clone ID: PAT_MRT4530_12887C.1.pep
MAIHIVRVYAVAVSPVIVGLLIVLLLRPAVSTALPPVATVGVSTSTGSAIDGRPKLRLAAAALEVLVS

SEQ ID NO: 108653 - protein, 44 aa, Oryza sativa
  Clone ID: PAT_MRT4530_12888C.1.pep
GFWKYVSTLEGGETPPSLEMWYAPKYPPRVSPVPLAFKGDPLNK

SEQ ID NO: 108654 - protein, 1227 aa, Oryza sativa
  Clone ID: PAT_MRT4530_12889C.1.pep
MELVPFKPEAGALVESGGGAHGDSIPAMVAAQQELLHAQVDQLQLLVVAQCRLTGVNPLAQEMAAGALSIKIGKKPRDLLNPKAVKSMQSLFAMKDTIGKKETREISASFGVTVTQVREFFASQRTRVRKFVRLSREKALRIESSKAPDNVCSISTEQTPVDIEAHAQVIEPLRTLEPLEAQQISLPHLVVPQISLQLPVVLQSCAIPVAPIGVMQPTEAKTNPDPIQKETKQEEVAGVESEDKKFLESIFVLMRKENTFSGQVKLMESILQINNVTVLSWFLTMGGLAIVSTWLGQAVTEEQTTVILVVFKVLLHLPLHKALPAHMSTVLQTINRLRFYRTQDISSKARNLLSRLSKVLVRSQALKKSQKDLICKQRISEILRDESWKSEVDITEDILALTDDASESRMPEPRKTPLLLTASADESNKKSSLQTKSKEKRKVLLVEHPNRKAAGKNVNPVRSTSTNNSRPLSADDIQKAKMRAMFMQEKYGKVDTSKVIEKPHMMEIQKPSGLVDSNVPLVPRTPLTSIIKQPVDPSPSTSKQSTLSPPDKPEIAVSLKLNVTAKENFIEKLDSKRVIWQIPPAWNKHPAIKLLEEQGMAIFCSDMRIEKLPVIPHKQTWGSYYHNFRQFIATVPLFVGRLAKVWIDPAWSLGAGENSKEFEVQTQRNRREKETFYASLKDIPLNPKGPWDVEMDFDDSLTPEIPIEQPPDADAMETDSVSTAPPNIVVPVVDKQIGSTSSVSPAVAAGANGATSEPDLELLAVLLKNPQLVFALTSNQGGTLPSEQTVALLDMLKQTGLGLSELVNSLANNSGVQKEPESGPEAIPASLPSPTPPKDLIARDGWSSEFPSQVRTQNLQHAHLPNRANAPPVASSVQQSFSNVVSSLPSQPYASASALPAQTRTNMTSLPQSMISVNPSTQHVAPMNNLLSRATVHQHTQSYALTSDPVAVAVHHQPAVNKLAHEVQSISHPAVSHSSVAESHASYTSYTWQSSVATIAATGRNATPDRWAAPARTTNSFNAAPSNSNHVTYPNQNAYSNHSTQATTYNSYGSAPVSSHSLHPGQGLDRNGYTHAAEYQTTMARDALWRNSRSPELGAGAVYGSSSQGYVPEPSRQWNYGQQSYNPEPYSRQWSSGQQSYNTVTAEPSRQWSSGQQSYSNPAEPSRQWSSSAHAQPSYNPEPSRPWNSGHQSQNPEASRQWSHHHGKQERYNPTDGRNSYDQHWRR

SEQ ID NO: 108655 - protein, 130 aa, Oryza sativa
  Clone ID: PAT_MRT4530_1288C.1.pep
SFVHSGRRRPGVLRRCALVGGIRDKQRSHSWSRQRRRGRRGSCRERRTPTPSRPPSASRPTAPPPPPSPPAAAATSSSSSTPPVLPPPPPRYPYPLSYARSQRPSRRRRRQWPHGQPVEAAAPAPPHPLR

SEQ ID NO: 108656 - protein, 148 aa, Oryza sativa
  Clone ID: PAT_MRT4530_12890C.1.pep
MAFFHLCISSLLLVFIISYIFQPLLDARRRFPPGPHRLPVISNLHNIGKNPHHAFARLADRYGPLMSIRLGGVRAVVAMSADAAREILQRNNADITGRGGMDSWHACGHHANSSIALWPRWKWCAMRMLCTEELLVRIMDTIYLIVVD

SEQ ID NO: 108657 - protein, 142 aa, Oryza sativa
  unsure (1)..(142): unsure at all Xaa locations
  Clone ID: PAT_MRT4530_12891C.1.pep
AGVWARPCRSCSCGARARRRACRRSARGGARRCPPSASGSPPRRGPARXPSXAXWRGRCRPRGPCRXPXXSSXSQPPNXPPPPPPPAPXXXXPXPXPRRRRAPPPARLAAGWVLWVLPPALLSPSWFSALAFGARRKTRSRG

SEQ ID NO: 108658 - protein, 416 aa, Oryza sativa
  Clone ID: PAT_MRT4530_12892C.1.pep
MEATAGGSTASAAACPPAPSRPTDPDFLSCVLQPPTPSSSSSRPDDDYAALRRLLLRRKPPSALQHRMEWRCNGKGYVAYRNFLLRRIDGGAASSCASTSSNSGRWAPSPAYAAFSEADSWSSSKDLRRNSGPLLRNLSISSKQSDPERHVRFAEPAYSFVGMHCIFDDCKASVTILKFGRASSDLLTYGASDGSLTVCQVSDPPTVLQKLIGHSKDITDFDFSSNNQYIASCSMDKTMRVWEISKGTCIRVVYGVSSQLCICFHPVNNNLLLVGNANREINAINFSTGRIVSKLTFDDAVTALDVDHTGQLIFAGDAQGCIYTVSVNSHTGSLSRTHKNKSNKSKSPVTTIQYRTFSLVARCPVLLSCVQNGNLFFFRASVLLSVHSFPSKKENSLLLLVGYLNLKAVDNPNSHF

SEQ ID NO: 108659 - protein, 225 aa, Oryza sativa
  unsure (1)..(225): unsure at all Xaa locations
  Clone ID: PAT_MRT4530_12893C.1.pep
SLPPLPPLPLPPPPPPPPPPPGAAAAPALPLPPPPAAPPPPPPPSPLLLGAAAAPTPAPPQSQGRRQPHPRPXGATWPTPSPRPLSLTCREERPLADAATARSPPPWAPXGPPLGPLDDAAPPSPRPLSATATAGPPRAPPPPRRPTIPPXSPPSRRPPGRPSAPRRRSRCPAAPPVASHARVPSGRPPXSPPPSPSVFPLPSFPLPFASSPLPPLPCSASPPPS

SEQ ID NO: 108660 - protein, 673 aa, Oryza sativa
  Clone ID: PAT_MRT4530_12894C.1.pep
MEGGGKAGYSYGGHHHHQDAKLLKNLSRVEPRRFGLGLVAGFLIVTCAYFSTAKFDAIHIAMISSPAKNAAGFMNASSDGSNQQQLDLDRDAMSREGSKAQVLDTDGDDKISSLGPDLGHNASALEGKKKDETFAKDSGDASVSASTDEALAKDDDAIVGAVLPPLSSEEPTNITQDSVLEDEELKVQETAPATTNPSPEKSSNNGSSPSVVPSDPATLPVQQIPPTQEAKDPPAQQIPAVPEAKVPPVQQIPTFPVVKTDSEAAPRRKEWKPLCDLWSNRRIDWCELDGDVRVAGANGTVSLVAPPGPADERTFRAESWHIKPYPRKADPNAMRHVRVLTVQSLPAPAASAAAPACTERHDVPGLVFSDRGYTGNYFHAYTDVILPLFLTARQYSGEVKLLVSDFQMWWLGKFLPVFKAVSNYDLINLDDDRRVHCFRHVQVGLTCHADFSIDPSRAPNGYSMVDFTRFMRATYRLPRDAPFPASGEQQPRRPWRPRLLVIARARTRRFVNADEIVRGAERAGFEVVVSEGEHEVAPFAELANTCDAMVGVHGAGLTNMVFLPTGGVVIQVVPLGGLEFVAGYFRGPSRDMGLRYLEYRITPEESTLIDQYPRDHPIFTDPDGVKSKGWNSLKEAYLDKQDVRLDMKRFRPILKKAIAHLRKNSGNNNTTHN

SEQ ID NO: 108661 - protein, 164 aa, Oryza sativa
  Clone ID: PAT_MRT4530_12895C.1.pep
MNLSATFRSAKIPRALPPKSGEPAAAALASASCAPGNPSAEAAKGKAALGWCVYLIASSRISRTYVGVTTDFPRRLRQHNGELKGGAKASSAGRPWNLACLIEGFVNRSEACEFESKWKNISRKMARKRSEPSMTSLLQHRDMALSRVKNDLACSHLKIKWHSS

SEQ ID NO: 108662 - protein, 182 aa, Oryza sativa
  unsure (1)..(182): unsure at all Xaa locations
  Clone ID: PAT_MRT4530_12896C.1.pep
MRVGSSWRLLLSFLPGRPKXWKFGIVGGELADGGGRELELVVLRHTELDMAADAIKLVLPSSSSPCRPAAAVELAPAPLASCSPTPPPSRATAVGDTSPGPRPVTPLPPHARSAVVLLPQSSLLKSSSPCHPAAHTELVSAPLTPSSPMPPSSPPLPRRLAEARERRERKGREEKEEGRKKY

SEQ ID NO: 108663 - protein, 103 aa, Oryza sativa
  Clone ID: PAT_MRT4530_12897C.1.pep
MGPSIKESIASIVSSDQHKHTSIVVCRPVKIEFGSLSGSDMSTTVLAAWKFLFLSNNRVLLCQTATYEERGGSEVEEEINKRAVGIVTAKLNAKIDDVAARTS

SEQ ID NO: 108664 - protein, 67 aa, Oryza sativa
  Clone ID: PAT_MRT4530_12898C.1.pep
FSVSLKMNHHITYETELILQSNMQKPLRIWTHVSAESPMRPSPAKNQYCPEDHTYSPLVSHSCTAES

SEQ ID NO: 108665 - protein, 588 aa, Oryza sativa
  Clone ID: PAT_MRT4530_12899C.1.pep
MADRSHAHALAFLVLAVLMPQMASPGKLPRFTMGPRTNKQLRDFFKNHGSDMADLVPSGQGGHEQGGGSSSNGQSQQGGGDSGGGGGGGNQAPATNAGMYVFSYGIGTPPQQVSGALDISSDLVWTACGATAPFNPVRSTTVADVPCTDDACQQFAPQTCGAGASECAYTYMYGGGAANTTGLLGTEAFTFGDTRIDGVVFGCGLKNVGDFSGVSGVIGLGRGNLSLVSQLQVDRFSYHFAPDDSVDTQSFILFGDDATPQTSHTLSTRLLASDANPSLYYVELAGIQVDGKDLAIPSGTFDLRNKDGSGGVFLSITDLVTVLEEAAYKPLRQAVASKIGLPAVNGSALGLDLCYTGESLAKAKVPSMALVFAGGAVMELELGNYFYMDSTTGLACLTILPSSAGDGSVLGSLIQVGTHMMYDINGSKLVFESLAQAAAPPPSGSSQQTSSKTNQQAGGRRSASAPPPLISPAISPSALVFLFRPVVAVSATAVSSFGAVRSAYASSVAAEAEADEPAAEYAVAAAEDPLRWRHRSLLNLCLRRLAPGEGGNKVFGKRFARLLPVRPRRLAFLSARVLRAFVEARNRE

SEQ ID NO: 108666 - protein, 95 aa, Oryza sativa
  unsure (1)..(95): unsure at all Xaa locations
  Clone ID: PAT_MRT4530_1289C.1.pep
MASLGPCPAAAWRRTLSLLTVVLVMVAVLASTAIAQSCGCASXLVMQQVGVLAFCGTGSDYYGTGCQAGPCDVSTTNDVSVASIVTPEFFAALVA

SEQ ID NO: 108667 - protein, 192 aa, Oryza sativa
  Clone ID: PAT_MRT4530_128C.1.pep
FFFFFFFFFFFFFFFFFFWGYLSEKEIRYPKTSKGTGAGYRGFHSKVKKIFLSTFQNRGGGKIYTSGYHLTKARGFKKKALPPGMGRFPKQKKGEHPLSPKYRGILARSFEKGFLTRPKIPYLVTRGGLGDRQLTRRNAPPNRKFFLEGSTGGGYDNRRDPLLKTPRIWEGGTLWFFGNFNLNKRQKGPTGE

SEQ ID NO: 108668 - protein, 603 aa, Oryza sativa
  Clone ID: PAT_MRT4530_12900C.1.pep
MGSSSGLVDWRGRPVDTWKHGGVRASIYIHMLVWLSNVSNIGNMTNIVSYLSVKMNMGVAAASTTSASFVAMMQVFTIPAAFLADSYLKRVYTVLFFAPIEILGYILLAIQAHVPSLHPAPCELAGAAAGAGAGATAATTEAAPGTCETVHGSNLSLLMLGLYLICVGEGAVRACLPALGGDQFDEGDAAEQRQAASFFNWYAFAVSLGALVGLVAVVWVQDNKGWDAGFAVCGAVVLLGLLVWAAGMPTYRNKVPAGSPITRILQVLVVAFKKRNLQLPENPDELYQPTNDDSAKGLEILQRTRGLKCLDKAAIVRGGGSNGGAWSVCSVSQVEETKIVLRMVPIFLTAALGYMPVSVVLTFTVQQGNIMDTRMGAIRVSPATLFVIPTVFQLAILVVYDRAVVPALRRATGRVGGVTHLQRIGVGFVSSLASCAVAAAVEVKRRRLVASSSSSAMMSVFWLTPQFFLLGVVDVTSFVGLLEFFSSEASDGMKSIGSSIFYCMLGMAAWLNTMLIELVNRVTRRRGGGGWLDGANLNESRLDLFYWLVSGIELVAFMAYLLFAWRYVYRNDQRIAAAAADAVDEQEDKKAASNGSLVQINLI

SEQ ID NO: 108669 - protein, 55 aa, Oryza sativa
  Clone ID: PAT_MRT4530_12901C.1.pep
FGRGKSRYLGSCTCRWCEQFFVLTCEWSFFFLGPVIWDVSLTRNYQHLKKTFTPY

SEQ ID NO: 108670 - protein, 499 aa, Oryza sativa
  Clone ID: PAT_MRT4530_12902C.1.pep
MAVHYGLGQFQSFWTVMWALPILVLPYDWSKWFRRRQKKAMGDALDKIKAELMLLGFISLLLTVAQAPISKICIPKSAANILLPCKAGQDAIEEEAASDRRSLAGAGGGDYCSKFDGKVALMSAKSMHQLHIFIFVLAVFHVTYCVITMGLGRLKMKKWKKWESQTNSLEYQFAIDPSRFRFTHQTSFVKRHLGSFSSTPGLRWIVAFFRQFFGSVTKVDYLTMRQGFINAHLSQNSKFDFHKYIKRSLEDDFKVVVGISLPLWFVGILVLFLDIHVGTKLEMVIMQMAQEIQDRATVIQGAPVVEPSNKYFWFNRPDWVLFFIHLTLFHATPGLKKCFHENIWLSIVEVIVGISLQVLCSYITFPLYALVTQMGSNMKKTIFEEQTMKALMNWRKKAMEKKKVRDADAFLAQMSVDFATPASSRSASPVHLLQDHRARSDDPPSPITVASPPAPEEDIYPVPAAAASRQLLDDPPDRRWMASSSADIADSDFSFSAQR

SEQ ID NO: 108671 - protein, 775 aa, Oryza sativa
  Clone ID: PAT_MRT4530_12903C.1.pep
METRVKIMLKLLGEEADTFGKRAEMYYRRRPEVINHVEEVYRAYRALVERYDHLSKELHKANHTIATACPQHDVSLLQEQDDAEFTPIRIQESTTTVQEVLNPKGHARPCAPHFTKQNAQQEIDTLQKAILVLQTEKEFVKSSYETGITKYREIEKQIADMQDQVCHIQNEFDAHASIEDDEARALMTITALRSCQGTVANLVKIFEELVRVAAGESEKVNYLRQKLYAMNYIIDPSKGEVGTTNIAVKNRVYPNTQEILELQPIYEKIEKFFELNSESVVQEMAERVDELVDKVMNLELKFPKQSAQIKQLKEDNDSLKDRLDDLQDEIALRDDPSDLSEQLKLAEDELNRVKALERSVIEEEVLVSTVFSEVVSCITNISKAFGSIDPEDMTSLSAAVENDGEITSDDISTSLPEEEFRDAPSWQEFLLDGIEGREALLLDDYTLILRNYKETKRRLAELEKKNEQHPKETKTVIRELRNANSMKYVEIQSLRDLLDPSEDISSTHSKMGFNRSNHPLDTEISVLEGIDVRHTGVRKNTSPFEVKFRSEIDALVEENLQFLVRFSMACHRMQDFDSKYQELQKGMGDFEVKKTGEPDAAAESDPAEKKLRELRTELDVWFEQNALLDQDLQLKTMSLCRLQEEIAEALRASAETDGGRFTPYEAAKFQGEVLNMQQSSGKIERELQSALKRMRELEGKVNDGLQKLRESFDLSCRRSSLVEEESSSTSYHSQFKHFPTRTRVPLRNFLFGTKPKKKSIFACINPTLQKQFSDL

SEQ ID NO: 108672 - protein, 554 aa, Oryza sativa
  Clone ID: PAT_MRT4530_12904C.1.pep
MAGGGGGRALPETPTWAVAVVCAVIVLVSVAMEHGLHKLGHWFHKREKKAMGEALGKIKAELMLLGFISLLLTVAQTPISKICIPESAANIMLPCKAGQDIVKGLKGKKDHRRRLLWYTGEEESHRRSLAGAAGEDYCAQSGKVALMSSGGMHQLHIFIFVLAVFHVTYCVITMGLGRLKMKKWKKWESQTNSLEYQFAIDPSRFRFTHQTSFVKRHLGSFSSTPGLRWIVAFFRQFFGSVTKVDYLTMRQGFINAHLSQNSKFDFHKYIKRSLEDDFKVVVGISLPLWFVGILVLFLDIHGLGTLIWISFVPLIIVLLVGTKLEMVIMQMAQEIQDRATVIQGAPVVEPSNKYFWFNRPDWVLFFIHLTLFHNAFQMAHFVWTMATPGLKKCFHENIWLSIVEVIVGISLQVLCSYITFPLYALVTQMGSNMKKTIFEEQTMKALMNWRKKAMEKKKVRDADAFLAQMSVDFATPASSRSASPVHLLQDHRARLDDPPSPITVASPPAPEEDIYPVPAAAAFCQLLDDPPDRRWMASLSADIPDFDFSFSAQR

SEQ ID NO: 108673 - protein, 584 aa, Oryza sativa
  unsure (1)..(584): unsure at all Xaa locations
  Clone ID: PAT_MRT4530_12905C.1.pep
MAGGGGGRALPETPTWAVAVVCAVIVLVSVAMEHGLHKLGHWFHKREKKAMGEALEKIKAELMLLGFISLLLTVAQTPISKICIPESAANIMLPCKAGQDIVKGLKGKKDHRRRLLWYTGEEESHRRSLAGAAGEDYCAQSGKVALMSSGGMHQLHIFIFVLAVFHVTYCVITMALGRLKMKKWKKWELETNSLEYQFANDPSRFRFTHQTSFVXKRHLGLSSTPGLRWIVAFFRQFFGSVTKVDYLTMRQGFINAHLSQNSKFDFHKYIKRSLEDDFKVVVGISLPLWFVAILVLFLDIQGFGTLIWISFVPLVILMLVGTKLEMVIMEMAQEIQDRATVIKGAPVVEPSNKYFWFNRPDWVLFFIHLILFQNAFQMAHFVWTLATPGLKKCFHENMGLSIMKVVVGIFIQFLCSYSTFPLYALVTQVKPFRQKSLVNALGGLNSNVLNLSVCLQMGSNMKKTIFEEQTMKALMNWRKTAREKKKLRDADEFLAQMSGDTTPSRGSSPVHLLHKQRVRSEDPPSAPASPGFAGEARDMYPVPVAPVVRPHGFNRMDPDKRRAASSSAIQVDIADSDFSFSVQR

SEQ ID NO: 108674 - protein, 64 aa, Oryza sativa
  Clone ID: PAT_MRT4530_12906C.1.pep
DLKRIKCAIIGMLVHLSTAKEGSNPVVHENAILKELYTVKYYPHSGKKLILLDPSIVTLFKNVY

SEQ ID NO: 108675 - protein, 128 aa, Oryza sativa
  Clone ID: PAT_MRT4530_12907C.1.pep
MGAATGGGQGFGGRGRGQAGSLGMTVGLHRRVKPVLVGVEVGGTLRLSLVSGGDVHFSWWLRNGHRFNAECTERWLRVSATCPVCRDMPSSSPMATPLAEAVPPLPWPKWKRKERDKGERGKRKKGRR

SEQ ID NO: 108676 - protein, 326 aa, Oryza sativa
  Clone ID: PAT_MRT4530_12908C.1.pep
MATASWPPTPRSPRPQAPSVERAKGPSGLDKVVLREARGFSAEVHLYGGQVTSWKNDRGDELLFVSSKATFKPPKAIRGGIPICFPQFGTHGILEKHGFARNRFWAIDDNPPPFPTSTAAKAFVDLILKTSEEDLKIWPHSFEFRLRVALGPGGDLALTSRIRNTNTDGRPFSFTFAYHTYFSVSDIRGHKHDLCAFVPFKSAANYLSEVRIEGLETLDYIDCLRGKERSTEQGDAIVFESEVDKIYLDAPAKIAIIDHEKKRTFVLRKDGLPDAAVEKPITLKPGEEWKGKMDLSAVPSSYCSGQLDPNKEHLMSLILSGADAAS

SEQ ID NO: 108677 - protein, 120 aa, Oryza sativa
  Clone ID: PAT_MRT4530_12909C.1.pep
FLERSTEQGDAVVFESEVDKIYLDAPAKIAIIDHEKKRTFVLRKDGLPDAVLWNPWDKRTKNMQDFGDEEYKHMLCVEPAAVEKPITLKPGEEWKGKMDLSAVPSSYCSGQLDPNKVLQG

SEQ ID NO: 108678 - protein, 119 aa, Oryza sativa
  unsure (1)..(119): unsure at all Xaa locations
  Clone ID: PAT_MRT4530_1290C.1.pep
LXRLXPPPXPRLXPRFGDHPWFVGPPALTELRXNRRRGTTXGFGVFGAASFPPFLASPDLRLAPRVVPAARDXRVLSLTSNGRVTIGLLPPDXHGGLYRPENDTLLTPTRGQPKRPRTP

SEQ ID NO: 108679 - protein, 59 aa, Oryza sativa
  Clone ID: PAT_MRT4530_12910C.1.pep
KHIIWPSLRRICCGSLWFETGKREEWKAVCYCPKIMAYVGGIREVCFDKSSFVLLTLLI

SEQ ID NO: 108680 - protein, 593 aa, Oryza sativa
  Clone ID: PAT_MRT4530_12911C.1.pep
MAAVDGGGGGELGGGGLLGSRLMKHGRGNAGDQEHEWRPPAKQARGGDASSAAAAVAAAAAVSEAVKVAAPFLLGASCSPGHGGEQMLSFSSSASSCSSGGGGAAVAAAAAAGGAMPLYYGTPASCSGLSSVSLSSSMQGAMARVRGPFTPSQWIELEHQALIYKYLAANSPVPHSLLIPIRRSLTSPYSPAYFGSSTLGWGSFQLGYSGSADPEPGRCRRTDGKKWRCSRDAVADQKYCERHMNRGRHRSRKHVEGQPGHAAKAMPAAVAAAAASATQPSAPAAHSGGAVAGLAINHQHQQMKNYAANTANPCSLQYSRDLANKHNESEQVQDSDSLSMLTSISTRNTGSLFPFSKQHNPFEVSNSRPDFGLVSPDSLMSSPHSSLENVNLLTSQSLNEQQSSVSLQHFVDWPRTPAQGALAWPDAEDMQAQRSQLSISAPMASSDLSSASTSPIHEKLMLSPLKLSREYSPIGLGFAANRDEVNQGEANWMPMFRDSLMGGPLGEVLTKNNNMEARNCLSESLNLLNDGWDSSSGFDSSPVGVLQKTTFGSVSSSTGSSPRLENHSVYDGNSNLRDDLGSVVVNHPSIRLV

SEQ ID NO: 108681 - protein, 99 aa, Oryza sativa
  Clone ID: PAT_MRT4530_12912C.1.pep
KEESKFTSTNTATTITKKLEDVAKNLRLKFLKKNGGLLKMEGSKPGRKGVMSINAEIFQITPDFHLVEFTKINGDTLEYQKVKQEMRPALKDIVWAWQG

SEQ ID NO: 108682 - protein, 135 aa, Oryza sativa
  Clone ID: PAT_MRT4530_12913C.1.pep
MTTATAAAARTAQVISKTAVLSTAGGGGSKIHGCYSSSSSSSRAPVVVATTASFLHRCFLCRRELAGGDDIYIYRGDRAFCSDDCRFRHILTEEEEEDGDMSCRAKDAAVAAPTRRRSRNRRAVAGCGGSGFFAY

SEQ ID NO: 108683 - protein, 80 aa, Oryza sativa
  Clone ID: PAT_MRT4530_12914C.1.pep
KLVDPPGCRRAYILSKIMSTARANLVPRRLSIMALLFLGIVIGDAARETPGTYFDCLLVEWMVIILRWLMVQILTQTDGE

SEQ ID NO: 108684 - protein, 146 aa, Oryza sativa
  unsure (1)..(146): unsure at all Xaa locations
  Clone ID: PAT_MRT4530_12915C.1.pep
SCLLPDGTDAYALAKKVGRFKQIKRTEGVSTTDIVGRMLLCVRERSASDSHNHSSLQRQFSHGHGQKIDDSGSGSGTRISHFLPTSRRIXQFSNSRGPGPDSRIVYIDGAFDLFHAGHVEILRLARELGDFLLVGIHTDQTISSTR

SEQ ID NO: 108685 - protein, 108 aa, Oryza sativa
  unsure (1)..(108): unsure at all Xaa locations
  Clone ID: PAT_MRT4530_12916C.1.pep
MESSRTCEGSGASAMIGGNRMVAEVRAALASATTAASRRGGGSSGGGARPEMGGGSGARVWHGGRETRGESGDVXRGAGGVGARIGGKGSGAGCWSSDSNGRRCEARI

SEQ ID NO: 108686 - protein, 125 aa, Oryza sativa
  Clone ID: PAT_MRT4530_12917C.1.pep
DHAGALIRKAEMYQEYMKHIPVPAHRGSVIPCTTWLGLGRSVKQLYKQPLHYLTNVLLKQWDQQRVGSDDEHRPLDAIIHPVKAEALIWITEEVHRLTTSSQHLASLWASAPMYHAYIDPVFPPI

SEQ ID NO: 108687 - protein, 166 aa, Oryza sativa
  Clone ID: PAT_MRT4530_12918C.1.pep
NRIKIATSLSHDSKSESRSRSSFPQTLALAALIQRSLTAASASASSVAAAPGVGRVEPAVTLDQVPWWSDPDQRLSSSSSRTATGFVKTPSPPTASSSVSPPPPAPPPSRTAPPPPPSTSPPTRAAVASSTGCFTGASSGGSWSWPHTSSEDDGKPDLGVTGTGGG

SEQ ID NO: 108688 - protein, 145 aa, Oryza sativa
  Clone ID: PAT_MRT4530_12919C.1.pep
MNIQRKPGDWNCKSCQHLNFSRRDYCQRCHTPRQDLPLGDGYVPGGVLTSLDIRPGDWYCNCGYHNFASRASCFKCGAIVKDLPAGQGGGVANGDFARALDSSAVRAGWKAGDWICTRPGCNVHNFASRIECYRCNAPREAGNVK

SEQ ID NO: 108689 - protein, 386 aa, Oryza sativa
  unsure (1)..(386): unsure at all Xaa locations
  Clone ID: PAT_MRT4530_1291C.1.pep
MAAPEAPSCYVGIARQSAAFRLMKQMGWEEGEGLGKDKQGIKGHVRVKNKQDTLGVGVDSPHNKWVYDTTQFDNILKKLKVQSATPAIKEFEDDVSNSPDSTPKEAKPTNNEVTKVTRPQGRYKKRERGKSVSGYSAKDLEGILVRKSDDNCKVDQEVEPTCCDEPDPIICQDTVSQADDVNWWGHKFGFKSGGFLGAKSRKNKSSATKGTSNVRQTFGEEDQENLYNLVQDKATSGKQGLGIKGLPIKVAGHRWKGNKTSFGDSDEENSTQSNELSELEEDGDEEESANDNELIDANVNTVKEMCVDVNHNINXKTKVKKLCKTILRQAPAQSMKLKELKVAVEAHSESMFSNFSCRREALLFLKRKLQGSRKFNIDGKRVQLVS

SEQ ID NO: 108690 - protein, 73 aa, Oryza sativa
  unsure (1)..(73): unsure at all Xaa locations
  Clone ID: PAT_MRT4530_12920C.1.pep
NPILLXPSVTPLXXIXXHXXPVVTLLEVTVXVIPQFLHLXXRPXPSXVKRSFLKNESPKGASPAXYTPSCSXL

SEQ ID NO: 108691 - protein, 938 aa, Oryza sativa
  Clone ID: PAT_MRT4530_12921C.1.pep
MEVCCCSTSSAVPGRRFAAAGAAAAAVAARWGAVGVGRAVVLAHPLRPAPRGGHAHAQQAGARRARRAVVRAVFERFTERAVKAVVLSQREAKGLGEGAVAPRHLLLGLIAEDRSAGGFLSSGINIERAREECRGIGARDLTPGAPSPSGSGLEMDIPFSGSCKRVFEVAVEFSRNMGCSFISPEHLALALFTLDDPTTNSLLRSLGADPSQLASVALTRLQAELAKDGREPAGASSFKVPKKSPAGAGRSAFSKSLNSKKEKGALDQFCLDLTTQASGGFIDPIIGREEEIERVVQIICRRTKNNPILLGEAGVGKTAIAEGLALRIANGDVPIYLVAKRIMSLDVGLLIAGAKERGELESRVTSLIREVREAGDVILFIDEVHNLIGSGTVGKGKGAGLDIGNLLKPPLARGELQCIAATTLDEHRMHFEKDKALARRFQPVLVEEPSQDDAVKILLGLREKYETYHKCKFTLEAINAAVYLSARYIPDRQLPDKAIDLIDEAGSRARMESFNRKKEGQSSILLKSPDEYWQEIRAAQNMHEVVSSNQMKYSPRQENGSAAIKAPSEDMNELTSELQVEEPIVVGTEEIARVASLWSGIPVQQLTADDRKLLVGLDGELRKRVIGQDDAVMAISRAVKRSRVGLNDPDRPIATLLFCGPTGVGKTELTKALAASYFGSESAMLRLDMSEYMERHTVSKLIGSPPGYIGYGETGTLTEAVRRKPFTVVLLDEIEKAHPDIFNILLQIFEDGHLSDSQGRRVSFKNTLIVMTSNIGSTSISKGRRSMGFMTEDTESSSYVAMKSLVMEELKAFFRPELLNRIDEMVVFRPLEKTQMLAILDIILQEVKGRLLALGIGLEVSDAMKDLICEEGYDKSYGARPLRRAVTHLIEDVISEAILFGEYKPGDTILMDIDAGGKPCMSHLNEKVVQLSDPTRTF

SEQ ID NO: 108692 - protein, 115 aa, Oryza sativa
  Clone ID: PAT_MRT4530_12922C.1.pep
MPRPRWVGTWARRSLGTGVSGRDVRGAARDVPPSGGSRNGEYGVCVWVMLSRGRGRDIMMDRWRLRLPGAATATSRVCVSTGFGPRRGIIGQLCISGESGVTATQGRSQIDMGLH

SEQ ID NO: 108693 - protein, 116 aa, Oryza sativa
  Clone ID: PAT_MRT4530_12923C.1.pep
MAARPRDEGAKSGQGWDDGASVNQQFNLRNQQGLGRHPQHQFQRPPVIPRRDQDDTLRSDQQARKFQPQVKLTAMQGQQLEKPLADGGQPQTTAIIKAKKPRPPLSPVQNEWTHST

SEQ ID NO: 108694 - protein, 104 aa, Oryza sativa
  Clone ID: PAT_MRT4530_12924C.1.pep
GGGEKGGAPGGTGGTEGWGPSGAGTPSQPGQKQHNTQSGGYRGPGVSRGEKPSNHPPREKKNSPPTPPRNSLRLCRGVPPPRLPLPRPAKCDHAAPQQKKREKT

SEQ ID NO: 108695 - protein, 103 aa, Oryza sativa
  Clone ID: PAT_MRT4530_12925C.1.pep
MASGWYLVVAGLATMAAWARGNFDAVVTMGCVGDGLDSELLLLRHHWTYAPSSPLQPPAVVVMGFSSLPNTTTCQIDTRCHLGLWMKISSCSDGNGTQMLGPS

SEQ ID NO: 108696 - protein, 55 aa, Oryza sativa
  Clone ID: PAT_MRT4530_12926C.1.pep
FICHFLQIYFRGQHLQLICSEVSHLRVYSQGIIPLKYHCLALLFSQEMHSILYSL

SEQ ID NO: 108697 - protein, 51 aa, Oryza sativa
  Clone ID: PAT_MRT4530_12927C.1.pep
ICVNEFFSCSMFGKLIFHHLFFLAIIAEYTLKKGIQFFEPIKFPLVVLGGK

SEQ ID NO: 108698 - protein, 138 aa, Oryza sativa
  Clone ID: PAT_MRT4530_12928C.1.pep
MAANLYMRHHGPHPARGVPTCHGSTGRRGRKEQEEKKEKARKIDDHRSTTAAASHALPSIRLHPTPSIVAGSRQVAHAVVPTSPAATRKRSAAARPCRALIEPYHRSHGFAGIGADLPSRRPAVPRTVPPRAQSDGPA

SEQ ID NO: 108699 - protein, 61 aa, Oryza sativa
  Clone ID: PAT_MRT4530_12929C.1.pep
VISISDSKATAARPIGYSKVVASADVYAGVFHYQCLRYDYPQATGWPKSYDQTTTPLIFGQ

SEQ ID NO: 108700 - protein, 42 aa, Oryza sativa
  Clone ID: PAT_MRT4530_1292C.1.pep
AGITDFRLGMMLGHDNEFQFTPDSKFGHRGQVLGLRTSNYVR

SEQ ID NO: 108701 - protein, 456 aa, Oryza sativa
  Clone ID: PAT_MRT4530_12930C.1.pep
MARTRSNKDRRRRRACGEDRLSALPDDLLHLILRRLDTRDALATAALSRRWAAVPRELPALDFRVTDLLPPRYRRCLAIRGKARRLSLEVFDFDASPCINQLVVTAVDSWGVTDLEVSAVPTGPIMHPPPVYSFPLRRISRDPGASRLRRLKLRNCLPPPLQGFGSLATLVLQGLPCSTRPAVYRVVAACPQLQSLHLSSCRSRKFGCPLTLDAPMSRIRELVVDGGYMAVEIRSLPMLESLASNGDAVFLTHPDAAPYLQRVSLEHAIGSLQGDELFPAIERRRLRFLIPSIREFLQNANGITDLVLRFTGPYMWILFLPTSPFAPMPKLRRLLVADVPPSWDASWPRLLVEATPLLETLHVHHHSEEEELVVMGFRSAERRHVQLVRFAMEASTSALRRVALYKRGHVEHKGPGAWEAAAARDDAWSDEERRGVLEQITEGMCCSTGQVQVILG

SEQ ID NO: 108702 - protein, 180 aa, Oryza sativa
  unsure (1)..(180): unsure at all Xaa locations
  Clone ID: PAT_MRT4530_12931C.1.pep
MAKQSLVLTLIMLEPQVDKETRYNNSMATAIGLTSARGSAALTCGAHRSAAREREERRRHAGPTGQRLGRGGQEGGDTRLGLAQGQPTGRGDGGGAHASXRCWQRQPAVEATAQKXRRESGGSGRRPXPKATASAGGGDARGNXGRKGEGRESSPGXMAATGDEERRREVDTRRTATGMT

SEQ ID NO: 108703 - protein, 389 aa, Oryza sativa
  unsure (1)..(389): unsure at all Xaa locations
  Clone ID: PAT_MRT4530_12932C.1.pep
FRARFFWEGLEKKRKYHMLKWEALSRPKEFGGLGFINTKIMNRALLCKCIFKLESGANDPCYRMLRMKYMRNGGGFFQSXLRGGSQFWKGLHEVKKWMFLGSCYKLGNGKSIRFXSDVWLGEIPLKTQYPMLFSICYNPNSTVKQMNTXGEWEIGIRRTIGNREVGEWNDLHEKLRDIQLTSNKDTMIWKLTKTGEFTTKTLYREMIFGGVKDTXIPQDIWKASIPLKIKIFFWLALKGRTQTAAQLKKMKXGGGGVANCKLCGREEEIDHLLFMCAPAQFMWCCLRDAFNWDKVHVCRADLLEIMQKKSGKNSVWLTIFDAYFXAIWIARNDWVFNNKLLADVINLPHKVVSFLIQWRRLAPAKLRGDLDTLRGSLLASISETGGLGS

SEQ ID NO: 108704 - protein, 67 aa, Oryza sativa
  Clone ID: PAT_MRT4530_12933C.1.pep
AAEGSQDAVPFIGNTGNPPSLPLTMGHAEKRCRMAEANRINASEENKGKDLEHVQWSKALKSSSGPD

SEQ ID NO: 108705 - protein, 56 aa, Oryza sativa
  Clone ID: PAT_MRT4530_12934C.1.pep
AVECLFETLRCLPGGCERGASTCISCSWFIMEDDELGWSPLTAFHPSKVKRVITDH

SEQ ID NO: 108706 - protein, 61 aa, Oryza sativa
  Clone ID: PAT_MRT4530_12935C.1.pep
FFFFFFLYINPNELINIMQNKQTQAIWGIHTTIYLSSGHTISLYGELQEGKTLHKRVKQTC

SEQ ID NO: 108707 - protein, 55 aa, Oryza sativa
  Clone ID: PAT_MRT4530_12936C.1.pep
MRGCARRRPCGAASEEGDADDQDRLPLRILLMPASPIATRGDVVAPVADEAAGCP

SEQ ID NO: 108708 - protein, 60 aa, Oryza sativa
  Clone ID: PAT_MRT4530_12937C.1.pep
LLVLHPQELLLFVVGQVTDANQSLHSPEAETITAARSPACSGGILLDRGEEAGGGMICSC

SEQ ID NO: 108709 - protein, 543 aa, Oryza sativa
  Clone ID: PAT_MRT4530_12938C.1.pep
MDRMVIKPAAVCSEKEDNERMQKAASTFHPTLWGDFFVDYQPPNKSQHACMKERAEVLKEEVRCMVKGSKEVSEILDLVLTLQRLGLDSYYKTELDDLLYSIYNSDFDDKDLNLVSLRFYLLRKNGYDVSSDIFLCFKDKEGSFAADEVRSLLGLYNAAHVRTRGDKVLDGAIAFTKSHLEAKLEHLKSPLKEEVSSALETPLFRRVRILETRNYIPIYEKISGRNETILEFAKLNFNLLQFLYCEELKKITLWWKELNIQSNLSFIRDRIVEMHFWMTGVCPEFNYSLSRIILIKMMAYITIIDDIFDTHGTTEESMMLAEAIYKCNESAIVRLPEYMKCFYLYLLKTFDLIEEELGTSNSYRLKRLVQGYSQEIKWRDEHYIPKTVDEHLEVSRATVGAFEIACASFVVMGDIITKETLDWLLTYPELLKCFTTLARLSNDIVSTKREQKGEHHVSTVQCYMFQHGTTMHDACVKIKELIEDSWKDIVKEYLTLPTEQPKIVAETIVDLARTADYMYKKTDSYTFANTIKDMVASLYVKPI

SEQ ID NO: 108710 - protein, 56 aa, Oryza sativa
  Clone ID: PAT_MRT4530_12939C.1.pep
QILILAYLRPRLNMNSKSRWRGELLVMHTLHPASNGPGRMYRARVIGVLNYTCGNK

SEQ ID NO: 108711 - protein, 110 aa, Oryza sativa
  unsure (1)..(110): unsure at all Xaa locations
  Clone ID: PAT_MRT4530_1293C.1.pep
LAKVPPAGARQGPALLAPTFTNNGSYDGTAWLLTAALLALLALSCVLVSFTNSLNGLDGRIYYDLTTXAGLCLLDYPPPGASALPPLDMSRYSLRAIDGGPLRLPPHCRH

SEQ ID NO: 108712 - protein, 949 aa, Oryza sativa
  unsure (1)..(949): unsure at all Xaa locations
  Clone ID: PAT_MRT4530_12940C.1.pep
MVVQQWRPATAAAEHLGHQQPYNSSVRPQHYYGPSAIAPELLQAMDAPHEPEEIVQHVPVSTKSFKFPHRPGSGSIGTRCLVKANHFFAQLPDKDLHQYDVSITPELTSRIRSRAVMEELVRLHKMSYLGGRLPAYDGRKSLYTAGPLPFTSKEFRISLLEEDDGSGSERCAPIPFLRQKTYNVVIKFAARADLHRLEQFLAGRQAEAPQEALQVLDIVLRELPTARYAPFGRSFFSPDLGRRRSLGEGLETWRGFYQSIRPTQMGLSLNIXNSLCYMSATAFFEPLPVIDFVIQLLNTDIRSRPLSDAERVKIKKALRGVKVGVTHRGNMRRKYRISGLTSQATRELTFPVDQGGTVKSVVQYFQETYGFAIQHTYLPCLQVGNQQRPNYLPMEVCKIVEGQRYSKRLNQNQIRALLEETCQRPHDRERDIIQMVNHNSYHEDPYAKEFGIKISERLALVEARILPAPRLKYNETGREKDCLPRVGQWNMMNKKMVNGGRVRSWICVNFARNVQESVASGFCRELARMCQASGMASIPEPVLPSMYARPDQVERALKARFHDAMNILGPQHKELDLLIGLLPDNNGSLYGDLKRICEIDLGLVSQCCCTKQVFKMNKQILANLALKINVKVGGRNTVLVDAVSRRIPLVTDRPTIIFGADVTHPHPGEDSSPSIAAVVASQDWPEVTKYAGLVSAQSHRQELIDDLYNITHDPHRGPICGGMVRELLISFKRSTGQKPQRIIFYRDGVSEGQFYQVLLHELDAIRKACASLEANYQPQVTFIVVQKRHHTRLFAHNHNDQNSVDRSGNILPGEYCTVVDSKICHPTEFDFFLCSHAGIKGTSRPAHYHVLWDENNFTADALQTLTNNLCYTYARCTRSVSIVPPAYYAHLAAFRARFYMESDSSDSGSMASGRGGGSSTSRSTRAAGGGAVRPLPALKDSVKNVMFYC

SEQ ID NO: 108713 - protein, 124 aa, Oryza sativa
  Clone ID: PAT_MRT4530_12941C.1.pep
MDDVDFSSNQATPKESMNSKDDAKVQPSSGQTPNKGNYYMGHANAITMMFQYIRDGCRRVESSMEDYKCKKVEEGHDIDIRDYPSHTSSGTYGGWQEGSSAISDLDEFVLKEEDYPVIDYGLVI

SEQ ID NO: 108714 - protein, 990 aa, Oryza sativa
  Clone ID: PAT_MRT4530_12942C.1.pep
MGSRRPRLPGFGEDCEPRGGGRGGGGRGRGSYYPQAQQYHPQGHGVRGGAGYYHGAAPQPRGAMVVQQWRPATAAAEHLGHQQPYNSSVRPQHYYGPSAIAPELLQAMDAPHEPPANVSSPEAASPEASSPRSLALEVTEQLQDLSVQYQLSESQEEIVQHVPVSTKSFKFPHRPGSGSIGTRCLVKANHFFAQLPDKDLHQYDVSITPELTSRIRSRAVMEELVRLHKMSYLGGRLPAYDGRKSLYTAGPLPFTSKEFRISLLEEDDGSGSERRQKTYNVVIKFAARADLHRLEQFLAGRQAEAPQEALQVLDIVLRELPTARYAPFGRSFFSPDLGRRRSLDMSATAFFEPLPVIDFVIQLLNTDIRSRPLSDAERVKIKKALRGVKVGVTHRGNMRRKYRISGLTSQATRELTFPVDQGGTVKSVVQYFQETYGFAIQHTYLPCLQVGNQQRPNYLPMEVCKIVEGQRYSKRLNQNQIRALLEETCQRPHDRERDIIQMVNHNSYHEDPYAKEFGIKISERLALVEARILPAPRLKYNETGREKDCLPRVGQWNMMNKDFALEPVLPSMYARPDQVERALKARFHDAMNILGPQHKELDLLIGLLPDNNGSLYGDLKRICEIDLGLVSQCCCTKQVFKMNKQILANLALKINVKVGGRNTVLVDAVSRRIPLVTDRPTIIFGADVTHPHPGEDSSPSIAAVVASQDWPEVTKYAGLVSAQSHRQELIDDLYNITHDPHRGPICGGMVRELLISFKRSTGQKPQRIIFYRDGVSEGQFYQVLLHELDAIRKACASLEANYQPQVTFIVVQKRHHTRLFAHNHNDQNSVDRSGNILPGTVVDSKICHPTEFDFFLCSHAGIKGTSRPAHYHVLWDENNFTADALQTLTNNLCYTYARCTRSVSIVPPAYYAHLAAFRARFYMESDSSDSGSMASGRGGVVLEIIGFTGELQVLLFYVTDQTGQGLPVRPAVTRCLGRVFAVMDQESTWG

SEQ ID NO: 108715 - protein, 106 aa, Oryza sativa
  Clone ID: PAT_MRT4530_12943C.1.pep
MTGPLAETGGGPVTGPQHRHRRSECTAYYEPNHRCSHLARILGAGTCEAQRQRAAAKGRGPAAAPCVARAKQGNVQVSCAVRDTGSPRRVPHGGHLHLPRAPRWSN

SEQ ID NO: 108716 - protein, 602 aa, Oryza sativa
  Clone ID: PAT_MRT4530_12944C.1.pep
TRELTFPVDQGGTVKSVVQYFQETYGFAIQHTYLPCLQVGNQQRPNYLPMEVCKIVEGQRYSKRLNQNQIRALLEETCQRPHDRERDIIQMVNHNSYHEDPYAKEFGIKISERLASVEARILPAPRLKYNETGREKDCLPRVGQWNMMNKKMVNGGRVRSWICVNFARNVQESVASGFCRELARMCQASGMDFALEPVLPSMYARPDQVERALKARFHDAMNILGPQHKELDLLIGLLPDNNGSLYGDLKRICEIDLGLVSQCCCTKQVFKMNKQILANLALKINVKVGGRNTVLVDAVSRRIPLVTDRPTIIFGADVTHPHPGEDSSPSIAAVVASQDWPEVTKYAGLGAAQSHRQELIDDLYNITHDPHRGPICGGMVRELLISFKRSTGQKPQRIIFYRDGVSEGQFYQVLLHELDAIRKACASLEANYQPQVTFIVVQKRHHTRLFAHNHNDQNSVDRSGNILPGTVVDSKICHPTEFDFFLCSHAGIKGTSRPAHYHVLWDENNFTADALQTLTNNLCYTYARCTRSVSIVPPAYYAHLAAFRARFYMEPDSSDSGSMASGRGGGSSTSRSTRAAGGGAVRPLPALKDSVKNVMFYC

SEQ ID NO: 108717 - protein, 463 aa, Oryza sativa
  Clone ID: PAT_MRT4530_12945C.1.pep
MDYNPVDSSGTDDDLPPTYQNRGVRGSGRVSGNGRDIVSAVPYNRTKPQTDMETQIHQLEQDAYCSVLRAFKAQSDAISWEKEGLITELRKELRVSDKEHRELLNRVNGDDIIQRIRHFYSREWRETKGGLQADMVNNAQRSHDRVPSPTTSARKRQKTSQSIPSASVPVPSPAVHSQTLTAPMQPLSSATKKVAPPGTKGKKTKPGQKIPGGSAIKTMSSAGPSGRGPIMNKNLSGGLPTEPISVNPLIGRKVMTRWPDDNSFYEAVITDYDPQLDRYALVYDINTADETWEWVDFKEMAPEDIRWEGGDPGIIQQGRGATVHGGKKSSSRNGPMSGPGRGSRGPQKNTSRKEFPPSQNGVGKKSSDCIEILHTESLIKEVERVFSASNPDPLEMEKAKKVLKEHEQSLIDAIARLAEASDGESEERAQPLQHNRGWRNHHGGNYANDMTIDGHMVGDADAL

SEQ ID NO: 108718 - protein, 68 aa, Oryza sativa
  unsure (1)..(68): unsure at all Xaa locations
  Clone ID: PAT_MRT4530_12946C.1.pep
TFAPLQLNHNCTYAYTLYHQISEYQFHSLAVCTTLSTSSIHSNQAKDCKPPRTSNLLHKSNTRWXELQ

SEQ ID NO: 108719 - protein, 176 aa, Oryza sativa
  Clone ID: PAT_MRT4530_12947C.1.pep
MGSRRPRLPGFGEDCEPRGGGRGGGGGGGRGRGSYYPQAQQYHPQGHGGRGGAGYYHGAAPQPRGAMVVQQWRPATAAAEHLGHQQPYNSSVRPQHYYGPSAIAPELLQAMDAPHEPPANVSSPEAASPEASSPRSLALEVTEQLQDLSVQYQLSESQEEIVQHVPVSTKSFKFPH

SEQ ID NO: 108720 - protein, 462 aa, Oryza sativa
  Clone ID: PAT_MRT4530_12948C.1.pep
MPNNAQCQVVDDRLSALPDEILIDILQRLQLPTAARTTTLARRWTHLLQSMNHLEIDVADFIPRRSAPSLKRNTMTRVKVAMSRTLHLCFYLTDPYLHSVGRMLEDAVQSAGGRASKIEVLSFSILTEVPELLCTEKHLARYGRRFMSFFQAYPNAFRRLTSLSLWALRFGDSDIPNLLASCLQLQHLTLQDCDNGKRYVLRIDAPNSQLSTLTMAFCSYIKVELINAPKLKCVDCDTWVGANPPVCFGCVPMLDRIRFSSTCHKMQLPFKLSDWLSTVPTLTSLHLDFQDEMVWILPEEPKKLFPIFRNLRNVYLCSISLDCGLDWTLFVLEGAPFLERFHVKISLHICDENGFKDRADRSNVVWEASSESIKHKTLRLLDINGFETTENLIKYIRLVIQRAVGLQRIHLHDKEPCEDCDGIYLNTPSLSRTIFPNNEAEKDLLRQQLLQGFSSSIEITIG

SEQ ID NO: 108721 - protein, 83 aa, Oryza sativa
  Clone ID: PAT_MRT4530_12949C.1.pep
MKSSMVLASVILLIMAATAHGLRLDMGLHAALNNEGMLNSKWQSTANRPIDTRRASNDRRGPDATSINLQKDELDHLQSEENC

SEQ ID NO: 108722 - protein, 393 aa, Oryza sativa
  Clone ID: PAT_MRT4530_1294C.1.pep
MGSQEYIKQGGQQLVAAILGIGTAVPPYVLPQSSFPDYYFDISNSNHLLDLKAKFADICEKTMIDKRHVHMSDEFLRSNPSVAAYNSPSINVRQNLTDVTVPQLGAAAARLAIADWGRPACEITHLVMCTTVSGCMPGADFEVVKLLGLPLTTKRCMMYHIGCHGGGTALRLAKDLAENNPGGRVLVVCSEVVSMVFRGPCESHMGNLVGQALFGDAAGAVVVGADPVEANSERTLFEMVSAWQDIIPETEEMVVAKLREEGLVYNLHRDVAARVAASMESLVKKAMVEKDWNEEVFWLVHPGGRDILDRVVLTLGLRDDKVAVCREVMRQHGNTLSSCVIMAMEEMRRRSAERGLSTAGEGLEWGLLFGFGPGLTVETILLRAPPCNQAQAV

SEQ ID NO: 108723 - protein, 761 aa, Oryza sativa
  Clone ID: PAT_MRT4530_12950C.1.pep
MAPASPATTPSGALAPRLPLSALLSLLAALLRSHHPAFPARFSFPTLLSKASSSSSPRLHLPSALALHAQLLRRGLLFSPPLHAANALLHFYAAATLLPCARNLFDEMPFRDVASYNTMMTAYAGAVDGIDAARHLFDGMLLRNVVSWNIMINGYVKVKRPEQALEVVRWMAEIGVRGTAVAMVGAATACARLGRLGAGKEVHCAFLRRFEERNLLFSTALVDMYGKCRNADAARKVFDRLSFRNVVCWNAMIIGHCVYGEPGDGIRLFHDMIGQDEVTFIGVLCACTRLALLDDGKAYFEQMSTMYNIKPTFAHYWCMANLYASVGLLEEAEGLLTSMPEELKAHALGGLLGLCRFRGEWELGERIVLRLIELEPNNSVHYALLCNVYASAGRWEDVHRHQVIDELVSNDEQCQVDDDRLSALPDEISIDILQRLPLRTAARTTTLARRWTHLFPSMTHLKIDINEFVPRILTRHNVARSMAMSWYTQALRTLLAPTIDPDRTIRTMHLRFYPTDSYLLSIARMVDDAVQSASASKIEVLDFAILNEVSEVHCTEKQMSRYGRRFMSFFQACPNGFSTSFYGLCDSGRNSVLKIDASPCSQLRTLRMIFCSYIKVWIMPEEPKKLFPIFRNLKDVYLYNISNDSGLDWTLFVLEGAPSLKSFHVKQCQVVDDRLSALPDEILIDILQRLQLPTAARTTTLARRWTHLLQSMNHLEIDVADFIPRRTLHLCFYLTDPYLHSVGRMLEDAVQSAGGRASKIE

SEQ ID NO: 108724 - protein, 144 aa, Oryza sativa
  Clone ID: PAT_MRT4530_12951C.1.pep
YQQCQVVDDRLSALPDEILIDILQRLQLPTAARTTTLARRWTHLLQSMNHLEIDVADFIPRRSAPSLKRNTMTRVKVAMSRYTQAMRTLLAPRAESLNSSSSGHCTCASTSLTLTCTPLGACLRMQFRVPVAEQARLRSFPFPS

SEQ ID NO: 108725 - protein, 98 aa, Oryza sativa
  Clone ID: PAT_MRT4530_12952C.1.pep
MSGLEHFVKHVVGVTFDCSFLIDAGKSFAFFPTSAQQLASTIEATTALGTREDDGDILAIFGEGKPVAGLQLGAAMLRKTTAKTDHHGVIDRARPEVE

SEQ ID NO: 108726 - protein, 627 aa, Oryza sativa
  unsure (1)..(627): unsure at all Xaa locations
  Clone ID: PAT_MRT4530_12953C.1.pep
MAAAPPSVASSSSSSSPVLSAAHRRRLNDVERDAFDYGGPCDVDVDHDDDDGGGGVRRGHGAGVAGVRALFSSARRSKRASVVTFRSWIPXPLAYKGLKLYMRAPTSWAKASYYRAFSRTLKKAKVVKFTHTDSRIVNNGLPPSIQRLRCRANYEALXSTKKLKELSTALVDRLRNGSNHYIALHLGYEMDMLSLTSCSNNLSHKGADELREQDRMNSATAGYIIVNANGGLNQMRLGISDMVAVAKLMNATLVIPTLDHKSFWTDPSDFKDIFDVEHFKKTLEGDISIVDSLPLAYKGLKLYMRAPTSWAKASYYRAFSRTLKKAKVVKFTHTDSRIVNNGLPPSIQRLRCRANYEALRFHKEIEELSTALVDRLRNGSNHYIALHLRSVMYFLFLSINRYEKDMLSFTGCSHNLTHKEADELREMRLNVRHWKEKEINSRERRLQGRCPMTPREVALFLKAMGYPSSTKIYIVAGEIYGGHSMDSLKAEYPNIYTHYSLATVDELEPFKLYQNRLAALDYNVAVQSDVFVYTYDGNMAKAVQGHRRFEGFQKTINPDRQKLVGLIDKLDEGTLTWNEFQSEVKIHHENRLGGPYQRLSGRSPRQEEYFYANPLPGCLCKRMQRIK

SEQ ID NO: 108727 - protein, 36 aa, Oryza sativa
  Clone ID: PAT_MRT4530_12954C.1.pep
KSSQVKPQASCWSKKIGQPRVFVLRRSSEVSPGADL

SEQ ID NO: 108728 - protein, 353 aa, Oryza sativa
  unsure (1)..(353): unsure at all Xaa locations
  Clone ID: PAT_MRT4530_12955C.1.pep
MAAAAARWAPVVGLLGLLLLPFAPAPAGAATPARSPPSSASSAVFLLSGDVYPTGHYYVTMNIGDPAKPYFLDVDTGSDLTWLQCDAPCQSCNKVPHPLYRPTKNKLVPCANSICTALHSGSSPNKKCTTQQQCDYQIKYTDKASSLAVVGKNGAAPATTDGLLGLGRGSVSLLSQLXGSKGSPRMNYYSPGSATLYFDRRSLSTKPMEVVFDSGSTYTYFSAHTKQLFLXAIKGSLSKSLKQVSDPSLPLCWKGQKAFKSVSDVKKDFKSLQFIFGKNAVMDIPPENYLIITKNGNVCLGILDGSAAKLSFSIIGDITMQDQMVIYDNEKAQLGWIRGSCSRSPKSIMSSFP

SEQ ID NO: 108729 - protein, 116 aa, Oryza sativa
  Clone ID: PAT_MRT4530_12956C.1.pep
SLSAEALLHIIMAQARKELPLLPPPQAASSSPTVPAAHSPFLLSRQNSSAAPRRRRRRGHKLTRSRRSNSMGNGGAANEMISPGEELMSPLNGGGSSSANASALFSQGGDSLLDDC

SEQ ID NO: 108730 - protein, 1268 aa, Oryza sativa
  unsure (1)..(1268): unsure at all Xaa locations
  Clone ID: PAT_MRT4530_12957C.1.pep
MAVKGKGKAVASASASGGGVKRRKGPGDAAGPSSSSSAAAEAAKRRRRSGVLQFFDDAAFVGDEEEDEDEEEEEEEEMFASDGDDDGFFTEGKAENVNLKRTERSHPLPFLGIVKEEELSGDELEEFIKDRYSSRVKHTPFDGSTNVQDDEFTEDGLLKEPVIWRIKCMVGRERQIAFCLMQKYVDLQKFGTKVPIISAFALDHVRGFVFVEAEKACDVTEACKGFCSVYISRINSVPVAEVPSLLSSRAKPFAISPGTWVRMKTGIYKGDLAQGGAIPLKEAAIPAPRLISSQELEFFGSHIERKHDRQTNDFYEVLDGLMFKDGFLYKRVALSSLIYWGIQPTETELLKFSSTPTTSDWTANKGQSSWGAPTPSGGDHQAGKNNGTNPWGAPSDRMTGKGSGGGGSWKNKTEDTWNSSGETRHSGTTPXNLLGVDQKMAKRKKDHVLKDLREGDKSVEAAPGTSRMEDGTAASARAPKEVAAVAPGTRRMAGTVTRAPKEVVAAAPGTRQMADGTAAARVGAPAMVGSFVSPSNSDPDPFPMFSYEQNEQRDNERPYRSTREQLFSIGEMLRIRKGPMKGYLCRVVRIFRNDVTVKLDSLLKIVTVQAEFLSVPAKRGDNSSGAPSGPFGSEADKPSWDNGLPSFGSDSWQPFSNCSDGAAGWNETRTSKQSHSTGGWDAAAANLNESSDVDAHKDSWGKAKDTTANAEEKNNESGNWNKAGPLDKVCGSDWGSPKFSSGDGPSSWNKGDKIGGDSQNGSWSRPGGNFEGGRGFGRGRGRGRGRESGDFGGRNDQGSWKNSGTSDSSGRPSWRSDSQVEKEVGDSGGYRGRGRGRGQYGGQGRGDNGWRNGGQSNSEFGRSDADAPNWGNKGVSNKGSWDSGDNWNAPKSSDENQTSAWNSSEDKRPSGGQEQQSGAWASKMTSTAGAEDKSDAWGTKAEGNSGSTGGKWENASSGEEQQSDPWGSKICSNEGKEQETDPWTSKVTSTADADDNNNVWNTSASDTASGSESKWGNAGAEEKADAWKSKVGSENSGGWNQKSSWGKPSFSGGEQEPAWSNPKNGDDNSGYGRGGFGRGNRGRGRGRNFGGDWSQSSDWNANKGQSSWGAPKPSGGDDQAGKNNGNNPWGAPADSMTGGGSGGGGSWKNKTEDTWNSSGGTRDSGTTPGKSSWGGSEDGQKKEGSWGKSEGSGRQVGGGSSWDKPDGGWNSSKCEGTQGGGGGSSWDKADGGNSNKGTQGGGGGSSWDKADGGWNSSSKGGSSGNGGW

SEQ ID NO: 108731 - protein, 569 aa, Oryza sativa
  unsure (1)..(569): unsure at all Xaa locations
  Clone ID: PAT_MRT4530_12958C.1.pep
MFQRSLDGLVAFLTCLFPYLPEVEALRYLDAAGADALVAARLIVNRRGMEQSFVVDSGATVITAEIALRGAARPARHPXMLITPNKSRVKALLDNTMMNHATVKDDEILHLKQSWELAESRLDHHNTKTKLAKSWERLAKSLLLRAKPQPVLPHVRAAKKRMLFATIRGFYLQAMARLPADELRARYHRSMLKAGHCYGPLDPVSNIIVNTIWYDQAAFSQSKPCTLQMISTKCLMRIVARSFYGLLSFLCTRYPDCSPDQAMGWLQMANADLRIVDPALGYMSNKITRTDNISMSFCCNLPLQHGDRLCSDDVTLISLLFRKRHFELRHQQQPEPKRLCNDAYIALCHRRFKFWLHHDLVCKNVEVALATFNLDKLKVHKYRLHFICGVNECVSGLEYGPVRSNSPWRIYKYNHSHINFLAICDDPQSANDPATLFFAECSNYSVHEESWCIPVVSPHRDTELVRCIYCESKGTRIVHPGEKSFHGRDTEFEKVMRGERLFPGLQRGSYSNIRLAERTDADWVDNLEEDCIYITACAADNDRRVNPLNYPPMYRERVLPCCEAASDRS

SEQ ID NO: 108732 - protein, 39 aa, Oryza sativa
  Clone ID: PAT_MRT4530_12959C.1.pep
WGTRSTSSLSATTAEDGKIGLARIIVQQSLVMRSFDSKI

SEQ ID NO: 108733 - protein, 123 aa, Oryza sativa
  unsure (1)..(123): unsure at all Xaa locations
  Clone ID: PAT_MRT4530_1295C.1.pep
MDSDAGAKALVEHYSRTICTIRSVLGSADQDWSLLTLEGQLFLGTSVICGQLCSLSFALSRHDIDXVHCHSVATQGGMLVFMCGSLRTDPYEHPXLKFSPMMHMLRAGGSLYVPDDMFCLNYG

SEQ ID NO: 108734 - protein, 66 aa, Oryza sativa
  Clone ID: PAT_MRT4530_12960C.1.pep
ILAGSGKGLIQGSNETNLDDFSLHWGQAPGLFPGKPVLKFVGSLKGLRVGLIWRLGYRMLVKALWG

SEQ ID NO: 108735 - protein, 340 aa, Oryza sativa
  Clone ID: PAT_MRT4530_12961C.1.pep
MTQQGKSQAGLSRASGGGAALRSADYGQRRRGEARGRSAGRQGGARSCGAAARGSSDRQGAAAPRGSGVEQRRSGWPGRQARGRQQEEQVSCEQPRSAINSLTISDLTVSQRDLKSLEPGLCKRKYSCKRKCCSRDGGGGGGGGGGADSWNLEEIGLWVRSAEGNGGGGGGEDNGHCVDDEGGAVGAACPGEGGTAGTAPEHRRSGWCAMPEGAAWHTQSRGRRRWRSGARMEGEHTAGLHAMAVVAAATSYKRARWGWLRPMRMWSALQGRWVVTLRRTLSGRSLSIAADAAVFAPRHTRVSAARRRLCLPAAIAVPLSPTRCSHPAGSPPLDASAAAP

SEQ ID NO: 108736 - protein, 140 aa, Oryza sativa
  Clone ID: PAT_MRT4530_12962C.1.pep
MVREVAESCVDGVVMEMVAAYCGRFYAAKPELAARRIEAIGFQVGHQLTESWSNIPKSIPLASAEQQATNYQTTSTSFNSRKPTMCKKWEEEEDEQQTGRVALTSCCSFVYMGLVAGATGTNTIEQWRLARTRCCGIQIR

SEQ ID NO: 108737 - protein, 93 aa, Oryza sativa
  Clone ID: PAT_MRT4530_12963C.1.pep
FNEQVVFEIPKDCISNDPLVTERNTKLVKFYEEIAQNRYQRYHLIEAGAGKKKLTKSWENLQTKLKTARTYQQDVRQVGGKAVPIPAHFTDEV

SEQ ID NO: 108738 - protein, 73 aa, Oryza sativa
  Clone ID: PAT_MRT4530_12964C.1.pep
VSGRRRRRRRSSSSHSTADAVPPLLHRHSTGPKSSSSRISARPLATPTEFAPPPADPPPQAIANSAIGFGGEE

SEQ ID NO: 108739 - protein, 94 aa, Oryza sativa
  unsure (1)..(94): unsure at all Xaa locations
  Clone ID: PAT_MRT4530_12965C.1.pep
MWASPSMTVVSSTSVSTLRLDPSPNETKSNPRSKRRTRPCPPPSPSPTPMXPRPRPPRAAAAPGDARPPPPRPPARPPRRARRRPARRWRAWRR

SEQ ID NO: 108740 - protein, 453 aa, Oryza sativa
  Clone ID: PAT_MRT4530_12966C.1.pep
MESSLPRKRKGARSACSLVGSSHEPTTVARKRACREPKPRPEKKKKDPSSDDASGRGGGGGVVQTAPPASGRAAPESPSRGLKRKLGCIESATRMGRKKRLESEYELGAEIGQGKFGSVRICRAKVGGEEFACKALPKNGEETVHREVEIMQHLSGHPGIVTLKAVFEDADKFYLVMELCGGGRLLDEMAREGKFSEQRAAIVIKDLMSVVKYCHEMGVVHRDIKPENILLTKAGKIKLADFGLAARVADGQKLSGIAGSPAYVAPEVLSGCYSEKVDVWGAGVLLHVLLHGSLPFQGGSLDAVFEAIKTVELDFHSGPWESISSLARDLISRMLNRDVPSRITADEVLSHPWVVFYTECPLKAVTANLSITNNIVAPRITWDRIRLHCESISSDSSSQRSADQDECGIVDALTAAITNVRISEPKRSRLCNPAIPIQQECSSNLKSNLCTAF

SEQ ID NO: 108741 - protein, 128 aa, Oryza sativa
  Clone ID: PAT_MRT4530_12967C.1.pep
KKGGENPGINHGPPNKRLKNGPQKTPRPLLIKQPPRGEGPKKKVSKSQNKSWFYFTAETRLWPQRGGKKKNGKTAPNKRQHICSQKKKDKKRGPPPQRKRIGGKGPETKKPLFPPGKGKTPPGFLKGP

SEQ ID NO: 108742 - protein, 41 aa, Oryza sativa
  Clone ID: PAT_MRT4530_12968C.1.pep
LLSSPICQQMILLCHIYFLGNIPSDGVVLLADDALSHVGDF

SEQ ID NO: 108743 - protein, 43 aa, Oryza sativa
  Clone ID: PAT_MRT4530_12969C.1.pep
RASKEVANEKTESVVIRAPRSPTHYLKMPIVDNIPEINYLLYF

SEQ ID NO: 108744 - protein, 47 aa, Oryza sativa
  Clone ID: PAT_MRT4530_1296C.1.pep
SVRPLFFFFWGFKRSISLLPMSKQSLNMARGFADDQRVTRENDQDSQ

SEQ ID NO: 108745 - protein, 652 aa, Oryza sativa
  Clone ID: PAT_MRT4530_12970C.1.pep
MRKGENRGKREEADVATLTYGVHGPDGSAQERHDPTGVGPVLDQPDCWAVPGPLPQHGPMIRWLGVNNIYAMKNLVELYYEREIQLFVLVSFALQVFLFFTGSLRRRSTNIFLSVSIWTAYLGADWVAVYALGNLSGVQESIISRRSQLPLSFFWAPFFLIHLGGQDTITAFAMEDNDLWLRHFLNLVVQVVLAVYVFWKSARRQSAELIVSGVFVFIVGVIKYGERTWSLKCGSSKSLESSPGHHYKQRFPELRDSDCDYRNMVSNALCSMFNVLNVFAARNLFGYSFPSVGPDDTQVDAKKMFKLVELELAMMYDDLYTKALVLRTRTGIILRCISHACSFVAFALFLASDKDRYIGVDIAITDIGWPERRPLWSSSIGQYSLLSWDSGSDQPTRSCNQKVMALVRRSARLVGVGKKKLFWMSKLLDTKFLEVDEKTMEFVVEGINRIRDEFSDVASRAWPKLGPFLETIRVHFTADFGAAIVVIHSFTEEYLMNAAAAAEEEEEEAGQGGEANDMMEVCRKLSNYMMYLLVNHPSMLPLNVSSEATLAEAAQLMKVVRGRALEEMVDPCDETLREMVDMWTRLLIYTAGKSRGPMHAAELACGGELITFVWLLMVKAGLGDSEAKRILIANSACADTNTKEAYAFYFAS

SEQ ID NO: 108746 - protein, 86 aa, Oryza sativa
  Clone ID: PAT_MRT4530_12971C.1.pep
ILTPSVHHIKGFCQDVTYHSTTNLDRLSTQIVVLGCATSCQITLYLTTEGVRDSHYYRKPHRCRLGIGHRCRLTPVPEIIGAGFRT

SEQ ID NO: 108747 - protein, 628 aa, Oryza sativa
  Clone ID: PAT_MRT4530_12972C.1.pep
MKNLVELYYEREIQLFVLVSFALQVFLFFTGSLRRRSTNIFLSVSIWTAYLGADWVAVYALGNLSGVQESIISRRSQLPLSFFWAPFFLIHLGGQDTITAFAMEDNDLWLRHFLNLVVQVVLAVYVFWKSARRQSAELIVSGVFVFIVGVIKYGERTWSLKCGSSKSLESSPGHHYKQRFPELRDSDCDYRNMVSNALCSMFNVLNVFAARNLFGYSFPSVGPDDTQVDAKKMFKLVELELAMMYDDLYTKALVLRTRTGIILRCISHACSFVAFALFLASDKDRYIGVDIAITYSLFIGGFFLDFCAMFIVITSPWTWVWLKAAQKRDWLANLSWFLFSSDIGWPERRPLWSSSIGQYSLLSWDSGSDQPTRSCNQKVMALVRRSARLVGVGKKKLFWMSKLLDTKFLEVDEKTMEFVVEGINRIRDEFSDVASRAWPKLGPFLETIRVHFTADFGAAIVVIHSFTEEYLMNAAAAAEEEEEEAGQGGEANDMMEVCRKLSNYMMYLLVNHPSMLPLNVSSEATLAEAAQLMKVVRGRALEEMVDPCDETLREMVDMWTRLLIYTAGKSRGPMHAAELACGGELITFVWLLMVKAGLGDSEAKRILIANSACADTNTKEAYAFYFAS

SEQ ID NO: 108748 - protein, 41 aa, Oryza sativa
  Clone ID: PAT_MRT4530_12973C.1.pep
AKTPCSVKPFLSLVHQVRLSSLHHKLLVCALLAQRSIAQTY

SEQ ID NO: 108749 - protein, 38 aa, Oryza sativa
  Clone ID: PAT_MRT4530_12974C.1.pep
VTFFVIGSFFVIGRSLSGHCNLTNTPDNRRKKKREIRA

SEQ ID NO: 108750 - protein, 105 aa, Oryza sativa
  Clone ID: PAT_MRT4530_12975C.1.pep
MAAARRVAGGGGGNLWGPPQPPPSTGGGIPQLPAAAAAPVEGLLDAPFSSSSGGGGVWSVYSCGVLGLWLGSVSALWCIRFGGLRVPPVSRWQSLAPFGLPRFRG

SEQ ID NO: 108751 - protein, 1156 aa, Oryza sativa
  Clone ID: PAT_MRT4530_12976C.1.pep
MAMTMLFSLLFCTAKATDDSGAETEAEALLRWKSTLIDATNSLSSWSIANSTCSWFGVTCDAAGHVTELDLLGADINGTLDALYSAAFENLTTIDLSHNNLDGAIPANICMLRTLTILDLSSNYLAGAIPANISMLHTLTFLDLSSNNLTGAIPYQLSKLPRLAHLGLGDNHLTNPEYAMFFTPMPFLEFLSLSYNYLNGTFPEFILNSNSLRMEHLDLSYNAFSWSIPDSLPNLRVLELSNNGFHGTIPHSLSRLQKLQDLYLYRNNLTGGIPEELGNLTNLEALYLSRNRLVGSLPPSFARMQQLSLFDVSNNMLTGSIPPLISNWTNLHYLDLSNNNFSGYFPVVLRNLSRLEFLNLGYNRISGEIPSWIGESFSHLMILQLRSNMFHGSIPWQLSQLPKLQLLDLAENNFTGSIPGSFANLSCLHCIDLSNNSLSGEIPSELTNLRGIQSLNISRNFLQGNIPNGIGNLTHLESLDLSWNKLSGHIPHSISNLMSLEWLNLSNNLLSGEIPTDSAAFENLTTIDLSHNNLDGAIPANISMLHTLTVLDLSVNNLTGTIPYQLSKLPRLAHLNLGDNHLTNPEYAMFFIAPNLRHLDLSYNGFHGSIPHSLSRLQKLRELYLHRNNLTRAIPEELGNLTNLEELVLSSNRLVGSLPPSFARMQQLSFFAIDNNYINGSIPLEMFSNCTQLMIFDVSNNMLTGSIPSLISNWTHLQYLFLFNNTFTGAIPREIGNLAQLLSVDMSQNLFTGKIPLNICNASLLYLVISHNYLEGELPECLWNLKDLGYMDLSSNAFSGEVTTSSNYESSLKSLYLSNNNLSGRFPTVLKNLKNLTVLDLVHNKISGVIPSWIGESNPLLRILRLRSNLFHGSIPCQLSKLSQLQLLDLAENNFTGPVPSSFANLSSMQPETRDKFSSGETYYINIIWKGMEYTFQERDDCVIGIDLSSNSLSGEIPSELTNLRGLQFLNMSRNVLYGGIPNDIGHLHVVESLDLSCNRLLGPIPPSISNLTGLSKLNLSNNLLSGEIPIGNQLQTLDDPSIYANNLRLCGFPLKIPCSNHSNSTSTLEGAKEHHQELETLWLYCSVTAGAVFGVWLWFGALFFCNAWRLAFFSLIDAMQQKLMQPRSNVRWLPGSISTTPSPAVLHLRSRRLAA

SEQ ID NO: 108752 - protein, 109 aa, Oryza sativa
  Clone ID: PAT_MRT4530_12977C.1.pep
PETRWVFTLLGCIYVPNIIPMGTLTGKTFTHRVHGCGYVLLSPEPINPWVENTRRPSPICRWPKAHNHQNPSGQATAAPHGARHTPARHRVGAHGRSTSRRPVSVAPVE

SEQ ID NO: 108753 - protein, 85 aa, Oryza sativa
  unsure (1)..(85): unsure at all Xaa locations
  Clone ID: PAT_MRT4530_12978C.1.pep
SWSIANSTCSWFGVTCDAAGHVTELDLLGADINGTLXLSTLDLSGNAFSGPIPDSLPEIAPNLRHLDLSYNGFHGSIPHSLSRQS

SEQ ID NO: 108754 - protein, 58 aa, Oryza sativa
  Clone ID: PAT_MRT4530_12979C.1.pep
YEITSISMWEVPRKVIHIFLNQAHGVHMTTIAFSTVKIAAAMKKVRKDFWVPWSYHMV

SEQ ID NO: 108755 - protein, 238 aa, Oryza sativa
  Clone ID: PAT_MRT4530_1297C.1.pep
MDRTSAVPGRVSDPGSAWFGGGERSSSAGPGRNVRLIATAVAAFVSVLGLALFLHLYVCHVRRRNRRRAAEAAALATANAGAPPKQVGLDPSAIAALPTAAYGKVAGGDAAGGTTECAICLGAMQEADAVRVLPACRHVFHVACIDKWLASSSSCPVCRAGVEPPPPPPSTAAARCVHEKQDAEKEEAAAGSSAPVRVLGASLMKMLSRERPSPRRQPGVHAVEMEDLESQLPRPQQQ

SEQ ID NO: 108756 - protein, 735 aa, Oryza sativa
  Clone ID: PAT_MRT4530_12980C.1.pep
MGAKATDDSGAETEAEALLRWKSTLIDATNSLSSWSIANSTCSWFGVTCDAAGHVTELDLLGADINGTLDALYSAAFENLTTIDLSHNNLDGAIPANISMLHTLTVLDLSVNNLTGTIPYQLSKLPRLAHLNLGDNHLTNPEYAMFFTPMPCLEFLSLFHNHLNGTFPEFILNSTSLRMEHLDLSGNAFSGPIPDSLPEIAPNLRHLDLSYNGFHGSIPHSLSRLQKLRELYLHRNNLTRAIPEELGNLTNLEELVLSSNRLVGSLPPSFARMQQLSFFAIDNNYINGSIPLEMFSNCTQLMIFDVSNNMLTGSIPSLISNWTHLQYLFLFNNTFTGAIPREIGNLAQLLSVDMSQNLFTGKIPLNICNASLLYLVISHNYLEGELPECLWNLKDLGYMDLSSNAFSGEVTTSSNYESSLKSLYLSNNNLSGRFPTVLKNLKNLTVLDLVHNKISGVIPSWIGESNPLLRILRLRSNLFHGSIPCQLSKLSQLQLLDLAENNFTGPVPSSFANLSSMQPETRDKFSSGETYYINIIWKGMEYTFQERDDCVIGIDLSSNSLSGEIPSELTNLRGLQFLNMSRNVLYGGIPNDIGHLHVVESLDLSCNRLLGPIPPSISNLTGLSKLNLSNNLLSGEIPIGNQLQTLDDPSIYANNLRLCGFPLKIPCSNHSNSTSTLEGAKEHHQELETLWLYCSVTAGAVFGVWLWFGALFFCNAWRLAFFSLIDAMQQKLMQT

SEQ ID NO: 108757 - protein, 224 aa, Oryza sativa
  Clone ID: PAT_MRT4530_12981C.1.pep
MSFIFGKRKTPAELLRENKRMLDKSIREIERERQGLQAQEKKLIAEIKKVAKQGQMGAVKIMAKDLIRTRHQITKFYALKSQLQGVSLRIQTLKSTQAMGEAMKGVTKAMRQMNRQMNLPALQKIMREFEIQNEKMEIVSSTMNDAIDDALEGDEEEEETEELVNQVLDEIGIDVNSELVGAPSTAVAAPVGAGKVAAQAEAAGGGDGGIDDDLQARLDNLRKM

SEQ ID NO: 108758 - protein, 132 aa, Oryza sativa
  unsure (1)..(132): unsure at all Xaa locations
  Clone ID: PAT_MRT4530_12982C.1.pep
GSNPNSFPVLVKLFPNTGEFIQMALQKAELQGXRPINLSWGPFXRRAPPPPLKAPFSFRXPXRSGKNLIAKKVIPVNWKPNAIYGSNVPFYLDWAETILLIYFPNNLVKRVPFKTYIFSGVKKGSLSSYSFL

SEQ ID NO: 108759 - protein, 133 aa, Oryza sativa
  Clone ID: PAT_MRT4530_12983C.1.pep
MNELLGIGSATATTAALPSPYPHPLIRSKCRIMMIARPKPKSHGLHGCNATTTKSPPCSGGHPHISICFCDVRGVVCASGAPHVRSFVPPPANLQPSNAETDVAYFPPRPRAHGHGHGDEASTHHVRTCARCH

SEQ ID NO: 108760 - protein, 465 aa, Oryza sativa
  unsure (1)..(465): unsure at all Xaa locations
  Clone ID: PAT_MRT4530_12984C.1.pep
LVDPRAAGIDPMKKRIAKSGQGVPLGGXGSGSXGRSYKGEFQRWQLFPGTCEERPVLANQFSAFISRKDGRNYSSVLHPGKPDLPKNWILGRAAAWATRFAPRSLPWGLVATLWAACPRCHRSVSSAVPHPATPVSPERRSSSGIRSRGCYLRRHGSSCHARFPRAWPCCWGVPAPGVSLLCRQISPIIPHNYQQSSYPVSVFTFTVTNSGNTAADVTLLFTWANSVGGKSERPEFPANSPMIEKDGVHGILLHHRTANGQPPVTFAIAAQEKEDIHISECPYFIISGSSDAFSAKDMWNYVKENGSFDNLDLTKTSMCSKPGLSIGAAIAASVKLPPQTTQNVSFALAWAWPEVKFSSGKTYHRRYTKFHGTDNDAAASLAHDAILEHNSWERQIEEWQNPILQDERFPDWYPVTLFNELYYLNAGGTIWTDGLPPIQSLTGIGEKKFSLDMQNGDADDANGII

SEQ ID NO: 108761 - protein, 170 aa, Oryza sativa
  Clone ID: PAT_MRT4530_12985C.1.pep
FQRWQLFPGTGEERPVLANQFSAFISRKDGRNYSSVLHPGKPDLPKGSNISGIGSWDWNMSGQNSTYHALYPRSWTIYNGEPDPDVNIVCRQISPIIPHNYQQSSYPVSVFTFTVILLSMRYLQYTILVTNSGNTAADVTLLFTWANSVGGKSELTGYHSNFPMIEKDGV

SEQ ID NO: 108762 - protein, 76 aa, Oryza sativa
  Clone ID: PAT_MRT4530_12986C.1.pep
MTSTPLLHPLPLRSKSSLRATAPLLRRRCSSQNRGDDEKVVWAEVELACCCFALPPPLCSAHHRYSQNRGDGEKVV

SEQ ID NO: 108763 - protein, 106 aa, Oryza sativa
  Clone ID: PAT_MRT4530_12987C.1.pep
SSFGTTPSIPEMPVHRYDRDLSKNNFMSSPAPGDGFPIVTSLTTLFMNRDQLTGTNHIEFSANGPFKYQVAYQNLGLLGDDREWYFAIADVASCALPYQLCLPVKI

SEQ ID NO: 108764 - protein, 68 aa, Oryza sativa
  Clone ID: PAT_MRT4530_12988C.1.pep
HTLIQTESFYRTEHQHIKKGNKKKAIHPVLSGCLALHMSSTTPLIKQPPFTPNNLSTNAKLRPIQHFL

SEQ ID NO: 108765 - protein, 161 aa, Oryza sativa
  Clone ID: PAT_MRT4530_12989C.1.pep
VKWNEENLNDIESTKPVREKITEPKTPYHSMIDEDDGTVSPKRTIEESVDKSTHADAIKTALMEAVSSGKLSAREHLESCSNEEEEEEEEEEEEEEEEEEEEEEQEEEEEEEEEEEEEEEEEEVAIKQGTDFEEQRKAHYDEFRKMKELRRRGTPSQEGDE

SEQ ID NO: 108766 - protein, 707 aa, Oryza sativa
  Clone ID: PAT_MRT4530_1298C.1.pep
KLLTIAPIKDEDGRLLKFIGMQVEVSKYTEGKKDTVVRPNGLSESLIKYDARQKDHARSSVSELLLALKNPRSLSESSNNTLKRKSQESLSMSMTEVPSKRSSESGSRRNSRSGTRSSLQKINEVPDQGNRTRKSGLRAFMGFLGMGHGSVEKNMLKPRDEDPLIDSDDERPESFEDEFRRKEMRRGIDLATTLERIEKNFVITDPRLPDNPIIFASDSFLQLTEYNREEILGRNCRFLQGPETDRATVRKIRDAIDNQAEVTVQLINYTKSGKKFWNLFHLQPMRDQKGDVQYFIGVQLDGTEHVQDDAAKEGVVLVKKTADNIDEAPTVPPAPILRPEDLWANHSKVVLPNPHMKDTASWRAIQKVLESGESIGLKHFRPVKPLGSGDTGSVHLVELLNTGEYFAMKAMDKSIMLNRNKVHRATAERQILDLLDHPFLPTLYASFQTKTHICLITDYCPGGELFVLLDNQPLKVLHEDAVRFYAAEVVVALEYLHCQGIIYRDLKPENILLHRDGHISLTDFDLSCLTSCRPQVFLPEDADEKKGRKNGSYPIFFAEPMRASNSFVGTEEYIAPEIITGAGHTSAVDWWALGILLYEMLYGYTPFRGKTRQRTFANILHKDIRFPASISVSLAARQLMYRLLHRDPANRLGSYEGANEIKGHPFFRGINWPLIRATAPPKLEIPLFSKDDMEKKGLVTNNRTDMF

SEQ ID NO: 108767 - protein, 98 aa, Oryza sativa
  unsure (1)..(98): unsure at all Xaa locations
  Clone ID: PAT_MRT4530_12990C.1.pep
MAAWCGAAVRPTTIACALRRPARHKSGGAPCSAHPQARCVAEHRHRHGPXRMGPPXNPLPPLDSHLTGGGCGCRVGGVCEPDLVCKGQNCTFVIVSLS

SEQ ID NO: 108768 - protein, 102 aa, Oryza sativa
  Clone ID: PAT_MRT4530_12991C.1.pep
MIDEDDGTVSPKRTIEESVDKSTHADAIKTALMEAVSSGKLSAREHLESCSNEEEEEEEEEEEEVAIKQGTDFEEQRKAHYDEFRKMKELRRRGTPSQEGDE

SEQ ID NO: 108769 - protein, 130 aa, Oryza sativa
  Clone ID: PAT_MRT4530_12992C.1.pep
TRPVRARAFAKKLSDAPLAIVDKRRQGHNMSEVMHLIGDVKGKVAIMVDDMIDTAGTITSAAALLKQEGAEAVYACSTHAVFRFGSWFIVTSMIHVIVLIHWLVAKEPCYGMIRQIGFMFDQYKNDRVEQ

SEQ ID NO: 108770 - protein, 149 aa, Oryza sativa
  unsure (1)..(149): unsure at all Xaa locations
  Clone ID: PAT_MRT4530_12993C.1.pep
VLPIVAAPRAPLSWDPIPSLLDWIVASLCLNLESILRSAVTHHRSRAGAREEELADGDPRSPEAAREEAAXAVEKAPADGNPAHRRLLRRRQQRGRASVGRAXGGGGVGGAAPAAGGGTRRSGGRSRGGGERLREAATGDKFFFSFSAP

SEQ ID NO: 108771 - protein, 156 aa, Oryza sativa
  Clone ID: PAT_MRT4530_12994C.1.pep
TRDWCHTCDHPSSPGGAYAPRGMHLQQIGVLMGDDITERFVHIFTELAVKHSLVPNQIVATGGVSQKSSQQLKISYFPIDSFSKLVAMVLKYSSAETGPNKCSLLPKIWLVAVRIIQRDSEEKKASFNPRPYFRLFISLLYDLISSDLHSDGANFQ

SEQ ID NO: 108772 - protein, 102 aa, Oryza sativa
  unsure (1)..(102): unsure at all Xaa locations
  Clone ID: PAT_MRT4530_12995C.1.pep
TEYRCSTSPSGDRKRISNSGNMCNLPKAKTIQGQKLKRGSGYSSMMYPNVEDYXDGIQGCHHLPPTSDKSVGYTTNKAEPGTAPFNPFFIVDTNFEALSPLA

SEQ ID NO: 108773 - protein, 235 aa, Oryza sativa
  Clone ID: PAT_MRT4530_12996C.1.pep
WRVAAPRGRRSEAAWWPAVDGATVGGWRWAAGGSGAERWPGEMERLRAVGGATRAAVRRSPTPVPARRHSSLTLPLATDPSAPPFLSLPPAGRRVPPLLSRRRCARRPWRGRRRSAARTRESREKKRRGEGEGRGAGELRLGGSGNGGVGVAPPTAHRRSISPHCRSAFSRRSPPAVAPFTAGRRAALLRRSVAHRRSAFSRRPSRRFAPSLLHSVAAPPVAPSAPPLALLSWQC

SEQ ID NO: 108774 - protein, 46 aa, Oryza sativa
  Clone ID: PAT_MRT4530_12997C.1.pep
QNMLEGKLNGGSLTLTTWIQSICCSRSMDCIYVAQRERYCVIEPRR

SEQ ID NO: 108775 - protein, 784 aa, Oryza sativa
  Clone ID: PAT_MRT4530_12998C.1.pep
MDQKAKEAAPAARGHPALRGPARRERYTHGLGAAQMGALRAMCGALIPALPAEEDDGARGGGDMDVERFYLATAAESTVPDEVAELTMTRCIWEAGVLVRIILWIRPPGVGTLALCGPRCVSGEFPYVRRFADMPVERREAALERSRSFLRSSRSSATSSSTPRFQLLIYNIVDENLENPSWKAIGYSVPAAEEEPQKEEPTEATPTPAPATAPPCRPLDNGVVETKQLDDNALLMSLAEKGLALKTGASSPSAHHHTVLCDAVVVRPRCRGRGGPAVRASGGYQVLGVQQRDWCPARDYSPLEGRSMERLYENGGVFSTANVTTTMFAGATVGGGSAVNWSACIRTPANVLQEWSNDHGLPLFGGQGYVQAMDAVCARLGVTGRCREEGFQNKAVRRGCEALGLRVEAVSRNSSEGHFCGSCNLGCPTGEKRGTDTTWLVDAVGRGAVILTGCKAERFILETNTGGGGGRRKKCVGVVAKCLGKGITKKLRIEAKVSVSACGALMTPPLLRNSGLKNRHIGRNLHLHPVSMAWGYFPDSTAELPGKSYEGGIITSMHRVTDRTIIETPALGPGAFAAVVPWESGRDMKERMRRYARTAHAVVLVRDRAAGTVGGEGRVRFTPSRGDAGELRAGLRRALRILVAAGAAEVGTNRSDGLRLRCKGARDEDVEAFLDEVSVEKGPMHPGSDKWALLASAHQMGSCRMGRSAKHGGVDGGGESWEAEGLYVCDGSLLPTAVGVNPMITIESVAYCVAKGIAESLASRAARSVENRDVSTNPPLACES

SEQ ID NO: 108776 - protein, 767 aa, Oryza sativa
  unsure (1)..(767): unsure at all Xaa locations
  Clone ID: PAT_MRT4530_12999C.1.pep
MDQKAKEAAPAARGHPALRGPARRERYTHGLGAAQMGALRAMCGALIPALPAEEEDGARGGGDMDVERFYLATAAESTVPDEVAELTMTRCIWEAGVLVRIILWILATRVGTLALCGRRCVSGEFPYVRRFADMPVERREAALKRSRSSLPSSRSSATSSSTPRFQVLIYHIVDENLENPSWKAIGYSVPAAEEEPQKEEPTEATPTPAPATAPPCRPLDNGVVETKQLDDNALLMSLAEKGLALKTGASSPSAHHHTVLCDAVVVGSGCGGGVAAAVLASAGYKVVVVEKGDYFAARDYSSLEGPTMERLYENGGVFSTANVTTTMFAGATVGGGSAVNWSACIRTPANVLQEWSNDHGLPLFGGQGYVQAMDAVCARLGVTGRCREEGFQNKAVRRGCEALGLRVEAVSRNSSEGHFCGSCNLGCPTGEKRGTDTTWLVDAVGRGAVILTGCKAERFILETNTGGGGGRRKKCVGVVAKCLGKGITKKLRIEAKXGLKNRHIGRNLHLHPXSMAWGYFPDSTAELPGKSYEGGIITSMHRVTDRTIIETPALGPGAFAAVVPWESGRDMKERMRRYARTAHAVVLVRDRAAGTVGGEGRVRFTPSRGDAGELRAGLRRALRILVAAGAAEVGTNRSDGLRLRCKGARDEDVEAFLDEVSVEKGPMHPGSDKWALLASAHQMGSCRMGRSAKHGGVDGGGESWEAEGLYVCDGSLLPTAVGVNPMITIESVAYCVAKGIAESLASRAARSVENRDVSTNPPLACES

SEQ ID NO: 108777 - protein, 921 aa, Oryza sativa
  Clone ID: PAT_MRT4530_1299C.1.pep
MASKGTGGGHGGVERKEQQQQRGYQLPRDSRGSLEVFNPSSASSFRTAAAAAKSASPFLAIPDREEDNVVAQQRAAEWGLVLQTDYHTGLPQGVSTRPSSCSARTSSEDTPQQQQSAAAIPRVSEELRAALSAFQQTFVVSDATRPNHPIMYASAGFFNMTGYTSKEVVGRNCRFLQGSGTDPHEIDKIRQALANGSNYCGRILNYKKDGTPFWNLLTIAPIKDEDGRLLKFIGMQVEVSKYTEGKKETVVRPNGLSESLIKYDARQKDHARSSVSELLLALKNPRSLSESSNNTLKRKSQESLSMSMSEVPSKRSSESGSRRNSRSGTRSSLQKINEVPDQVNRTRKSGLRAFMGFLGMGHGSVEKNMLKPRDEDPLIDSDDERPESFEDEFRRKEMRRGIDLATTLERIEKNFVITDPRLPDNPIIFASDSFLQLTEYNREEILGRNCRFLQGPETDRAIVRKIRDAIDNQAEVTVQLINYTKSGKKFWNLFHLQPMRDQKGDVQYFIGVQLDGTEHVQDDAAEEGVVLVKKTADNIDEAAKELPDANLRPEDLWANHSKVVLPNPHMKDTASWRAIQKVLESGESIGLKHFRPIKPLGSGDTGSVHLVELLNTGEYFAMKAMDKSIMLNRNKVHRATAERQILDLLDHPFLPTLYASFQTKTHICLITDYCPGGELFVLLDNQPLKVLHEDAVRFYVAEVVIALEYLHCQGIIYRDLKPENILLHRDGHISLTDFDLSCLTSCRPQVFLPEDADEKKGRKNRSYPIFFAEPMRASNSFVGTEEYIAPEIITGAGHTSAVDWWALGILLYEMLYGYTPFRGKTRQRTFANILHKDIRFPASILVSLAARQLMYRLLHRDPANRLGSYEGANEIKGHPFFRGINWPLIRATAPPKLEIPLFSKDDMEKKGLVTDNRTDIF

SEQ ID NO: 108778 - protein, 178 aa, Oryza sativa
  Clone ID: PAT_MRT4530_129C.1.pep
GESGESFGGEDEATFGFWCYLGIGNTNGPGPKTVLQPNFVIGVPFTVFDFGVREIKAEGVEVLRLSFWITREGYFVDCKGLRGYCGDYGYLIPTRHDGHHRRSTQPAGPPSSPRLDREIPCSGSAAAALPTSKFRRRRVPRLWIRRRRPPYLQASPPLEPAASTSPQLLQPLSSSITM

SEQ ID NO: 108779 - protein, 116 aa, Oryza sativa
  unsure (1)..(116): unsure at all Xaa locations
  Clone ID: PAT_MRT4530_12C.1.pep
YCRPPPPPTIVLRTPLLTFELTSAAPPPSSTDRTPLPPLHRSAAAAPSTASPPPAARLCRRSTTPSPPRRPPHRRXPAPQPPAAASPPAPPXTPPASPLPPAAPQPPRRHLSLSLS

SEQ ID NO: 108780 - protein, 175 aa, Oryza sativa
  Clone ID: PAT_MRT4530_13000C.1.pep
MPTKPIGQIPVPVPMLVGHGHARRVPTGHACHPPPRRRPRAAASPVAAPTAVSPPATRVQPRRRPPPTPPCRGPPPHARVPPTAKLQSPTLVRHQPHASRRRCAQAPPRLHSPATVPPPTASPLASHCPAAYRVPLASHCPAACRVATHQPPSYRQPRRQPPRRPPPPRRQPPRR

SEQ ID NO: 108781 - protein, 415 aa, Oryza sativa
  Clone ID: PAT_MRT4530_13001C.1.pep
MDAVCARLGVTGRCREEGFQNKAVRRGCEALGLRVEAVSRNSSEGHFCGSCNLGCPTGEKRGTDTTWLVDAVGRGAVILTGCKAERFILETNTGGGGGRRKKCVGVVAKCLGKGITKKLRIEAKVSVSACGALMTPPLLRNSGLKNRHIGRNLHPHPHAPRHHRTIIETPALGPGAFAAVVPWESGRDMKERMRRYARTAHAVVLVRDRAAGTVGGEGRVRFTPSRGDAGELRAGLRRALRILVAAGAAEVGTNRSDGLRLRCKGARDEDVEAFLDEVSVEKGPMHPGSDKWALLASAHQMGSCRMGRSAKHGGVDGGGESWEAEGLYVCDGSLLPTAVGVNPMITIESVAYCVAKGIAESLASRAARSVENRDVSTNPPLACESSIEDFDDLRKTVIAWQSALRHTRSVQNVVA

SEQ ID NO: 108782 - protein, 57 aa, Oryza sativa
  Clone ID: PAT_MRT4530_13002C.1.pep
AISSIEIQSSLRHFTYLIYRNREFIKAFHMADYLARLSSLSILRVPAIFTIGLIPYE

SEQ ID NO: 108783 - protein, 74 aa, Oryza sativa
  Clone ID: PAT_MRT4530_13003C.1.pep
GDTYEVSGETCQVSGDSYHVSGDTCEVSSETCQVSGDSYHVSGDTCEVSGETCQVSGDSYHVSGDTCEVSGETC

SEQ ID NO: 108784 - protein, 201 aa, Oryza sativa
  Clone ID: PAT_MRT4530_13004C.1.pep
MSYYVDPHISVPQYPLYPVYGKIADKVGLAGYYVVVPDLFHGQPYTFDQNRTEWLSAHSPVKAAEDAKPIFAALSKEGKSIVGVGGYCWGGKFAVEVAKTNEVEAIVISHPAAVTADDMKEVKWPIEILGAQNDTVTPPRLVYQFVHALRQRTDQIDYFAKVFQGVNHGFACRYNASNPFEVKKAEQALALMLDWFHKHLK

SEQ ID NO: 108785 - protein, 309 aa, Oryza sativa
  unsure (1)..(309): unsure at all Xaa locations
  Clone ID: PAT_MRT4530_13005C.1.pep
MTGGPYPSVRVLLAETNEDTDVVNSTPWSQPKRFIRKPPRFLSPVVVGPSIMPSDVSLSVQLRDFLLTNGGRMDSVKLLEIDSSVAYGYDVLKSFSNGNLTEGLFIDPFSSILFKEDMRNRPDTFGKRIFIPTSVSYLLNNDFIKQNGETHDFSADALAGNLRDYIQNVPXRRLRWRVDIMDSNNYXLIGTLESDHHRALSKRIVKGLSDALQEVAPKSFCRFGDFRRNMMKCPKMQICSNDCAFYIVRFMEAYDGNRESIETLSIPTNSSLVRSSILHQLMFSEYNQAAPLHPDIEMFRRSDVVDPVA

SEQ ID NO: 108786 - protein, 86 aa, Oryza sativa
  Clone ID: PAT_MRT4530_13006C.1.pep
EAYFLYVRICLIVFSKKLTICMFSAHFCIYCLVRQLPVAEQVSIMERLLYFSFCTILFPKYLNCACTICSQASSHFFNLVQILVSI

SEQ ID NO: 108787 - protein, 56 aa, Oryza sativa
  Clone ID: PAT_MRT4530_13007C.1.pep
KRETINSHGGQQIQKLTHTNITRQKIAIHLHPHKQDAKTIDVPLHQNPTQKYENDT

SEQ ID NO: 108788 - protein, 110 aa, Oryza sativa
  Clone ID: PAT_MRT4530_13008C.1.pep
AHRHNTVTKGCSNCDKEKLEQLASQLTLETTSVDPTSCCGNHEICSRQILQDECPGTNKISHDKIAARKAPFKLSWGCNGDNNGQHKHDFVSFEKGDITTAERSNKQVAI

SEQ ID NO: 108789 - protein, 116 aa, Oryza sativa
  Clone ID: PAT_MRT4530_13009C.1.pep
MEDEKKASKFTRTRMDEAKKHAENEGDQTDCITQDYSTPNQDKPAGARRRRWRKQGGVPVGEDEADAEAGEAEEEGPFLGDGATEHQLVPSAEHRCSPPALVEAHLHLISSSSSLA

SEQ ID NO: 108790 - protein, 178 aa, Oryza sativa
  unsure (1)..(178): unsure at all Xaa locations
  Clone ID: PAT_MRT4530_1300C.1.pep
MLYIVGLGLGDERDITVRGLDAIRRCAKVYMEAYTSLLSLGLDPSALSNLEKMYGKEITVADREMVEERADQMLREAXXADVAFLVVGDPFGATTHTDLVVRAKNMGVEVKVIHNASVMNAVGVCGLQLYRYGETISIPFFTETWRPDSFYXKIQNNRRFGLHPLCLLDIXRVKEPTA

SEQ ID NO: 108791 - protein, 129 aa, Oryza sativa
  Clone ID: PAT_MRT4530_13010C.1.pep
MGFYSMLTRNLMSFLSHPLMGLLNSTGLDMNWFETLNRIKNIPVKQTSEDNLETAVTLMKSTYNFYRESPCGTFPSGINLYTVTPSQAPIEGLPPTAAVVETLDLSIPRKLLLWVYTLADWSALKYILP

SEQ ID NO: 108792 - protein, 165 aa, Oryza sativa
  unsure (1)..(165): unsure at all Xaa locations
  Clone ID: PAT_MRT4530_13011C.1.pep
EAWVGLLLISRSEGTELFPTRPPTRPPTRPPTRPLVYIVQGHARVQVVSNLGKTVFNGVLRPGQLLIIPQYYAVLKKAEHXEGCQYISFKTHANSXVSHLAHAGNELNYFRAMPVDVIANAYRISREQARSLKNNRGEELGAFTPRYQQQTYLGFSNESENEASE

SEQ ID NO: 108793 - protein, 433 aa, Oryza sativa
  Clone ID: PAT_MRT4530_13012C.1.pep
MTLMKLVMPTLLLLLLNSSQTNCSQLYDNTTDMLSLLDFKEAVTNDPKGSLSSWNRTTPLCRWKGVKCSPTRPGRVVALDLSGQSLAGVITSSLGNLTFLEKLDLSTNQFSGLLPPLNHLHMLQVLNLSTNSLQDVIPETLVNCSSLRILELSKNFMAGEIPLKLDLLSNLLVLRLSWNNFTGIIPPTLSNITHLERLALASNHFTGTIPDQLGNLSHLSRLLLGGNDLSGEIPHVLFNMSSLKMLALELNKFGTTLPPNIGDALPNLQWLMLNHNMFESYIPASVGNISGLERLDLENNNFNGEIPSSFGKLRNLYHLNLEENQLEASNSHQSWEFFHALTNCSLLQVLSLAANQLQGSIPSSIGNLSTDLQQLYLGGNELSGIVPPSIGRLKGLTTLALDTNSLSGTIEGWVGRLAKLEWLLLEDNSFTTY

SEQ ID NO: 108794 - protein, 421 aa, Oryza sativa
  Clone ID: PAT_MRT4530_13013C.1.pep
MAAHRVGRCMLLQPPRLATCVLFLLLPLLLPCSASSSVITHLPGFHGRLPFHLETGYVGVDEETGTELFYYFVESERSPSTGPVILWLTGGPGCSGFSGVVFEVGPMKYVLEPYNGSLPRLVYNQYSWTQMASILFLDTPVGSGFSYAHDPKGYNVGDISSSLQVVTFLKKLQGYIVGNPITGSKIDDNFKIPYSHGVGIISDQLYEAAVANCNGDYVTTTNELCAKALNAIDNLMSEVDYGNILDDKCVRATPKPINEVSRSRSLQEDYIRLSEPTVRPTINCFSYRYYLSFLWMNNNLTREALKIKKGTVGEWIRCKTGLPYVQDVASSIKYHFDLTTGGYRALVFSGDHDLILPFLSTQAWIRSLNFSIVDEWRAWHVDGQAAGFTILYANNLTFATVKCPALHNSHTGFLKNPKQGL

SEQ ID NO: 108795 - protein, 239 aa, Oryza sativa
  Clone ID: PAT_MRT4530_13014C.1.pep
MAAHRVGRCMLLQPPRLATCVLFLLLPLLLPCSASSSVITHLPGFHGRLPFHLETGYVGVDEETGTELFYYFVESERSPSTGPVILWLTGGPGCSGFSGVVFEVGPMKYVLEPYNGSLPRLVYNQYSWTQMASILFLDTPVGSGFSYAHDPKGYNVGDISSSLQVVTFLKKWFNDHPRYLSNHFYVGGSSYAGKGIPIIMKFISEGIEQRQQPLVNLKLQGYIVGNPITGSKIDDNFKF

SEQ ID NO: 108796 - protein, 75 aa, Oryza sativa
  Clone ID: PAT_MRT4530_13015C.1.pep
MNIELEAVRNTNTIHKVIPYASFWAPPDGIPMFTFTDTGQTIAIKHLIHSAWPDFRQFLMTQGLLGGCGVTGCPI

SEQ ID NO: 108797 - protein, 178 aa, Oryza sativa
  unsure (1)..(178): unsure at all Xaa locations
  Clone ID: PAT_MRT4530_13016C.1.pep
EAVGHRWSGGEQRVERDDNHCGVSEDDDDDDALPRTRVRPILARPPHAAPPXAAAARRPSSLGRRTPPPSLPDTGGSRHGWAALAPRGRRLHPARVRSRRRRALPPSQLRSHPPPPPSPRPRPPSARAPWELPAPRPPRHTWRCGGRPTSAAAAPCPPHSGRRRSSLPPALLRPAAPT

SEQ ID NO: 108798 - protein, 91 aa, Oryza sativa
  Clone ID: PAT_MRT4530_13017C.1.pep
EGHDQKQHRGGLFISWGGLSLKLPHTQYIMGQMHSHHIPGIERNPTTFDAVGLLRMLPSHPGVTAIMRNNQLQVRLLTGNTSSVTVGIHPK

SEQ ID NO: 108799 - protein, 301 aa, Oryza sativa
  Clone ID: PAT_MRT4530_13018C.1.pep
MADHAVVVDDGGSRRMRPASLSSSSDAEDDDAGSKKQFLRAAGRALEAAPPVRRRPGRPSRPVRMFHTMCRSLPVLTPGCGRLQPAGAACRIAAPSRLSPSASLMSKLVASASTGAAGASRRRMTGTLFGYRDARIALSLQDNPRCQPTLVVELALPTHALLRDLGTTAGARIVLESEKRAADGGDGAGAGASSRREREQQDGWVLEESMWTMSCNGKKVGYAVRRDPTDDDIAVLETLWAVSMGGGVLPGISDMDGKDGEMAYMRGSFEHIIGSRNSESLYMISPHGGDCPELAVFFVRL

SEQ ID NO: 108800 - protein, 106 aa, Oryza sativa
  Clone ID: PAT_MRT4530_13019C.1.pep
MADYEVAAHMLGECERRVVEAEICLQAKIDALQMEYDLLAKEVPKKEKEEVRLEKIIVEAGARFKAILVGINMLQRRNEEFLVDSQRYMDEVEPNLKSAITVVEVL

SEQ ID NO: 108801 - protein, 111 aa, Oryza sativa
  Clone ID: PAT_MRT4530_1301C.1.pep
MSVSVVLFSSFPSAPVQVVTISARMFVGVFFDTAVDVHLFSSSWELRRILSRRSSLGSVPMQRFEFELVVLGSEGVEVWWRQGRLCSLRAHVLLSLDLWIRHQVVLVGEAR

SEQ ID NO: 108802 - protein, 100 aa, Oryza sativa
  Clone ID: PAT_MRT4530_13020C.1.pep
MGGTLGCVPMGGAYLSPLRLTEGGRGCAATCSIRLRPALGRASLSARSTATWQPDEGLGATRPTGPRGAAGHPEAAWPPHDRSLSPKGGNRSRGHVEQYE

SEQ ID NO: 108803 - protein, 172 aa, Oryza sativa
  Clone ID: PAT_MRT4530_13021C.1.pep
MGGSIHHAGPLISQWLRSRCLGTESAPWNEAGTTASGDTAGVEAEWHLAANHVCIWRYDGDIMWTQRPWIRHGTAVGVAATDDYGRDGQLRAGGKAAVDPAATLPPRTRRDLRAALPAPRLAEEARDGGGGSSARRGPVEAAPSSGSYPLHRSRGSAALPRADPVAAALPLR

SEQ ID NO: 108804 - protein, 282 aa, Oryza sativa
  unsure (1)..(282): unsure at all Xaa locations
  Clone ID: PAT_MRT4530_13022C.1.pep
TPSGHRLRRRPSCPRSTPHCPPPSPWGXLASPRLPCPGLPPLWPLAPEPATAPXPPSMSVPSPKPPLLVPIKLEPSFSISPIFAPHRHRAIATSASSLPPGAAARQTHSVSLSSVDRTTVVAASSRPCPCRPGAVIMTHAPVRHRLPLTTGSPPPNSWPLVNPRPQLVVTLPEFLAPTLCFPNRAISVLCRPAVATAMTTTPSPSTPFPPPFSSPSRPPPCCCVAASRPSCSRAVPPFPPPREHPRRPLGPVPLRLASQSCNGSSKPDPALSFPSLRSATSP

SEQ ID NO: 108805 - protein, 441 aa, Oryza sativa
  Clone ID: PAT_MRT4530_13023C.1.pep
MVFGDAPAAAERAARRGSKRGGWRPRNSKGEVERGSRKVVVSGFEGRGTNSGDKNRATAGHDDRERRRWGWSCGHGSRDGGAAQHRDGTVGEAESWRKELREGDDELVRERKADDDAWHTQHRGWGRGRGFTNGHEFGGGDPVVSGSRWRTGAWVMITAPGRHGQGRDEAATTVVRSTEDKETECVCRAAAPGGKLDAEVAMARWRWGAKMGEIEKDGSSFIGTRRGGLGEGTDIEGGQGAVAGSGASGQRGGSTMPSMTVQSAGMKRLLRDIESRRTPPDHLAPITGRVAKKFSRPSSPFLAGAAGVDEPIIKKGTPVSVRTRVGKIGAGLNRHLVLRLGAVVVSDADEDDGFLDVVYNVGFPPHDPFRPVRVSRDQVKVITPTAAVTNAAAPPPPPHPTKSKSNDGGPRPTVAGKSLRLLTKLERERAGAIYYSLVLRP

SEQ ID NO: 108806 - protein, 732 aa, Oryza sativa
  unsure (1)..(732): unsure at all Xaa locations
  Clone ID: PAT_MRT4530_13024C.1.pep
MGEVLMSQTCVLKVNIXHCDGCQKGKVKKILQKIEGVYQTSIDAEQGKVTVSGLVDPATIIKKLNKAGKPAELWGSKVGVAAVNNQFQKLHLDGGGGGKGQPKDGGGKGHPKDAGGKGQKGGGGGGGNGGGGSKDVKMMMPPQMPQPTPQQLQQLQQQLQMKGLKLPQFMDAAKMAPFAAAAPIKDPKSVKFNLPPEDDFGDDGSEFDDEFDEFDDEDDFDDDGLDEDYFDDPKMMKQMAMPPPNAGGGGDKKGGGKKGGGGNEIPVQIKGNANNAAGGGGKKDAGGKQNQGGGGGNGKNGGGGGQPNNAKGGGAPNGGGNHPAQGKKGGGGGGGGQGGGVGGPMGGMPAQQQAMMMRPNMMGGGAGFPGMGQMGGGPMTMPMAHHPHMGSAQGGGAGAVQGMPTAAFYQGGGGGGGGGMPSGPEMLQAAAAAGNPMAQQQYMAMMQQQQQQMMMNGHGHHGHGHHHGHHGHGGGAAPAGYPAMGYGYGRPPMPYPMHYPMQPHPHADPYNYFSDENPNSCSENSTSLKAKKKDYNTPSQGEEGDNNDNCGSNAMEERGWMIMMMAVVVVVVHVLCEEEEGSHRGEELLQFWPWLQPFPAPCTYIIDGGGKFFRQLMTTGPYTRIAHFNPMTTVSTTASACPDHRTAWSLSLTTIDSTPNYRGKSCVVFVQVGKSSFLQSDPWSRRKDLIVGQAMEPDGRECYSLSMHVGQAGRSGGLSSRNPYEDAQAVMP

SEQ ID NO: 108807 - protein, 78 aa, Oryza sativa
  unsure (1)..(78): unsure at all Xaa locations
  Clone ID: PAT_MRT4530_13025C.1.pep
VEQHSFAFHREKDLSFHWETSTPTGLRFAGPPPPKGTWKGGVKTAECPKILGRXMGPRAPVLGRPFGTAGFVWAPLRT

SEQ ID NO: 108808 - protein, 419 aa, Oryza sativa
  Clone ID: PAT_MRT4530_13026C.1.pep
MPRGTTQANFGRQGRRPGAPTRICIRANGGGGGGGDAVLVSRCNHQGLDRPGRSTLVKSVLTSQQVFLLTGLKTSKEPLEALGPRRRRLARAGGGLGILNLEKFARALRLRWLWHEWRSPVKAWVGSGTPCDDIDKLLFAAATSITVGDGTKVSFWDSGWLQGRRLKDVAPLVYAASKKKTSTLQQASLSDQWMQDLDLPENTGWSIELIDQLIEVWSVVQNLHLIEHEEDKITWKLTSHGEYTTTSAYKAQLLGTTATNFNNLIWKPWAPHKCKTFAWLIIQNRVWTSNRLATRGWPNGSICPLCRHRQETAIHLLAECRYTRRIWGAIAEWTACEQLNPSLWHQASTVSEWWEATANTKDAPKKALRTLTLLVAWEIWNERNRRTFQQKELSMGSLLAKIKEEAKSWSLAGVRDLST

SEQ ID NO: 108809 - protein, 515 aa, Oryza sativa
  Clone ID: PAT_MRT4530_13027C.1.pep
MSKEEVLKIQTCVLKVNIHCDGCQKKVKKILHKIEGVYQTSIDAEQGKVTVSGLVDPATIIKKLNKAGKPAELWGSKVGVAAVNNQFQKLHLDGGGGKGQPKDGGGKGQPKDAGGKGQKGGGGGGGGGNGGGGSKDVKMMMPPQMPQPTPQQIQQLQQQLQMKGLKLPQFMDAAKMAPFAAAAPIKDPKSVKFNLPPPEDDFGDDGSEFDDEFDEFDDEDDFDDDGLDDDYFDDPKMMKQMAMPPPNAGGGGDKKGGNNGGGAGNGGKKGGGGNEIPVQIKGNANNAAGGGKKDSGAKQNQGGGGKNGGGQPNNAKGGGGAPNGGGNHPAQGKKGGGGQGGGVGGPMGGMPAQQQAMMMRPNMMGGSAGFPGMGQMGGGPMTMPMGHHPHMGAGAVQGMPPAAFYQGGGGMPSGPEMLQAAAAAGNPMAQQQYMAMMQQQQQQQQQMMMNGHGHHGHHGHHGHGGGAAPAGYPAMGYGYGRPPMPYPMHYPMQPHPHADPYNYFSDENPNSCSVM

SEQ ID NO: 108810 - protein, 87 aa, Oryza sativa
  Clone ID: PAT_MRT4530_13028C.1.pep
GPKMGPYKKKIISTGGFDFKIAFLSHTSRLKKKKIFEKKKWATIMGKKKNYPLPFKKKKNIKPSFSLGLNSNLKGLQKSNLKTLTLV

SEQ ID NO: 108811 - protein, 380 aa, Oryza sativa
  unsure (1)..(380): unsure at all Xaa locations
  Clone ID: PAT_MRT4530_13029C.1.pep
GRVGLEREQRADFMKLGSHVHVDVHAVVLDLPAKVCISRSVSRTGHEGNLQGGRAAMVVNRMLKNKETPLLTEGFSRIMFCKDNNEIKKAVDMYSALGPSDSLDSGVFGQNSKGPVQVGIMKFLKKPGSSAEKSGGHKVTPNESIPQMQNHISEQQNLEVGGTCTVESVKELSNGKKIEDQSRESVLSDISSRTLAFPSISTADFQFDLDRASDIIVDAVADILQKYDNIRLVLVDLSHKSRILSLVKEKAAKKNINSSRFFTFVGDITQLQSKGGLRCNVIANAANWRLKPGGGGVNAAIYNAAGEDLQRATKECADTLRPGSSVAVPLPSTSPLHXGKGXTHIIHVLGPNMNPMRPDCLKNDYTKGSKILHEAYTSLF

SEQ ID NO: 108812 - protein, 259 aa, Oryza sativa
  Clone ID: PAT_MRT4530_1302C.1.pep
PHHGYFSRAAPRRLFRSVRRRAAMSTCSTATGAARDGRRRHGSCEDAFRGGGGGLEMRWRELEREWDAYKTSRCSGASRRRHHRRSRSGSGTGTPSSAVIVAAEPADAPGSHLLLGVRLGGSPRRLVSSLQRDGSSSSTASAGVTPERGRYDGDDHHDAASSVSSVDAGAMAAMAAAASSNSSCSSAATSLFSLRDDELAVVGEAAKTGGTATPATGSIGRFVAAIAAAGVVLLVAAIMAAAVLEFAMDDGQAEFLVPT

SEQ ID NO: 108813 - protein, 225 aa, Oryza sativa
  unsure (1)..(225): unsure at all Xaa locations
  Clone ID: PAT_MRT4530_13030C.1.pep
MATTSDILECDYWRVSPSATWAVHGGLYNSGLSSTPSKSLECTSLNQDFWLISQKGCTRNWFPYEEFEGYELPSDFNLNNINSDEASREIFITAITPCILQTGISMGHHSHISYEFYHPLVVAHQLGFGQVPIKVYFIKKIQTRGTITSALKCDCLPNLNGPNLGPFIDWDSRTIGSRPWIKWWGEWKRHLFNLQSTXFLALLDPKFVPDDAEVPLPHLAYFKRL

SEQ ID NO: 108814 - protein, 90 aa, Oryza sativa
  Clone ID: PAT_MRT4530_13031C.1.pep
GGIGGRFSGGFMSRLGGIRSCLAAVDAVLGLWFVQRLPTAKYQRSRTTDKETPPMAADARWRTAAEGQGLRRRRGIARHQKDLRFPLNRI

SEQ ID NO: 108815 - protein, 213 aa, Oryza sativa
  unsure (1)..(213): unsure at all Xaa locations
  Clone ID: PAT_MRT4530_13032C.1.pep
EIILVHKFIRDQXSVRFPELETLIQNPLDYAKAVAIIGNGPMENIREISESKDNMLGQTLRGVLDGPSVMVVTVEATNTRGEPLSENELATVKRACEMVLKLDKAKKLLTDYVRSRMNLFAPNLTTLIGSLTAAQLLNYAGGVTGLAKTPACNLAPLGSKKNTTAIGLASNTGVRHQGFLYSNEIIRAVPSDLKKQAMRILSAKVVLAARIDQ

SEQ ID NO: 108816 - protein, 275 aa, Oryza sativa
  Clone ID: PAT_MRT4530_13033C.1.pep
MPTGMPSLLRNIMQSLVSIDFHGSHTRDRFCTICLRAFSSERCLDHSMHHPVAEQPNVYVLHVIRRDGWLLIPYQQLPSDMIIGIRKIQCNLRPTLVRETHKDINIEVSVQMRKTEKSETRLFPYNAEGISGHESLCWNWMPASGKSGDDTIFLIDDNLEHAKNLKYILCLFEQLAGLKINNIFTCNVVDLPLKYLDIPIDQKRILNKDWKVAENKMEHKLGCWPGVKDRMDYFRKRFLWQEDQEAGSNKEAGGASRRRSVACGGGSADDHGSVA

SEQ ID NO: 108817 - protein, 51 aa, Oryza sativa
  Clone ID: PAT_MRT4530_13034C.1.pep
KYGKIPMIYYIVGERHFNQHLYKSIPASFFRAWDRLCHSDKPKPRAEFLQP

SEQ ID NO: 108818 - protein, 85 aa, Oryza sativa
  unsure (1)..(85): unsure at all Xaa locations
  Clone ID: PAT_MRT4530_13035C.1.pep
MRPLGHRDGGGGGAPLPLPPLSGRGRLPPPLPPDLAEGRVRQPPPPPXAAGLGSTPPPPDSCGRPPPPLPLDRAEGRARQPLLPP

SEQ ID NO: 108819 - protein, 85 aa, Oryza sativa
  unsure (1)..(85): unsure at all Xaa locations
  Clone ID: PAT_MRT4530_13036C.1.pep
MSFVISFTPLTIINDAVIGNNLCSSWFGMLHSWFGDRTVQSGXWLFRMVGPMQXGMLYSVGLILFNXYLTVLLNSEIFIKCRLCK

SEQ ID NO: 108820 - protein, 43 aa, Oryza sativa
  Clone ID: PAT_MRT4530_13037C.1.pep
MARRIDWWKLTLPRVEIWLGTESIGDKDGIEAESKMRIVAETE

SEQ ID NO: 108821 - protein, 74 aa, Oryza sativa
  Clone ID: PAT_MRT4530_13038C.1.pep
MAAVRHASRGKFCQFQKVERWLSSLHGGEMESQKPLENHLCHLMPGRSSSYYRRSEAVAINARITNIGGRHTPS

SEQ ID NO: 108822 - protein, 82 aa, Oryza sativa
  Clone ID: PAT_MRT4530_13039C.1.pep
VDRPNLRPGAAPPGDRRRRRPPEPTTTCRACRPRAVRRGRTRERAGPIGGEEEARRPNAGARCPGRTAAATAPAKRGGGGSV

SEQ ID NO: 108823 - protein, 161 aa, Oryza sativa
  Clone ID: PAT_MRT4530_1303C.1.pep
MEERFLAEPLKATTVTCIPRLRGGGGGGARRHRRAASSGGGAAPPVSSSVLDRVRDVVLRLAMLSAASTTTKQGALPPQQQTATPIRTSPGRSAAATSRRSAAVRMSPAAPAYADSYRSEAVDECIEFLKRSAAGVGVGGAPASPAVGVMNSPSPLHACAM

SEQ ID NO: 108824 - protein, 34 aa, Oryza sativa
  Clone ID: PAT_MRT4530_13040C.1.pep
TRKRSTAIRARPPWRISMRSLSRSVRAILYNLPF

SEQ ID NO: 108825 - protein, 445 aa, Oryza sativa
  unsure (1)..(445): unsure at all Xaa locations
  Clone ID: PAT_MRT4530_13041C.1.pep
MEANHASRGRRTLEEIRQKRAAERMQQQHNPAAAASLVDPYGNPGAGAELLGRVRELENGNIALERENQMLLSKIAEKEVEKDSLVNRLNDLERNIVPSLKKAVNDISLEKDAAAVAKEDALAQLRSMKKRLKEAEEEQYRAEEDSASLRAQLNTLQQQVMSNSYTGFPVGVSNEHILAMEKEVENLQAQLKQESLLRQQEQQKLSEESLLRQQEQQKLTGEQSRAASLVAEKKELEEKIAALTKKASDEASEFAARKAFSMEDREKLESQLHDMALMVERLEGSRQKLLMEIDSQSSEIEKLFEENSALSTSYQEAVAVTMQWENQVKDCLKQNEELGSHLEKLRLEQATXLKTSNTTIPQMARTRPAFHSRQSLXTENLSLKDQLIKEQSRSEGLSAEIMKLSAELRKAVQAQNNLARLYRPVLRGIESNLMKMKQETYATIQ

SEQ ID NO: 108826 - protein, 433 aa, Oryza sativa
  Clone ID: PAT_MRT4530_13042C.1.pep
MDKAAVVPLPITGGVNDDRTAALQQWASTVGFGGEVGRLVEAHRRLDSVLAETQGKEIRNKELQRRLREASHDAARARDLLGELEYYRIREEVERDDHDKLLHDNANGNLLLSMPQRDVEFFNNDAAKDDKDTTESSLSNTDSSASALQVTTYIASSSSPVPYLETLNKCISNEISKYTEKCYRIAKQVSEALELESLDYLYAHKYQRTRTDHRETSPCQSEPKVHGRDQQRDLIISKLTSEECARKKLSILAIIGDGGIGKTTLAKLVFNNSTVSKHFDVLLWVYVSVHFDQNKIMQEMLDSFCGDEHDEIKKSKELQLQDKLDYLLKSKRVLLVMDDMWEDSTKEKWDELLNPLLKNDVMGNSVLVTTRKPSVATMIEAADHINLDGLKKDDFWCLFKECVFGHENYKGEPRLEKIGQQIVDKLKGNPLAA

SEQ ID NO: 108827 - protein, 1564 aa, Oryza sativa
  Clone ID: PAT_MRT4530_13043C.1.pep
MDKAAVVPLPITGGVNDDRTAALQQWASTVGFGGEVGRLVEAHRRLDSVLAETQGKEIRNKELQRRLREASHDAARARDLLGELEYYRIREEVERDDHDKNDLHFETEEVLVSPQALALNRKPPAILEAQFTQLLHDNANGNLLLSMPQRDVEFFNNDAAKDDKDTTESSLSNTDSSASALQVTTYIASSSSPVPYLETLNKCISNEISKYTEKCYRIAKQVSEALELESLDYLYAHKYQRTRTDHRETSPCQSEPKVHGRDQQRDLIISKLTSEECARKKLSILAIIGDGGIGKTTLAKLVFNNSTVSKHFDVLLWVYVSVHFDQNKIMQEMLDSFCGDEHDEIKKSKELQLQDKLDYLLKSKRVLLVMDDMWEDSTKEKWDELLNPLLKNDVMGNSVLVTTRKPSVATMIEAADHINLDGLKKDDFWCLFKECVFGHENYKGEPRLEKIGQQIVDKLKGNPLASKDSHLQSCFSYCAVFPKYHRYEKERLIDMWIAQDLLCSADIHTRPEDIGNEYFDDLLDWGFFEKQFEHSTLLIMHDLIHDLAQKVSSDESFTIEGNEPRNAPPCVRHVSVITEWEYKTKLNGTVYPNDSFLQEFSNSFRELQQRSLSTLMLFGPHDLDFADTFRQELNEVRSIRVLKLEMVFFDLDSLIGNISAFVNLRYLELGCFYKGPRLELPEAICRLYHLKVLDIKKNWGPSTSLPREMSKLVNLRHFIAEKELHAKIAGIGKMVSLQELKAFDVKKDHEFSISQLRGLNQLRGSISISSLYNAGHEEASQARLCDKDNLTCLHLSWLTLSRNRVARRTLPILEDLKPHSGLKNLQVVGYRHSLPSWLCSTVHLTSLRSLHLDRCIRWQTIPHPQQLPLLQELHLIQLPRVYKIEIGPLKVLEIRWLQNLRQCILLDKEQSYATLQILEVEGCPKLDEFLLQIFMSSGVQSTYQFLGIHRLKIHNDFLRASIPLLLLNSLSDIDLCGEHSKFTRFRLKPFGTSDGLSLQIKGDRYIQKIEERLFTLEKLKDLRELEIRDYQSVIFQRQFWEGFEQLTSLKKFRVIKCPEIFSTNFELFLPPSVEELELSGCNITLIQLSQLLVNLHLLKSFKLTNCQGVTSLPVGLFTDEQNTMSEGSWHIPPRCFTSLESLQISFTTAPSDANSIMHFTSKKGLGRFVSLKKIVIENCPTLLSRALSGGASHISPSSLDKLCMTGIQDSTLQFSDVSSIADLDVSGCPKLACLDLSSCTALEKLCVIDCRLLQSIEGLPSCSALRDLKIRNCALLPSLSASLHTLKTLSIENNTNLASLELKSCTSLQKLCIKDCPALTSWEGLKSLVSLEILKVEASPGFITRWISAAAEVNIEEKNFSLPLEKLNVDNIDVLCVPICSQLTSLKILSIEEDRHDPDGHVEFLTDNHVKGLSFLTCLRFLDLENLEQLRSLPAELGSLASLQRLHVGNCGHITSLPVGGLPASLKDMELYNCSKELNVLCRDMLRLRRNLHLWVDGDEEDFFSQNCSDEEISELMFAYRIAFTPGSFLEEQNNTRTPSIFDEGSKRNKISKYKRRKKATAYR

SEQ ID NO: 108828 - protein, 218 aa, Oryza sativa
  Clone ID: PAT_MRT4530_13044C.1.pep
MRLNHKYFSNLNNIANSSPQGIMKIYLSRFININMNVKNARMTYIVKRREYINTTREYAYTMRLAMAASIYSFGDNLLELLTGKPSVSILESITNGFHLCCRSFEPVASSDVHPRRRIQLPWHPGKILRLCHLIKGADHLAINSINQLMSSNQRSIDPQNQPNKQTISTCDSSAMSVRGPDGGWEWTARRAAAAIILVPANDIDLDMDMDMDGFRIFS

SEQ ID NO: 108829 - protein, 70 aa, Oryza sativa
  Clone ID: PAT_MRT4530_13045C.1.pep
KSVGVIINIPRILYQSQLGVMISMVKRPIFSCFMHLDVNIIIFKEGSMGLTFPWLPSDLPATIPTKKKKK

SEQ ID NO: 108830 - protein, 128 aa, Oryza sativa
  Clone ID: PAT_MRT4530_13046C.1.pep
ALALFISLAVVVVQTSLIVVEQKAKKKMVFVMNKLMWMACLCISAAFIALTYVVVGRDDRWLAWCTMAIGTAIMLATLGSMCYCIIAHRMEEKNMKKIRRSSTSQSWSISVDSDTELLNNEYKKIYAL

SEQ ID NO: 108831 - protein, 69 aa, Oryza sativa
  Clone ID: PAT_MRT4530_13047C.1.pep
MAGAQQRRDWCASPSSAPSPCVSAIRRRLKHSSGDENRSHGEAEVEEDATLSSKNEEQEQSRLKRYPKT

SEQ ID NO: 108832 - protein, 54 aa, Oryza sativa
  Clone ID: PAT_MRT4530_13048C.1.pep
MSSSTFSGDETAPFFGFLGAGFGLVFYCMGAGYGTPQSRVGVASMGVMRPELVM

SEQ ID NO: 108833 - protein, 1394 aa, Oryza sativa
  Clone ID: PAT_MRT4530_13049C.1.pep
MAAAPSASGRRSMSWGSSISQSFRQAEADDPFGRAASQQGHDDDEENLRWAALEKLPTYDRMRRGVIRTALLHHDGGGDGGGAAAAAKDGRMELVDIQKLAAGNLGRALLDRVFQDDSERFLRRLRDRIDMVGIELPTIEVRYEQLSIQAEVFVGSRALPTLTNAATNVLQGLIGRFGSSNKRTINILQDVSGIIKPSRMTLLLGPPSSGKSTLMRALTGKLDKNLKVSGDITYCGHTFSEFYPERTSAYVSQYDLHNAEMTVRETLDFSGRCLGIGARYDMLAELARRERNAGIKPDPEIDAFMKATAVQGHKTNITTDVTLKALGLDICADIIIGDEMIRGISGGQKKRVTTGEMLTGPARALFMDEISTGLDSSSTFEIVKYIGHLVHVMNETVMISLLQPPPETYNLFDDIILLSEGYIVYHGPRENILEFFENAGFRCPERKGIADFLQEVTSKKDQQQYWYHDQERYRYVSVPEFAQRFKSFHVGQKMQKEMQIPYDKSSTHPAALTTTKYGLSSWESLRAVMSREWLLMKRNSFIYIFKVTQLIILAFMSMTVFLRTKMPSGTISDGTKFLGALTFSLITILFNGFAELQLTIKKLPVFYKHRDFLFFPAWTFGVANILLKVPVSLVEAAVWVVLTYYVMGFAPSAGRFFRQFIAFFVTHQMAMAMFRFLGAILKTMVVANTFGMFVLLIVFIFGGFLISRNDIKPWWIWGYWASPMMYSQQAISINEFLASRWAIPNTDATIDEPTVGKAILKSKGLITSDGGFWISIGALIGFLVVFNILYILALTYLSRGSRSTNQQSRSQIVLPFQPLSLCFNHVNYYVDMPTEMKEQGFTESRLQLLSDISGVFRPGVLTALVGVSGAGKTTLMDVLAGRKTSGVIEGDITLSGYPKKQETFARISGYCEQTDIHSPNVTVYESILYSAWLRLSSDVDTNTRKMFVDEVMSLVELDVLRNALVGLPGVSGLSTEQRKRLTIAVELVANPSVIFMDEPTSGLDARAAAIVMRTLLLLKRGGQVIYAGELGRHSHKLVEYFEAVPGVPKITEGYNPATWMLEVTSPIAEARLNVNFAEIYANSELYRKNQELIKELSTPPPGYQDLSFPTKYSQNFYSQCIANFWKQYRSYWKNPPYNAMRYLMTLLNGLVFGTVFWQKGTKISSQQDLFNLLGATYAATFFLGAANCITVQPVVSIERTVFYRERAAGMYSSLSYAFAQACVEVIYNILQGILYTIIIYAMIGYDWKADKFFYFMFFIVASFNYFTLFGMMLVACTPSAMLANILISFVLPLWNLFAGFLVVRPLIPIWWRWYYWANPVSWTIYGVVASQFGKNGDVLSVPGGSPTVVKQFLEDNLGMRHSFLGYVVLTHFGYIIVFFFIFGYAIKYFNFQKR

SEQ ID NO: 108834 - protein, 164 aa, Oryza sativa
  Clone ID: PAT_MRT4530_1304C.1.pep
MACEVADKGGKQRSGAAAGASGSIASGGKAPTSMSDDGDWSGLPSSTTKVEADENVLRYYCCIKALPAAPLPLPNPRPWTSLACLDPHVGTWTTSVLHISAADDLASLRLDLPVAVVVVERLVTNLVHNLQQPDPVLPSRESSRFGAPARPDHRHRATALGREG

SEQ ID NO: 108835 - protein, 541 aa, Oryza sativa
  Clone ID: PAT_MRT4530_13050C.1.pep
MASPPTASASASEAAESGRRSAPGPIDVPSPRDHLHHLLDRRDTPRVVHVEGTTMQRQRGEAAGDAGAAAAAKPEVKLVTGDGGYVLEDVPHVCDYLPDLPTYSNPLQDNPAYSVVKQYFVNPDDTVCQKAIVHKDGPRGNHFRRAGPRQRVFFESDEVHACIVTCGGLCPGLNTVIREIGGYRGFYACNTIDLSPKSVNDIHKRGGTVLGTSRGGHDTMKIVDSIQDRGINQVYVIGGDGTQRGAGVIFEEIRRRGLKVAVAGIPKTIDNDIPVIDRSFGFDTAVEEAQRAINAAHVEAGSAENGIGLVKLMGRHSGFIAHYATLASRDVDCCLIPESPFYLEGEGGLFRYLEKRLKENGHMVIVVAEGAGQKLINETKESMGKDASGNSILLDVGLWLSQKIKEHFKKIKTTINLKYIDPTYMIRAIPSNASDNVYCTLLAHSVVHGAMAGYTGFTVGQVNGRHCYIPFYRITEKQNKVSITDRMWARLLSSTNQPSFLSKKDVEDAKMEEERASKFFDGPPPNPKVEDKVASNGKAVK

SEQ ID NO: 108836 - protein, 1056 aa, Oryza sativa
  Clone ID: PAT_MRT4530_13051C.1.pep
MVTGGAVPAAAPVWKGKVKSVPSGDTVVIMDTSKAEEVIPPPEMSVTLSCIIAPNLARRGGMDEPFAWESREYLRRLLIGQDVRFRVEYTASPSGRKFGMVFFAEKNVACMVVAAGLAKVKEQGQKGEISPYVAELLRLETIARDQGLGRWSKLPGALESSIRDLPPSTIGDGRSFDAKGFVAENKGKSLEAIVEHVRDGSTIRVHLIPSFLYVQVYVAGVQAPSMGRRATPPPNAQAGVGNGAANGEASTTPAPMAAAQKLLASADIYSEVPPDRFGQEAKHFTETRVLNREVRIVMEGTDNFNNIFGSVYYSDGDVVKDLALDLVQNGLAKYVEWSANVLDPQLKTKLRNADLQVKKEQLRIWTGFKPPVTNTKPIHNQKFTGKVIEVVNGYCLVIADDAEPYGSPSAERRVNLSSIRPPKFEKPSEENKSSEQFARTAKEFLRTRLIGKQVNVSMEYSRRINIADGQIAGPRTNSTETRVLEYGSVFLPSSSHADGETATSSSDSSNNQLGINVAALLVSRGLADITRHRDYEDRSHHYDALIAAHARAEKTKKGYHSKKECPPIHMTDLTRVPKKAKEFLHLLQRSRRHSAIVEYVFSGHRFKVTIPKETCTIAFALSGVRCPGRDEPYSDEAITMMRRRILQRNVEIEINTVDRTGTFLGSLWESNINVASVLLEAGLAKISSFAVDKMPDAQVLLKTEKIAKQKKLKVWENYEEVEVSNVSLYDNKETLKVIVTEVLGAGMFYVQALADEHVEFVRHQLASLDIKDDPAEALEVKELETSKEVATLTKDLPETLDAEDPSSDVAKDESVTSKDIDPLPDDSNTAPFTPMKGEMVLALFRCDNSWNRAMIIGECQGVEGPEFEVFYIDYGNQELVPHSCLRPINLSISSIPPLAKLCSLAFVKVPSLNDYLGQEAAMYLNSILLDNGREFEAIVEERDAASGGKLQGQGTGEILGVTLLDSETDNSINAEMLERGYGQLERRRWDSRERRAAIKKLEEFQEVARKEQLGVWCPKNARKQGMDENEYPVLARAPPPPKKGYDLIKFIASRSD

SEQ ID NO: 108837 - protein, 142 aa, Oryza sativa
  Clone ID: PAT_MRT4530_13052C.1.pep
QWAFLIWLLSYHRLLCHWVAGPGTNCLVVAMHQPLQWLLLHLLSVGWWLFWAFHEPALHQGGEVTDKNIATYKLSAILCNSTHKRHSERYAVHGGIVYYLRIKKGIMLAFSMSYFCLFHAGSSYAVVHWMILCCCTLDVGHL

SEQ ID NO: 108838 - protein, 67 aa, Oryza sativa
  Clone ID: PAT_MRT4530_13053C.1.pep
NKAPLPSGLRGLPGLLTCRLLFIASVHYNAVNRLPLGRVLSSWAVTYPRFAICISYNIRPLGLWLSD

SEQ ID NO: 108839 - protein, 56 aa, Oryza sativa
  Clone ID: PAT_MRT4530_13054C.1.pep
STRPRTRARTCESESHRIKGPCARKANCYSVCITEGFMDSYCYGVRRRYMCTKPCP

SEQ ID NO: 108840 - protein, 133 aa, Oryza sativa
  Clone ID: PAT_MRT4530_13055C.1.pep
YAYQSEYQMMMMLLFDWIDSVVAGFSPEAAAIRCLLLGVCSSSSVAAAPRRRRHEVAERPHNLPLQLPPLQRRPLLLATDETAAALVLLVVAVAAVPLLHGFSLSIFFSSCSVAPFSLLKLKLFFLSRCSSSS

SEQ ID NO: 108841 - protein, 434 aa, Oryza sativa
  Clone ID: PAT_MRT4530_13056C.1.pep
MGKLNPYEMKCKFNLQLISTSPELCCCAALSDSSQIPNPPTLSGHRGWSRAAAEGWGGARVPGIRAICRWAAAAAAELGFVVLVLGLLRPSLRYVCLCCAASRTNVHRVPGGGTQPEHAAAVWIALAFRGQSPDRGSDASGPKQSSVSSHEDWFSGHSEDCGFKKPAFDVPFDLSELQNFDYAIEDCVYVLLVDSQFGGVVNVQGDLNKLDFDLNNVYDSAAEWIKKHAQITVSSIDRVWNKLGNANWGDIGTLQQQSHSPEIVEVQEEGAVNVKPKEILKLEVPFIRRLAGLPPGRLELRRRLGSVATRHPPPRRPVPARCRLGLRCPPGKRRRHAGPAGLVGRLLGRPPPASQAACPAARLAGLAGRPPPASQAACPAARHFAALPAAARRPASRGRRRRRKRREEKGEEWERRRDGGLGEAEDGEGIREAV

SEQ ID NO: 108842 - protein, 43 aa, Oryza sativa
  Clone ID: PAT_MRT4530_13057C.1.pep
GFVMLPSLVHSLCFFCSWNILANFGGYDPLVFIGTVRSCGLSI

SEQ ID NO: 108843 - protein, 189 aa, Oryza sativa
  Clone ID: PAT_MRT4530_13058C.1.pep
HSEDCGFKKPAFDVPFDLSELQNFDYAIEGVTFQQLVRMPNALHASTSDIFEATAHLALEDFLHASIKGLWETFWGPDESMPFSVACIHSTSSKFYPAEKAISSGRLDGVCATAVLLKSLKHSQGRWDHIVVLALLRPDIGMFSGQNDQQPSPAVLGEALFFALRVLLSRSLSRSSTVLQNSDCLRPSC

SEQ ID NO: 108844 - protein, 121 aa, Oryza sativa
  Clone ID: PAT_MRT4530_13059C.1.pep
MIWAHNLVSHAPSGRELEVDPSLLRSALLGPCAAAPLVAIAWTKLLPLTTMTSTVSFGTTWAAPLVTTTSITLLDVAWVAPLDAVVALLDRRGICISDARRWHVDVKDGQIRAQHLPILLF

SEQ ID NO: 108845 - protein, 115 aa, Oryza sativa
  Clone ID: PAT_MRT4530_1305C.1.pep
MSRVGECGGGGGCGARRGKAAHAGAGAVAGFLGCLLLVWAMGGCGRGCGGGGGEGVRDRVEEVAAQFNLSMSKLQALASLLSSPEIIYFIHYALGSYHHAFLTDDLNYDVAGMHM

SEQ ID NO: 108846 - protein, 66 aa, Oryza sativa
  Clone ID: PAT_MRT4530_13060C.1.pep
GGVSLLLAEKCYVPCSSYRHRTLEPTSKYRDCCNLKRVRTRVFLTHEDQQNCLMLLRLCRLLLFIV

SEQ ID NO: 108847 - protein, 64 aa, Oryza sativa
  Clone ID: PAT_MRT4530_13061C.1.pep
MAVWEASTKPLAANNGDDRVHQRLETGGTVVNLGVWLITLQAIGMPHVIPGLMKAVGIVYSEGD

SEQ ID NO: 108848 - protein, 699 aa, Oryza sativa
  Clone ID: PAT_MRT4530_13062C.1.pep
MSSSTLVLLQLLYLISLILPAFSANDDNQFAYSGFSGANLTMDGATITSGGLLELTNGTVQQKGHAFYPVPLRFVRSPNGSVLSFSASFVFAILSVYTDLSAHGMAFVIVPSMNFSAALPGQFLGLANIQSNGNSSNHFFAVELDTIQNKEFGDINANHAGVNMNGLRSEQSYYAGYYDDKDGNFHNLSLISREAMQVWVDYDSNNTQITVAMAPIKVARPMKPLFTASYNLTSVITDVAYVGFSSATGTINVRHCVLGWSFAINSPASAINLGKLPKLPRMGPKPRSKVLEIVLPVATASFVLTVGIIGLVLIRRHMRYTELREDWEVEFGPHRFSYKDLYHATEGFKNENLLGVGGFGRVYKGTLPVSKLEIAVKRVCHESRQGMKEFVAEIVSIGRLQHHNLVQLLGYCRRRGELFLVYDYMPNGSVDKYIHSIEGKTILTWAQRWHIIKGIASCLVYLHEEWEKAVIHRDIKASNVLLDGDMNGRLGDFGLARLYDHDDDPQTTHVVGTIGYLAPELGHTSKATPLTDVFAFGMFVLEVACGQRPINQSSLDSQTMLVDWVLEQWNKGSLVSTVDSRLEGNYNVREAVLAINLGLLCSHPFANARPSMRQVIHYLDGSIPLPEMSPTDLSYHMMTIMQNEGFDEYIMTSSSMSEMLRHSSSTSAGLRRKWLKRSGRNGNGATGLGGYCSRAPFFV

SEQ ID NO: 108849 - protein, 88 aa, Oryza sativa
  unsure (1)..(88): unsure at all Xaa locations
  Clone ID: PAT_MRT4530_13063C.1.pep
ANLAALFVVLRRVKQLTPMSPAKERRRLLRQAWELLTALSYAFAYRVEQTMAAXMAVFVWAMTASVVVGGVYFLVLKDGRGSGDCDRE

SEQ ID NO: 108850 - protein, 56 aa, Oryza sativa
  unsure (1)..(56): unsure at all Xaa locations
  Clone ID: PAT_MRT4530_13064C.1.pep
HLRVFLRDWSIDQTSRNYKKRVVYLNMRKFIRCKVRXLAMNKKLLLVFCCASKKKK

SEQ ID NO: 108851 - protein, 49 aa, Oryza sativa
  Clone ID: PAT_MRT4530_13065C.1.pep
EKKNKNNSEKNNGKQSTINKKPHNLGTTTMGRHSRTTLLLHTCEGVIFS

SEQ ID NO: 108852 - protein, 320 aa, Oryza sativa
  Clone ID: PAT_MRT4530_13066C.1.pep
MKFGKDFRSHLEETLPAWRDKYLAYKSLKKLIKNLPPDGDPPPVAAAAEVPAGDGDGDGGIALGNWFARVLDMELQKLNDFYIEREEWYVIRLQVLKERIERVKAKKNGAFTSKSEFTEEMLEIRKAFVIIHGEMILLQTYSSLNFAGLVKILKKYDKRTGGLLSLPFTQRARHQPFFTTEPLTRLVRECEANLELLFPIEAEVLESASSSAKLQPQNDDAASHDPASSVDVETSDVYRSTLAAMKAIQGLRKASSTYNPLSLARFFHGEDGEACSGAITSESDSYSDSQIEDAEDDDKEVQSREQNTAQNAAEGQPRDE

SEQ ID NO: 108853 - protein, 71 aa, Oryza sativa
  Clone ID: PAT_MRT4530_13067C.1.pep
LMLMFMFDLLRSMENVVAGSTRCDVKREVWTISQIAGVLGAAQDPVSLNSRPWDLCKVHVVIVCSLSASTF

SEQ ID NO: 108854 - protein, 87 aa, Oryza sativa
  Clone ID: PAT_MRT4530_13068C.1.pep
MVHNGGTRESSDHVALLMPSKCPTAKTDQYPTRAVTSSKWDLRTALVSSALQTIDIVWVKLDSLCREEPYYEEVPEGSEAYFNDEFF

SEQ ID NO: 108855 - protein, 61 aa, Oryza sativa
  Clone ID: PAT_MRT4530_13069C.1.pep
QAGVKKVFASSNWFDALCFPIVKSRLSPLDCDAFGWFYFRPSIGSWAPCYDLNNEYCKNVM

SEQ ID NO: 108856 - protein, 111 aa, Oryza sativa
  unsure (1)..(111): unsure at all Xaa locations
  Clone ID: PAT_MRT4530_1306C.1.pep
GGGGGDGRGWRRLPTADGDGGGDTGRPSWRKEAQPMAAEAGXAREMRTAQMEAGLVREARPMEGGRIGTRGASGGGGRLGXERRGWRWRRRXPRCEEELPVGVEQFSAHEG

SEQ ID NO: 108857 - protein, 162 aa, Oryza sativa
  Clone ID: PAT_MRT4530_13070C.1.pep
MVDVAEVGKLMSRYPSRRARMGRRRVVVDAQEGVMDQGDQTEVAHNGTMKSKPKLMPMSETPTHEITAETMASQQGQKEALQKVVTGRSANDCPARDADGGRRRSKTEAVRKESGGRVERSTGWCRQSAPGRGRSGLGDAGRAPRRGEEEATVHPAAAGMAR

SEQ ID NO: 108858 - protein, 425 aa, Oryza sativa
  unsure (1)..(425): unsure at all Xaa locations
  Clone ID: PAT_MRT4530_13071C.1.pep
TGRAACQTVPHRVALHRDYRWPKGPKPDGPAHGTVFWPSPSTARSGPCPPGLTTRPCRPPSASPTPATPGAQPRLPAVARPRRKGVPSSRPPCHRSRCRYPAPNGRRPFHPSLTRAQEKPSDRRSLRRLLGAVARPCTAALSPPPSCASAPSPAVVRPRRKRAPCPRPPPPPXSSPHMATPPPPAHQPPHRHHEVDYQFRPRPRIGALDPAPPXPMSSSALAMPPPRPPPPSQRHRLPPPPYPSPSTPPTSFFPSPPPSLPSLPTPPPPPRPAPLFLLFSPRPPPPPLFPPPPPPPPSSPSSVWQTEHQQPPPIFFPPPTFFFHFLPPPFALRPIQLRPPPPPPDFARPHATFTFSPPPPSTPPPPPLLSSLLPLFPPAPQSFYFSPSPTPSLPSPLTHSLILSPPPRYFDPPPXYIYPPPPSTT

SEQ ID NO: 108859 - protein, 55 aa, Oryza sativa
  Clone ID: PAT_MRT4530_13072C.1.pep
MGKQPEDYLENGDSSVPWSAWRQLAEAHTEYSYRSRALAPNKPAENPKLPSNGII

SEQ ID NO: 108860 - protein, 2159 aa, Oryza sativa
  Clone ID: PAT_MRT4530_13073C.1.pep
MAWGGAGNLVPVRPAGSVNAKGQGPREQRVKGSKLLSGRFLCIGGILKERCSDGSSRAMWRHREGGGAGEDGRGRWRWHWLGKKRGNRDRSDLAEVDDPESAMSTVAQLLEQLHTSMTSLPEKEVTTKRLLELAKEKKEARVLIGSHSQAIPLFISILRSGTSIAKVNAAALLSALCKEEDLRVKVLLGGCIPPLLSLLKSESTEAKKAAAEAIFEVSSGGLSDDHIGMKIFVTEGVVPTLWDMLKPKSHQDKVVEGFVTGALRNLCGDKDGYWRANLEAGGVEIITGLISSKNTTSQSNAASLLARLVSAFGDSIPKIIDAGAVKALLRLLNRDNDISVRESAADALEALSSKSSIAKKAVVDAGGIPVLIGAVVAPSKECMRGDTCHSLQSHAVHALSNICGGTVSLLLYLGELCQVPSPPVPLADILGALAYTLMVFSGTDGKSFDPIEIENILIVLLKSYDSNLVLDRILEALASLYGNACLSGRLNHSNAKKVLVGLITMASADVQKNLVHALTSLCSDGIGIWDALGKREGTQLLISFLGLSSEQHQEYAVSLLAILSDEVDDSKWAITAAGGIPPLVQLLETGSQKAKEDAAHILWNLCCHSDDISACVESAGAVLALLWLLKSGSPHGQEASAKALKKIIRSADSSTINQLRALLLSDSLSTKAHAITVLGHVLVMASQRDLVQNGAPANKGLRSLIDILESSNEETQEQAATVVADIFSTRQDICDILGTDEIIQPCMKLLTSGNQVIATQSARALGALSHSANAMLKNKMSCIAEGYVQTLIEMSKSPSIDAAETTIAALANFLSDAHIAKEALDGNIVLALTRVLKEGSLEGKISASRSLCQLLNQFPLNEVIPDYSQCYFIIHALLVCLSGINLENATNLDPLNVLAWMARTKEGAHFSSPLWSAFLDVPESLEPLVRCISVGLPPIQDKAIQILASLCQDQPSLLGEHLNRSQGCIASLASRVIESTNMEIRIGSAITLISAMRHSREHSIDVIEASGHLKNLISASIDMMKQDSAPTSLDIEVWKPYPENSLYNYDKDVLGVSGSGKVLEETVALWLLSLICSSHLSSKLTVMDLGGVETISDKLASYTTNQQDSMLVQSPAIMRTIPSLASLLKSDKIIDKYFAAQSLASLVSTGSRSIQLAIANSGAVMGTIAMIGQIESTMPNLVAMAEEFKLADNPSKIILRSLFELEDVRTSATARRSIPLLVDLLKPMPDRQGAPLVALHLLTQLAEGSETNKVAMAEAGVLDALTKYLSLSPQDSTETTIINLLRILYTNPDLLYHESSISTSNQLVAVLRLGSRNSRLNAARTLQNLFDSENIRDTEVAWQAIPPLLDMLESGTETEQQAALGALIKLSSGNISKASALFDVEGTTLESLYKILSFSSSLELKNDAAQLCYILFENSTIRASPIASECLQPLISLMTSGSTFVVEPAVRALNRLLDEEYNAEIAATSEVVDLLVSFVPGTNHQLSEACIGALIKLGKDRPNCKLEMVKAGIIEHVLDMILDVPVSVSSSIAELLRILTNNSGIAKSSAAAKMHSALQALVNILEKPQSLAALKLSPSQIIEPLISFLESPSQAIQQLGTELLTHLLEQEHFQQDITTKNAVVPLVQLAGIGILSLQQTAVKALESISQSWPKAVADAGGILELSKVIVQDDPQPSQALWDSAALVLCNVLRYSSDNYVQVSIAVLVRLLNSTIESTVTIALNALLVQEKSKSRCALAMAEAGAVRALLKLLKSHRCEESAARLLEALINNARVRETKVAKYSIGPLSQYLLDPQSKNQSAKFLVTLALGDIFQHEALARASDSVSACRALVSVLEDQPTDDMTMVAICALQSLVLHSRTNRRAVAEAGGILVVQELLLSPNVDIAGQAALLIKYLFLNHTLQEYVSNELIRSLTAALERELLSTSTINEVILRTIHVIFNNFKKVRFSEAATLCIPHLVCALKDGNEAAQESVLDTLCLLKESWPQMNEDIAKAQSLISAEAIPVLQMLMKTCPPSFHERADSLLQCLPGCLTVTILRGNNLKQTMGSTNAFCCLQIGNGPPRQTKVVNNSICPVWNEGFTWLFDIPPKGQKLYILCKSKNTFGKSTLGRVTIQIDNVVTEGVYSGFFSLKHDGGKDGSRTLEIEIVWSNRPSNDNM

SEQ ID NO: 108861 - protein, 87 aa, Oryza sativa
  Clone ID: PAT_MRT4530_13074C.1.pep
MGMGRAPGSAWIMLPPDRMDADVVARRLGDSIRPVVWFVLYHGLNSSFVSSGILTKKAGDVCYEMGWPKTEKGPGLRNGPKCLNHAD

SEQ ID NO: 108862 - protein, 131 aa, Oryza sativa
  Clone ID: PAT_MRT4530_13075C.1.pep
MALLVMSCVARLDDKDMGAGGGVEEAWVASRWRPSRTDEVRHLMVHESMHDVVGNLSVFLLLSSADGLTPSISIPPHMAVSLPVAPFPRAGDTLSPSRRLSRGAYTLPLPLLATLRQGCLVSSGPRRVGEQ

SEQ ID NO: 108863 - protein, 136 aa, Oryza sativa
  Clone ID: PAT_MRT4530_13076C.1.pep
MQLCLSVTLFWLVGSAYRRVTGVLRLGCKGRNSWEIPGLKETRDIQTLGTMGNEGGAERRGCAFTKPFLEKIDFSSEANETLPQLADRIDCPESLIGWWLECISYIYLFISWLNSTVNRRIFLCNFGILKCVHFFW

SEQ ID NO: 108864 - protein, 730 aa, Oryza sativa
  Clone ID: PAT_MRT4530_13077C.1.pep
MVAVARGRRCRGVVLLLLLSSVLAPLVLYGGSPVSVSTLPDSTVASGVLDRDGEYNLVVAASDVSLTKDLTIERLGEHKNRVLSATEDWQVVEAASKNPAFEKSDASVSRKDPGSGDANVVITEGNGAAQSGRDGVIWEVVSRDRGSDGFTQPWEINGGEERDGERVDRVKLGVSVEEQNDGTGETGVNNIAGTHTSGNLNSSLEKESIIHSHSICVPSTTQPSVIVFQERSTGRLSEQVTKAIPKESYTPTTNSNSALPTSVSAGHSTTSPDATIRTIKDQLTRATTYLSLVASRGNHGFARELRARMRDIQRVLGDATSGGQLPQNVLSKIRAMEQTLGKGKRILDSCSGALNRLRATLHSTEERLQSHKKETNYLAQVAAKSLPKGLHCLPLRLTNEYYYTNSNNKKFPHIEKLEDPKLYHYALFSDNVLAAAVVVNSTIIHAKKPADHVFHIVTDRLNYAAMKMWFLANPLGEAAIQVQNIEEFTWLNSTYSPVMKQLESQSMIDYYFKSGQARRDENPKFRNPKYLSMLNHLRFYLPEIFPKLSKVLFLDDDTVVQQDLSAIWSIDLKGKVNGAVETCGETFHRFDKYLNFSNPLIASNFDPRACGWAYGMNVFDLSEWRRQKITDVYHNWQRLNENRILWKLGTLPAGLVTFWNRTFPLHHSWHQLGLGYNPNINEKDIRRASVIHYNGNLKPWLEIGLSRYRKYWSKYVDFDQVFLRDCNINP

SEQ ID NO: 108865 - protein, 59 aa, Oryza sativa
  Clone ID: PAT_MRT4530_13078C.1.pep
THRAVCRPGLCARAHTVRIDYNAHTHGLRTSRYALACSSYMVACNAVIDVFPWIRMYVC

SEQ ID NO: 108866 - protein, 176 aa, Oryza sativa
  Clone ID: PAT_MRT4530_13079C.1.pep
YSRSSSKPCSCRVGGPTCQCLSDPPSMFQRPDHRGANAVLAILGTSTRLQMQRASLKSEPIYLSIHQPTNQSIDSRGSKSQSSSGQRQNPSKTREIRGIKPRRNRSERKCKDETVGEADTSKPPAEAGPEAGTPVDRIGELPVAGGGSGGSESTRDCGLSASARQPETLVLPVLFA

SEQ ID NO: 108867 - protein, 96 aa, Oryza sativa
  Clone ID: PAT_MRT4530_1307C.1.pep
PTIEETINIQGTTEVTTYKPTYAKTRRRILTSGISTASPLRCLRILSRETKALSLISSGTDSRRKTTLLSTTSQTFRPPYRQQLDRLPQILYCFDY

SEQ ID NO: 108868 - protein, 449 aa, Oryza sativa
  Clone ID: PAT_MRT4530_13080C.1.pep
MKITVHSSKAVKPVYGDAVAAPSTADVVPLSVFDRANFDTYVSVIYAFRPPAPANSVLEAGLAKALAEYREWAGRLGVDGDGDRAILLNDAGARFVEATADVTLDSVVPLEPTPRVTSLHPSADDDGAEAEVMMVQVTRFACGSLAVGFTAHHMVSDGRATSNFFLAWSQATRGVAIHPVPVHDRASFFTPRDPPRVDYEHRGVEFKTCEKLDRNENNDDGHGHGHDGEVVVTHKVHFSREFISKLKALASAGGGQRSYSTLQCVVAHLWRCITMARGLEGSVATSVSIAVDGRARMSPPVLDGYTGNVVLWARPTATARELVTMPLQHAMGLINRAVARINDGYFKSFVDFANSGAVEEERLVASADAAEMVLSPNIEVDSWLRIPFYELDFGSGQPFLFTPSYLPVEGLLILLPSFSGDGSVDAYVPLFSHDMDTFKNCCYVLPELS

SEQ ID NO: 108869 - protein, 100 aa, Oryza sativa
  Clone ID: PAT_MRT4530_13081C.1.pep
MSAAGEEDKKPAGGEGGGAHINLKVKGQDGNEVFFRIKRSTQLKKLMNAYCDRQSVDMNAIAFLFDGRRLRGEQTPDELEMEDGDEIDAMLHQTGGCLPA

SEQ ID NO: 108870 - protein, 167 aa, Oryza sativa
  Clone ID: PAT_MRT4530_13082C.1.pep
MFLALVILLAVAAGSWQPAATSTPATVSPAPAVSPVAAPAGELGGGGAGARRDQDREFVRGCCARTLYPRLCTAALSPYAAAVGSSHARLAVPSANLTAGTINSLGGRIPSPSTTGTTESPAGALGDCAEAVASAADLAARAAGRLDGVERAVAGPEVLWRVRDAQT

SEQ ID NO: 108871 - protein, 76 aa, Oryza sativa
  Clone ID: PAT_MRT4530_13083C.1.pep
MAPSLPLDPINGPTPLRWYMNGGRQAPKQCIYNISLKIIYIRLERNPLERILQALEPNSVPSATGLIELANNPIIN

SEQ ID NO: 108872 - protein, 44 aa, Oryza sativa
  Clone ID: PAT_MRT4530_13084C.1.pep
CFHCDPSSEWEVYMNSTVRFNFYQCRTSQNRLISYQLYFSFTSR

SEQ ID NO: 108873 - protein, 282 aa, Oryza sativa
  Clone ID: PAT_MRT4530_13085C.1.pep
GCAAEVVQPAKGGRDLLRIFKELKQSVVSDWGGVRPPLVEEDKEFLDKKQKLQDWEQQLTSASQQAEALVKAQQDMGETMGALGLAFIKLTKFETEEAMYDSQRIRAADSKRIATAAVKASRACRDLNTQTVKYLDTLHEHLGIMLSVHTAFSDRSSALLTVQTLMSDLASLQLRIEKLEAAASKIFGGDKSRLRKVEELRETIRATEDAKCCALREYERIKENNRSELNRLDREKKEDMLEMIKGYVTSQAAYAEKIVEGWETVAEETSGYARRSDNNIAW

SEQ ID NO: 108874 - protein, 75 aa, Oryza sativa
  Clone ID: PAT_MRT4530_13086C.1.pep
MERKTLASYALLRSCGCLLAATAMLIAALQHILVVLDAAGMESAALEGKLASYSHGHWPLLQQNTHRAKLQGTPL

SEQ ID NO: 108875 - protein, 185 aa, Oryza sativa
  unsure (1)..(185): unsure at all Xaa locations
  Clone ID: PAT_MRT4530_13087C.1.pep
MRLEKCWFCSSTIYPGHGIQFVRNDAKIFRFCRSKCHKNFKMKRNPRKVKWTKAYRCLHGKDMTQXPPLSLRGRGTDQSAMTGMSLHKLLRLSLLLQRLDMNAIKNILQRGKNRVRQSKGREMLRSWNRIFKCSRRRIPCCQHKRQRSWSKFLSSRPKKILWKSNEMESCCMRSHFVIFMQHLCF

SEQ ID NO: 108876 - protein, 1752 aa, Oryza sativa
  unsure (1)..(1752): unsure at all Xaa locations
  Clone ID: PAT_MRT4530_13088C.1.pep
MVEVLEEEVEVHTPTPSGSEDASGSHDPRHHRRNSRTPPLRDPSRREDPARSGGSALSPPXGRGRPRHVRVGRRLTYRDGSSPQGAVQAAGALLRHPPVNTEPEAPVQRXLDDVANLVTTAQRQLAASGRSTTTGTSRTSTSLSSSAKRRARRTATASRRSTAPTSSGALGSWRHHDGLYGEQDAQVNIERRRDERRDARMGEGASSSGVPRSSSRGGQPLTFTLGGIGCRAFVASLRNVRWPLKFRPNLTEKYDGSINPSEFLQIYTTIIVAAGGDDRVMANYFSMALKGQARGWLMTQPPDTIHSWEDLCQQFITNFQGTYPRPGEEADLHAVQRKDDESLRSYIQRFYQVRNTIPCIPAHAVVYAFRNGVWHNRMLEKIASKEPKTTAELFELADKVARKEEAWAWNSPSTGAAAAAAPETAPRSKRRDMRGKRKPARSDDEGHVLAADGSSRAPRNEKATGGKPSSTAPSGEGRSADKWCSVHNTYRHSLADCRSVMNLAERFRKADEEKRQSRREGKAPATPTNDRREESKKKAPADDGDDGTVATLDGGGGGACPHTSRRGFKAMRRELLAVVPTHEAARKARWSEVKLTFDQSDHPTAPGMKLXPSLPIIGVTLGHTWPLGHVELLVTFGDSTNFRTERIDFDVADLNLLYNAVLGRPALLKFMAATHYAYLQMKMPGLSGPITVFGDVKVALACAEQHANNLAVAMEPQAPVASASRASKKRLTLADEESALVSFLRANSDVFTXKPSDMPGVTREVIEHRLAVRPDAQPIRQKVRRQAPERQAFIREEVARLLEAGFIRXVIHPEWLANPVVVPKANGKLRMCIDYTDLNKACPKDPFPLPHIDQIVDSTTGCDLLCFLDAYSGYHQIRMAREDEEKTVFITPVGTFCYSTMPFGLKNAGPTFQRMTRITLSNQIGRNIEVYVDDLVVKTRHQDTLLXDLAETFDSLRSTRMKLNPDKCVFGVPAGKLLSFLVSSRDGPSFPDGPVPEAPDPREGPEAPVGGXEALTVAPEACHPELVRDPPGATKLGRLGPVAPDSKDRPHRKVQRPIYFVSKALRDAKTRYPXAQKMLYTVLMASRKLRHYFQAHRVSVVTSYPLGQILHNREGTGRVVKWAIVLAKFDLHFKPRHAIKSXVLDDFVVEWTPVDDPLPSDLPSLPGDGGDPSADIRAGHWVMHFDGSLNLRGVGAGVTLTSPTRDVLKYVVRLDFRATSNMAEYEGLLAGLRAAAGMGIRRLLVLGDSXLVVNQDSKEYQCTDPQMDAYVREVRRMERHFDGLELQHVPRRDDAIADELSHIMSARAPLPPGTFEERLVQPSAHLDPPRDPGATTSAPSPDSLRASGPEGIDPNPPRHVAWMTDIRAYLDNNTLPEDRAEAEKLARISKRYVLVEGTLNRRAANGILLKCISREQGVELIADAHEDILGPFKAARGGYQHLYVAIDKFTKWPEAYPVVKIDKHSARKFIRGITSRFGVPNHIITDNGTQFTSELFGDYCDDMGIKLCFASPAHPKSNGQVERANAEIFKGPKTKTYNVLKKHGDSWLEELPAVLWANRTTPSRATGETPFFLVYGAEAVLPSELSLGSARVTLYNEATQDDLRCDDLDYLEERRRCAALRAAHYQQSLRRYHQRHVRTRSLQVGDLVLRRVQSRLGLSKLSPMWEGPYKVIGVPRLGSVRLTTEDGTELPNPXNIKHLRRFYPXRRNFLLSRSSGQPPHNPSACAGLAGGYHCELLCTFFPFQAINFFPPK

SEQ ID NO: 108877 - protein, 164 aa, Oryza sativa
  unsure (1)..(164): unsure at all Xaa locations
  Clone ID: PAT_MRT4530_13089C.1.pep
MRLEKCWFCSSTVYPGHGIQFVRNDAXKIFRFCRSKCHKNFKMKRNPRKVKWTKAYRCLHGKDMTQDSTFEFERKRNRPERYDRNVTEQTLKAISLITKIRHERQKKHITERQKQGKTKQRERDAKELEQDIQMLPKKVTLSTQKTKVVVKVSQQQTEENLMEE

SEQ ID NO: 108878 - protein, 135 aa, Oryza sativa
  unsure (1)..(135): unsure at all Xaa locations
  Clone ID: PAT_MRT4530_1308C.1.pep
EAIRDAHVPANSASVTPPNGDELLGLAINLSEIARRQPSISKPEQYLEKALMRRIQYFAILEWWKLNTIKFPTLSKMARNVLAIPMSMVSSGSSIFSPTAPGNQMLDAYKSSVRPETVXALFWSKDCLQYPPEYH

SEQ ID NO: 108879 - protein, 401 aa, Oryza sativa
  Clone ID: PAT_MRT4530_13090C.1.pep
MEYAAPAGAGAGGYYYYPPSQQHKPRRPPRPAARWVKHWIPQDLATSSGKCALYKWVREDVYKNLKDGKAVPEPEAVKPEPTTEILFLCSYENCGKTFVDVAALRKHAHVHNERQYICQEPGCGKKFVDSSKLKRHHLIHTGQKDFICPHPGCGKAFSLDFNLRSHLKTHALENYHVCPFPACGKRFTSDSKLKSHVKGHEKTGTPITAQYVPSSDKPQSSSKPATPATTKPTTPAATKTTTPASTKPTTPAPTSFAERPYVCPYDGCGKAYIHSYKLNLHLKTQHPEHGQEENGRIAAHASEHAVNDRANQYNYAEIVDLAPNPKRSKTNSGHKTPSSNKAYNVKISSVLPADISGVKNQWPGKYEDDSEETEEDQGNNIEDGWRYGNQNADDEETEYED

SEQ ID NO: 108880 - protein, 94 aa, Oryza sativa
  unsure (1)..(94): unsure at all Xaa locations
  Clone ID: PAT_MRT4530_13091C.1.pep
NEKKKKKNIKNRKKKWIKRKIEKKKKKKILGNRDKGINKKKENXEKKKRRKGKKIEQRGRRERVQLKKKEIKVDIKKKPGKSPAKKERTFWLSK

SEQ ID NO: 108881 - protein, 30 aa, Oryza sativa
  Clone ID: PAT_MRT4530_13092C.1.pep
LCDVRWPERFRPRAIENYDGSTDPEEFHPR

SEQ ID NO: 108882 - protein, 27 aa, Oryza sativa
  Clone ID: PAT_MRT4530_13093C.1.pep
THFHQQLYENLILFTLLINHRGGEVAS

SEQ ID NO: 108883 - protein, 100 aa, Oryza sativa
  unsure (1)..(100): unsure at all Xaa locations
  Clone ID: PAT_MRT4530_13094C.1.pep
GLVSTHGYXNMYTRGLCNISIYRSIQLLSVHRHPLYRGFYLSSGGNWHLTRGCIGFRSPAKGXSYIPLGPGESVIYVGVVHGCIATTSWISLVWLIDLPT

SEQ ID NO: 108884 - protein, 59 aa, Oryza sativa
  unsure (1)..(59): unsure at all Xaa locations
  Clone ID: PAT_MRT4530_13095C.1.pep
WRRRDELRNLLTDKRRGRRTTGMGLRRRTSSXEGWPWWTSAARTQRRRRRGAAASVAAA

SEQ ID NO: 108885 - protein, 70 aa, Oryza sativa
  Clone ID: PAT_MRT4530_13096C.1.pep
LEKVYRTIATGMNVQMTGLKQPRTIYVDWGKKAPKLHRAINSLVYVHNPTNRIRQLDKRTQSLSMAAILK

SEQ ID NO: 108886 - protein, 519 aa, Oryza sativa
  Clone ID: PAT_MRT4530_13097C.1.pep
MAIGAFVEGGGSGYSGRVTPFVVLSCIVAGSGGILFGYDLGISGGVTSMEPFLKKFFPDVYHQMKGDKKKVSNYCRFDSELLTVFTSSLYIAGLVATLVASSVTRRFGRRASILIGGSVFVAGSVFGGAAVNIYMLILNRVLLGIGLGFTNQSIPLYLSEMAPPQHRGAINNGFELCISIGILIANLINYGVDKIEGGWGWRISLSMAAVPAAFLTVGALFLPETPSFVIQRSGDVDSARALLQRLRGTAAVHKELEDLVMASEVSKTIRHPLRNMLRRRYRPQLVIAVLVPLFNQVTGINVINFYAPVMFRTIGLRESASLMSAVVTRVCATAANVVAMAVVDRLGRRRLLLVGGVQMLVSQVMVGAILAGKFREHGEEMEKEYAYLVLSVMCVFVAGFAWSWGPLTYLVPAEICPLEVRSAGQSIVIAVIFLLTFLIGQTFLAMLCHLKFATFFLFAACLCVMTLFVFFFLPETKQLPMEQMDQLWRTHWFWKRIVGDSPQQQVVELHHHHQRSSSE

SEQ ID NO: 108887 - protein, 661 aa, Oryza sativa
  Clone ID: PAT_MRT4530_13098C.1.pep
MALSKPLLSRLLPLPLPLRPHLRLLCLATATPTPAPTPADADQATPTDAAAERRRRKRRLRVEPPSARGGPAPQRAPGAPRPASNPNAPKLPEPASALSGKRLDLHRRILALVREDDLDEAALLTRHSIYSNCRPTVFTCNAVLAALLRQARYADLLSLHRFVTQASVAPTVATYNLLLQAYCDCRRPDTALEHFRLLLKDDSPVLPSPTTYRILARSLAENGKLEQAIELKDGMLERGLVAPDPQVYALVMGGFVNAGDGDTVVSLYEELVEKLGGGQILDGMVYGNLMKGYFLKGMEKEAMDCYAEVLGEGSKVRFGAVSYNMVLDALGRNGKLDDALQLFDRMCEEHDPPRRIAVNLGSFNVMVDAYCRAERFQDAIEVFGKMGEKRCAPDALSYNNLIDWLGKNELVGEAEQLYKEMGERGVNPDEYTYVLLIESYFKVDRVDDSVSYFNKMFVAGLRPNANAFNKVIGGLVKVDRLDEAQGFFDKMPEKEVKPNIGSYELLLRAYIDAARLDDAIKMAKCILLDESVVFSDELKALLEGALQKDGRDGDMTKLYEDVEREKAEAAARAAEEKARAEALAKEEEERKKAEAKAKEEAAARASRAAIEAVLGRKKEGENDDSTVNVEEAQVVESHSDTNDITEENEGDDQKKSGDALP

SEQ ID NO: 108888 - protein, 56 aa, Oryza sativa
  Clone ID: PAT_MRT4530_13099C.1.pep
YTTFLNVNELLEPGFWLGRLSALSFTLLYLVKWVIYVRPDVVIGLTCDANKHAFKR

SEQ ID NO: 108889 - protein, 80 aa, Oryza sativa
  Clone ID: PAT_MRT4530_1309C.1.pep
GGFFFFLVFSYFFVFFFLEWILVQILLLRLLTKFHFSSRLVLWGQKGGGSPIEWPPRQHGGPDAGYRRKRRPPPRREFQA

SEQ ID NO: 108890 - protein, 116 aa, Oryza sativa
  Clone ID: PAT_MRT4530_130C.1.pep
RAAQEPTPASSEHHKIAVAPASIMIQARAGSIGEQRRLVQLQFFADAIFQVSSFPLLLQKQARIKWFRFAFKNVCCILFYYRLDLSDDRISSSAHLKCPSYVCERNIFSSIVVESM

SEQ ID NO: 108891 - protein, 218 aa, Oryza sativa
  Clone ID: PAT_MRT4530_13100C.1.pep
MAAIAFDLNEPPPPELDLNETIDWMSSLDDCHESPAHKLDYDGDEEGRGNEDEENGDGGEDVAGGDEQDDQAGLEAQVHAGDEHAEGVLMQDLSLGENLRKRRYYSDELKIAIYLVLLAKADPPVLHRGVSKQVALKFGVPLRLVQHVWQNGKEKGCVDGVVNKLFKNVGRKRIEIDLEAIRDVPSGERATLRRLADALGVKKTTLHNRLKEVKFRWR

SEQ ID NO: 108892 - protein, 252 aa, Oryza sativa
  unsure (1)..(252): unsure at all Xaa locations
  Clone ID: PAT_MRT4530_13101C.1.pep
MVPVVCLVYVASFQAAGEIRDEGARRRELRSSSARAEELRRRRVADEWRRSRRRRSDTDEAAAVAEAEVGRGRGGGSRGCGXGRSRRWREQAEEDRAAPEEGASGGGTGRGRXSSGRSQRRGEARASGGRSRRRGEARTNGGXVGRGQGGGRSRRRRSDTDKAAAVADEXGGGCAEEDGAALVEGAGGGGTSGCGGAAAEPSGRLXGVDTVLSVEVGWIGPADFGGPFRPGSERNIPLQGPSHPTHLSTKHP

SEQ ID NO: 108893 - protein, 205 aa, Oryza sativa
  Clone ID: PAT_MRT4530_13102C.1.pep
DWGRRSSSAQVEELVGASGGEAEAGRGRAATVAKVAAGVDERRRSRRRGERGRAAAVGCGGGGRTRTRRRGEAWASGGRSRRRGEARTSGGRSRRRGEVQRSGGGRSRRRRSDTNEAAAVADERRQSRGGGRSGAGGGSRRMRDERPWRRRGRAEREAAGVDAVLSVEVGWIGPADFGGPSRHGSKRNIPLQGPSHPTHLSTKHL

SEQ ID NO: 108894 - protein, 269 aa, Oryza sativa
  Clone ID: PAT_MRT4530_13103C.1.pep
MVPIVCLVCAASFQAAGEIGDEGARRRKLRSSSARAEERRRRVTDERQRSRRRRSDTDEAAAVAEAEVGRGRGGGGRSRRWREQAKEDGAAPGEGASGGGTGGGQASGGRSRRRGEARASGGRSRRRGEARTSGGRSRRRGEARRGRARLAATVGRGQGGGRSRRRRSDTDEAAAVADERWRSRMSGGSRAEEDGAALGEGAGGGGTSGRGGAAAEPSGRLRAGVDAVLSVEVGWIGPSDFGGPSHPGSERNIPLQGPSHPTHLSTKHL

SEQ ID NO: 108895 - protein, 217 aa, Oryza sativa
  unsure (1)..(217): unsure at all Xaa locations
  Clone ID: PAT_MRT4530_13104C.1.pep
LASRLLVRLGTEELVGASGGEAEAGRGRAATVAKVAAGADDRRRLVAKAEVGHGREGGGGRGRAAAVGREGRGRTRTRRRRPRRRSGGRSRRRGEARASGGRSWRRGEARTSGGGGGRSRRRRSDTDKAAAVTDERRRSRGGGRSGAGGGSRRRRDERPWRHRGGAEREAPGIDAVLSIEVGWIGPADFGGPFRPGSERNIPLXGPSHSTHLSTKHP

SEQ ID NO: 108896 - protein, 267 aa, Oryza sativa
  Clone ID: PAT_MRT4530_13105C.1.pep
MAEEQFLAVAVDAAKNAGEIIRKGFYQTKNVEHKGQVDLVTETDKACEDLIFNHLRKHYPDHKFIGEETSAALGATADLTDDPTWIVDPLDGTTNFVHGFPFVCVSIGLTVGKIPTVGVVYNPIMNELFTAVRGKGAFLNGSPIKTSSQNELVKALLVTEVGTKRDKATLDDTTNRINKLLFKIRSIRMCGSLALNMCGVACGRLDLCYEIGFGGPWDVAAGALILREAGGFVFDPSGGEFDLMARRMAGSNSYLKDQFIKELGDTS

SEQ ID NO: 108897 - protein, 116 aa, Oryza sativa
  Clone ID: PAT_MRT4530_13106C.1.pep
TRRPRAYGGLLHRPLHPQGPTLLRLCQARPVQMLLVPGARHLGAQRLLRFQHTYNFGVSVLSASGSSKFCSRVKWLIVRLYPLYAFKSSAVGLCVHSYQILSPCFSSICRYYGIKV

SEQ ID NO: 108898 - protein, 95 aa, Oryza sativa
  Clone ID: PAT_MRT4530_13107C.1.pep
FCGGTFFSPQKDRAQIKRKPFFFPGVFIVIWGGISNGPGEMPNPFFETVGGAPGKIPLYFGKPFVQRGIPMEGAPYPFIQLSKAQGRGGDPPFKK

SEQ ID NO: 108899 - protein, 118 aa, Oryza sativa
  Clone ID: PAT_MRT4530_13108C.1.pep
MERQRRVEKELGGKIKQCGDEEWLRALSTIPKGDGARWKASVIEEDGKRAPHRLSSSPLLHAAAPLPCSPSSVEGVGGNRSTPLLLAPSAPWSHPRPSSALPLLVVGGRRQRRRRELG

SEQ ID NO: 108900 - protein, 108 aa, Oryza sativa
  Clone ID: PAT_MRT4530_13109C.1.pep
RGEGIPGGVGRGGGCGRRRLACTARSPSPRSAPARRSPEPPRRASAPPPPAAAAAAARTARAQRAAAHPRPDRRTPARRPPPIPPPVAAASAAPAARTRRAQRAAPPR

SEQ ID NO: 108901 - protein, 65 aa, Oryza sativa
  Clone ID: PAT_MRT4530_1310C.1.pep
KLVPAKKLAPAFKKNAHVRMGGLRVLQRRQGGGSRGIPNWYRDTYKQPECTIDHALGCMQSPYVT

SEQ ID NO: 108902 - protein, 99 aa, Oryza sativa
  Clone ID: PAT_MRT4530_13110C.1.pep
MAAAASSRRGRWMGDEEDESSTAAVSRLGCGDRCYLIFCLPLHVGPPLGRSANVRGSGDEPAHGNELASDAPSALLRHRSRPPLQRPQAQEAGRHRWRR

SEQ ID NO: 108903 - protein, 63 aa, Oryza sativa
  Clone ID: PAT_MRT4530_13111C.1.pep
MAVDHVLAALCNLMAACPKGRRAMSHEPDGSSPVLGSEGGREGCRIGSELLPVGKLEDEREGR

SEQ ID NO: 108904 - protein, 90 aa, Oryza sativa
  Clone ID: PAT_MRT4530_13112C.1.pep
TRIINEFSPLRISFETSLMALHTTNLKNELSLAEMQPQRNPISKRREVHTACKRHERQLYVLYSFITLISKMACTRLWKRLADPKPTICY

SEQ ID NO: 108905 - protein, 153 aa, Oryza sativa
  Clone ID: PAT_MRT4530_13113C.1.pep
MITGDSNPDKEVESIAHRLGCVLILAVSSGVEEHTTQGVLISPLAVGTHSNRSGPGTGSKCPPMGQSGHDLHLEQGLGKHLPVCHRSCVVFTDSSNPGWGWGLTVARARATLSPSWRWGRGQVRKSSVREEGILAQPIPHQPCYYPYSTPTTL

SEQ ID NO: 108906 - protein, 233 aa, Oryza sativa
  Clone ID: PAT_MRT4530_13114C.1.pep
PRVRPRVRPEIKKEIKESRINVTSKVVNYINNASGDARPSVFVSATAIGFYGTSEISSFDESSPSGNDYLAEVCREWEARACQVNQEDVRLVLLRIGVVLGKDGGALAKMIPLFMMFAGGPLGTGRQWFSWIHQDDLVDLIYESLKNPSYKGVINGTAPNPVRLSEMCERLGRVVGRPSWLPVPEIALKAVLGEGASVVLEGQKVLPVKAKQLGFSYRYPYVQDALRAIARDL

SEQ ID NO: 108907 - protein, 195 aa, Oryza sativa
  Clone ID: PAT_MRT4530_13115C.1.pep
MDWRPDGAAPPVPVAAAPVVPVDFTVVKRRLGGGGDMEVRDASGGLAFRFVAAAAAGGGGGGGRALLDAAGGVLVTVRSGEVMGEWQAFRGNSLDYKDIIYTAKSISVCSNRNEVHVFMPPRSNFQDTKASYRLIGNTSRRACTIISGDSIVSQTNLLYKLKKVVYSTRKFRVTIYPGNDTLLVMAMVMNFFMEK

SEQ ID NO: 108908 - protein, 52 aa, Oryza sativa
  Clone ID: PAT_MRT4530_13116C.1.pep
FMLDRVKVLTGRSSLEANIALVKNNALVGAKIAVALSDLHQRVTNRFRRSAL

SEQ ID NO: 108909 - protein, 79 aa, Oryza sativa
  Clone ID: PAT_MRT4530_13117C.1.pep
MHTRGGLLLLLLLTCILHACKKQEKESRNQNETSMQASAPSSPPSFADQVAGKNCNGNGAITHRIRLKRWGKRRGGNSS

SEQ ID NO: 108910 - protein, 96 aa, Oryza sativa
  Clone ID: PAT_MRT4530_13118C.1.pep
LLQQNPQNDSCRAFIHPINSITSLCLNPIATSAGSFCSARAERAGEEIEGGMGSSTDQGTVLVSGSMILSGTRLLRSRRISTSGRVIPVALSSGTT

SEQ ID NO: 108911 - protein, 40 aa, Oryza sativa
  Clone ID: PAT_MRT4530_13119C.1.pep
CTHLSLTETAPACADIACYRINLTTLPMPSLCVRLLALWR

SEQ ID NO: 108912 - protein, 730 aa, Oryza sativa
  unsure (1)..(730): unsure at all Xaa locations
  Clone ID: PAT_MRT4530_1311C.1.pep
ISYYFKILFEVLKFKFLIDKKKVTRKNGQNNSTPPPRSSCSTACGDVKISYPFGFEAGCSWPGFELICRDTIKGKKPFLPPVTESVGYLELESISLLDGKARVWNNISXLYCYNSATKGMTNESSDXSTSPAEAYRLSDTENKFIIVGCYTVAYITACSAFCGPKGNNLTSLMDGACSGTGCCEATITEGHTSYNTMFDPDYNTTQIYNVSSCSYAVLMESSRFSFRRSYVMNSSQFIDTNGGRVPMVVDWAVQNASNCVEAQKDHDSYACISSNSVCVNSSSGPGYICNCTHGYQGNPYLLHGCQDIDECEEHENYHCYGTCKNILGSFECSCPAESRTKIGALQCTYNVCFLLYIIXVIRHRQNTKKQALLRQTDEFFQQHGGQLLLEMMKVEGNVGFTLYERGQIETATNNFNKAHIVGEGGQGTVYRAEIDGTIVAIKRCKEIDESRKMDFVQELVILCRVNHPNIVKLLGCCLQFEAPMLVYEFVQNRTLHELLDFQRNRSCHVTLGTRLRIAAESADALAHLHSLPHPILHGDVKPANILLTEELVAKVSDFGCSTIDEKTQVAPKGTPGYLDPDYLLEYQLTAKNDLYSFGVILVELLTGKRPLSKERKTLTSMFKEAMTDGTLIKLLDSDIVNEDNLRVIHQAAVLASQCLIIPGTARPEMRYVAEQLQQLAFADEVQQDPQPPLVLAGLRFTAEMANTRTTSSWQTDSKTTGVYSLEKNVR

SEQ ID NO: 108913 - protein, 147 aa, Oryza sativa
  unsure (1)..(147): unsure at all Xaa locations
  Clone ID: PAT_MRT4530_13120C.1.pep
PTQHIYDQLDQQYQGGVQQQPLANMIADVMRGQFGSKPKDSGIMYRHPYPXYFDRVSLPNRYKIPDFSKFSWLNNVTTYKHISRFLAQCSEASAIEALRVRFFPLSLSNSSGLGFSCLSRGFLSSSWSLSRVIHAFYLPGTTTYYLV

SEQ ID NO: 108914 - protein, 106 aa, Oryza sativa
  Clone ID: PAT_MRT4530_13121C.1.pep
MEGARRQSAHLGIAIEDARKANREKGIRVEKKEGDEKEKGKTVPARFMTVSSRRTPHGAGLYSVVYLPFANQYKHGPILPAREQTGYISMVPGLGAGQIRKTPLNA

SEQ ID NO: 108915 - protein, 388 aa, Oryza sativa
  unsure (1)..(388): unsure at all Xaa locations
  Clone ID: PAT_MRT4530_13122C.1.pep
MLPQQQQQQKQQAAALMPPSMYAMPPPPPLHHHHHPLLAAAPPQQQGKPILTGNLPPGFDTSTCRSVYVGNVHVQVTEALLREVFQSTGLVEGCKLIRKEKSSYGFVDYYDRRSAALSILTLNGKQIPEVTDSALFAFFSGYSSCSDARVMWDQKTGRSRGYGFVSFRNQQVXGQWLGSRQIRCNWATKGASNGEQQTSDSKNVADLTNNLTEDGKEKANEDAPENNPQYRTVYVGNLAHEVTQDVLHRLFHALGAGAIEEVRIQLGKGFGFVRYSNHAEAALAIQMGNGRILGGKPIKCSWGNKPTPPGTTSAPLPPPAAPSVTAADLLEYQRSLALSKMVSSQALMQAQAQQHLKQAMGMGAGVSQAMYDASFPNVGPSQQQLMYY

SEQ ID NO: 108916 - protein, 309 aa, Oryza sativa
  Clone ID: PAT_MRT4530_13123C.1.pep
MGSFKGHVLPGTLFLAVGAWHVWAAAARFAADPRGFRLRAWNPVDVGGGGAPAWLPAHLELYVIAGGAFLDMCVEVLYSTHLHIFADGGINPAHLNDLEHGGMLLMFFLFGILALLSQKTRYLPLPEGALCLVASTAFMAELLLFYFHSTTHQGLEGYYHYLLVVVVALCVATTVLGALLPASFPVDIASGAAIALQGLWFYQTAFTLYGPSLPAGCRRDADGHIDCHTHAAQERAEQLANFQLFGLVFLVCAYALGCFAVAAARHGHPDLATMHAKHVAAMEAQLAGAGAGEGDRFVGSALPLEDTAI

SEQ ID NO: 108917 - protein, 153 aa, Oryza sativa
  Clone ID: PAT_MRT4530_13124C.1.pep
MDGDEISAGLGMTAPDINRFYAVTAVACAADGGARAALGPPLLRPGRRSPLRFSRATGPGTAMLWRSVGPRAAPSSLASYLNDLAAAAVGEPRRRQAPSRSSGMAGEEGAAAAVDVTVPGSAALTGGSLPSGCRDHGYTPRLGRHLLRPPCAA

SEQ ID NO: 108918 - protein, 59 aa, Oryza sativa
  Clone ID: PAT_MRT4530_13125C.1.pep
KITTFLNTLINLTPEEKKPQHIIIITFNSSSTSTLFTTNLYYLPTLLNNSFKILPKLPS

SEQ ID NO: 108919 - protein, 237 aa, Oryza sativa
  Clone ID: PAT_MRT4530_13126C.1.pep
RPGASQNCLANHGPHAWAHPFLTPSASPQACRPSARRQHRSSAAPSLPPASAASAAPVGRPPPSSLPSASAQAPFPPADHLPRCYLPIAACAAPAGRPPPSSLPSHRHTAAPAGRPSPSPPPSHLRRIGSTAPSLADRPPRRLPFSTTRGSTTPPTRAPLPPADRLPRCRLPFSATRAPQHLRHRTGSAGGDERRRRRRRRTRRRRERERERGVEKKGEKTDTDPQLQWRTVIERLE

SEQ ID NO: 108920 - protein, 202 aa, Oryza sativa
  Clone ID: PAT_MRT4530_13127C.1.pep
MNSSVGSAGRMMEEVANEGNVVLSERSMKEQHSDKDDVCVERAMEQVSSHDDDVLREALLETGLFTGAMSIDQIDAGDEFEIQDEFGHEDGETEDEGVQSQPAVPDVGLVSGLRPGTWVFWEVPDLVPIFVRRIPLYCENRRKGWEQRCGTVVMGEAEGGRGATAQQRRHGEAEEWRGAAAQQRRRAKVEEARGAAAHAGKL

SEQ ID NO: 108921 - protein, 70 aa, Oryza sativa
  Clone ID: PAT_MRT4530_13128C.1.pep
ALRTLAILPTGNCRSALKLLVVSFLAAPAPISLSACCHPIPHPPTREELGCTTKIDETTQSQEALVEARK

SEQ ID NO: 108922 - protein, 686 aa, Oryza sativa
  Clone ID: PAT_MRT4530_13129C.1.pep
MKSNRGVSFSTKNAASGSKFTSRGSGNRGAFSSSSGGARSSNYGTSSGKDLAAPNERKNAANTSSTSVGSSTKSSGIQCFKCGGRGHVARECPNNRTIVVNDQGEYESTSEEEQEDSEEENNLEKDICEFESGAALVVTQILSVQMSDAENGQRHNLFQTRAKVQDKVVKVIIDGGSCHNLASKEMVEKLGLKLLKHPHPYHVQWLNNSGSIKIAQRVKVPFKIGEYIDTMECDVAPMTVCHMLLGRPWQYDRSSLHCGRTNQYTIKWKGKELILKPMTPQQILAEHLQKSSEVRNESAKEGQKNNLSAPHKSEYEDVFPEETPVGLPPLRGIEHQIDLIPGATLPNRPAYRTNPEETKEIQRQVQALLDKGYVRESLSPCAVPVILVPKKDGSWRMCVDCRAINNITVRYRHPIPRLDDMLDELSGSMIFSKIDLRSGFHQIRMKIGDEWKTAFKTKFGLYEWLVMPFGLTNAPSTFMRLMNHVLRAFIGKFVVVYFDDILIYSKTLEEHVAHIQQVLDVLRKEQLYANLEKCTFCTDQVVFLGFVVSGLGIQVDESKVKAIKDWPTPENVSQVKSFRGLAGFYRRFVRGFSTIAAPLNELTKKGVAFQWGEPQEKAFQELKKRLSEGPLLVLPDFTKTFEVECDASGIGIGGVLMQNGQPVAYFSEKLGDPLESTCRHASLSIL

SEQ ID NO: 108923 - protein, 342 aa, Oryza sativa
  Clone ID: PAT_MRT4530_1312C.1.pep
AETLVKTTLSSIPVYHLTVLHQNKWLYKKIDCLRRAFLWKGDDPEKFGWKDEHRPWQGMGLPCNDLDRVLFRAGTVITLGDGRKCSFWSDNWLLGQSPKDIALEIFRLSKIKINNVKLSLENNHWLAILNPITSIEEIDALVRLGSYLQEVTLNTNVPDDIFWKWTANGECTTKSAYEAQFSGTTTNLNFSPLWKAQAEPKQRFFGWLILHQKTLTSENLLRRHLPCDWICSLCSEAFEDANHLAKGCIFTRNVWNRLCNWLGFNQSLFSPQNEDISVWWDSMLHSVQEKRAKKRMVGALLTTWWHVWLERNHRIFNQQSQTELQVAHLIKENIDLIELPKK

SEQ ID NO: 108924 - protein, 94 aa, Oryza sativa
  Clone ID: PAT_MRT4530_13130C.1.pep
FRFGDPIFGRLTVHPGFFPRRSPRLFRPDLWFPLPPCVYLDRWVSLAGTRRCSQGSFSHDRLMLPAPHALLLDGCASSVLRPTVSCASPVGLPP

SEQ ID NO: 108925 - protein, 115 aa, Oryza sativa
  Clone ID: PAT_MRT4530_13131C.1.pep
MPDGHGILPDRLCGHESGTGTWVSGRAWFCSTRTRPDPLPSRRPPPPPRPTSERHRHLHPHLSGAESGHHLRPLGVGSTIHKVGGRRSGHRALSPSTPMLRPPPPPSLTIRCQIH

SEQ ID NO: 108926 - protein, 180 aa, Oryza sativa
  unsure (1)..(180): unsure at all Xaa locations
  Clone ID: PAT_MRT4530_13132C.1.pep
TFRSRSFTFAFSLSSRFIHLRSFVHFTFRSRTFVRLRTFKYNVKFTFVHVHVRXTFVHVHSFTFTFIXRSFTFTFSFTFVRSRSRSRSFIHVAAAERRRSGGGAARLQLGAAAASLNYGRGGSGGAVPRRRHGIPARQATKAKRHEWGGTGGVGPFGWGGGGGGWXGPGGWGGGAAATLR

SEQ ID NO: 108927 - protein, 568 aa, Oryza sativa
  unsure (1)..(568): unsure at all Xaa locations
  Clone ID: PAT_MRT4530_13133C.1.pep
MEWDSESDGAGSIGAGEEEEEEEEEEEGGFGGGGGGGGGGGGMFSFAIEGMLRASGPCGLVVTDALEPDCPIIYVNCGFEEATGYRAEEVLGRNWKDGSPLMNKLHLTPIYGDDETITHYMGIQFFTNANVDLGPLPGSLTKEPVRSTRFTPDNFFRPISTGPGQSNFCREYSSLFQLTDEVLCQSILSSSHSASRLIXDPTEEKPTWRILNVPGRPPRFAWGHSTCVVGGTKAIVLGGQTGEEWMLTEIHELSLASSTQASFRTIMIIHVXGLKLFFTGRTGTLDEYTESFGNDLYXTWKRWFALSRSKPTFGXLALCSQGVVICSFSCCLFCLLPENIIXISYSCEMSTHFMYSQTLLTCIMFGTTEQRCIAESXCDVLCFLSILLXLTTHKHKWRVVPASRAPPSSLGHSMSVYGGRKILMFGGLAKSGPLRLRSSDVFTMDLSEEEPCWRCLTGSGMPGAGNPAGAGPPPRLDHVAVSLPGGRVLIFGGSVAGLHSASQLYLLDPTEEKPTWRILNVPGRPPRFAWGHSTCVVGGTKAIVLGGQTGEEWMLTEIHELSLASSTV

SEQ ID NO: 108928 - protein, 175 aa, Oryza sativa
  Clone ID: PAT_MRT4530_13134C.1.pep
RYGSGLLNLNSLSKLMSQVWYAIVFVAPKKRATLYDKFLLIRECMTYGSKSLAVKRQEKRREQGRKLPAANGMHACDHLYLSPSIRCRRTRQKTDCRGSDWSDLPADLLVTVFSSLEIPDLICCGVATHPPPATSTASRSPTTTTPSRTAIRHRQPLYDYHHPPPTARSTSSLLR

SEQ ID NO: 108929 - protein, 112 aa, Oryza sativa
  unsure (1)..(112): unsure at all Xaa locations
  Clone ID: PAT_MRT4530_13135C.1.pep
GSGMPGAGNPAGAGPPPRXLDHVAVSLPGGRVLIFGGSVAGLHSASQLYLLDTRPEKPTWRILNVPGRPPRFAWGHSTCVVGGTKAIVLGGQTGEEWMLTEIHELSLASSTV

SEQ ID NO: 108930 - protein, 470 aa, Oryza sativa
  Clone ID: PAT_MRT4530_13136C.1.pep
RLLRASGPCGLVVTDALEPDCPIIYVNCGFEEATGYRAEEVLGRNCRFLQCRGPFAQRRHPLGDAMVVSEIRKCIDNGTELRGDLLNFRKDGSPLMNKLHLTPIYGDDETITHYMGIQFFTNANVDLVRLPGSLTKEPVRSTRFTPDNFFRPISTGPGQSNFCREYSSLFQLTDEVLCQSILSRLSPRDIASVSSVCRRLYLLTRNEDLWRMVCQNAWGSETTRALETVPAAKRLGWGRLARELTTLEAVAWRKLTVGGAVEPSRCNFSACAVGNRVVLFGGEGVNMQPMNDTFVLDLNAINPEWRHVNVSSAPPGRWGHTLSCLNGSLLVVFGGCGRQGLLNDVFTLDLDAKQPTWREIPGVAPPVPRSWHSSCTLDGTKLVVSGGCADSGVLLSDTYLLDVTMDKPVWREVPASWTPPSRLGHSMSDYGGRKILMFGGLAQSGPLRLRSSDAFTTDLSEEEPCWRCLT

SEQ ID NO: 108931 - protein, 35 aa, Oryza sativa
  Clone ID: PAT_MRT4530_13137C.1.pep
RNSEITQKITPYGSAFSCRNSSFTPLICHKYISFP

SEQ ID NO: 108932 - protein, 138 aa, Oryza sativa
  unsure (1)..(138): unsure at all Xaa locations
  Clone ID: PAT_MRT4530_13138C.1.pep
MELGLRCKSERPCSRPGSAPSTYNFFIPAVSVLDAPRSIAIVGPPERKKKARPKDSSRSHREISSINLDKDLADPARRSPDLASSLFFIGSTPTSLSPYKPDTTDINGDHNNSVHYERGGEKXGWLMEKERWWRGKFL

SEQ ID NO: 108933 - protein, 38 aa, Oryza sativa
  Clone ID: PAT_MRT4530_13139C.1.pep
QNNSFFVFPQPRFHGLGCSHFPRPYYGKRFSFLFLGLI

SEQ ID NO: 108934 - protein, 385 aa, Oryza sativa
  Clone ID: PAT_MRT4530_1313C.1.pep
MADKENSTPASAARLTRSSAAAGAQAKRSAAAGVADGGAPPAKRKRVALSDLPTLSNAVVVAPRQPHHPVVIKPSSKQPEPAAEAAAPSGGGGGSPVSSASTSTASPSSGWDPQYASDIYTYLRSMEVEARRQSAADYIEAVQVDVTANMRAILVDWLVEVADEYKLVADTLYLAVSYLDRYLSAHPLRRNRLQLLGVGAMLIAAKYEEISPPHVEDFCYITDNTYTRQEVVKMESDILKLLEFEMGNPTIKTFLRRFTRSCQEDKKRSSLLLEFMGSYLAELSLLDYGCLRFLPSVVAASVVFVAKLNIDPYTNPWSKKMQKLTGYKVSELKDCILAIHDLQLRKKCSNLTAIRDKYKQHKFKCVSTLLPPVDIPASYLQDLTE

SEQ ID NO: 108935 - protein, 77 aa, Oryza sativa
  unsure (1)..(77): unsure at all Xaa locations
  Clone ID: PAT_MRT4530_13140C.1.pep
FYQLYFLFLGFYFLFFNIFFLFFFIXLIICIVFLFNIIFIFXLYHILIFLSXFFLIIFHLFFSLNFLISFYLLLYFS

SEQ ID NO: 108936 - protein, 125 aa, Oryza sativa
  unsure (1)..(125): unsure at all Xaa locations
  Clone ID: PAT_MRT4530_13141C.1.pep
SGRQGAQADQEGAVYPCHSRDELHSDMTKGMDGRQMCPXCDFTASWCGRXPFIAPLLTXIHKXLPAAALLKMDAHETQEAANAHNVETMPTILSMKEGTHANRVRRPRNDYLPNAMTNHRPASAA

SEQ ID NO: 108937 - protein, 781 aa, Oryza sativa
  Clone ID: PAT_MRT4530_13142C.1.pep
MAEAVILAISKIGTTLGEEATKAVLAKLSEKVTNLKNLPRNVKDLMKWSLSAELMSPKTPSDIERQISGGCLPEFIKDEDLVGVEENRRKLTGWLYSNEPHGTVITVSGMGGLGKTTLVKNVYDREKGNFPAHAWIVVSKTYDVEELLCTLLMKVAYREQSPAANMNKMDVYELTDKIKKKLEDSKCLIVLDDVWDHEAYTMMRNAFQNLQESRIVITTRKEEVAALASSKYRLDLQPLGNTDSFNLFCRRAFHGRTGCPKDLMEVATSIVKRCQGLPLAIVSMGSLLSSRKQTEYAWNQTYSQLRNEMIKNDHVRAILNLSYHDMPGDLRNCFLYCSMFPEDYSMSRESLVRLWVAQGFVVRKDGNKPEDVAEGNLMELIHRNMLEVVENDELSRVSTCKMHDIVRNLALDVAKEEMFGSASDNGTMTQLDTEVRRFSTCGWKDDSAPRVSFPHLRTLLSLQAVSSSTSMLNSIFSRSNYLSVLELQDSEISEVPTSIGNLFNLRYIGLRRTNVCKLPECIENLSNLQTLDIKQTKIVKLPRGIVKVKKLRHLIADRYADEKRTEFRYFIGVEAPKGLSGLEELQTLETVQASKELAEQLEKLTKLQNLWIDNISATNCAKIFTALSKMPLLSSLLLSACDEKEEHGKNLRYLALSWCQLGEDPLRVLGLHVPNLTYLRLNSMISANRLIITAGSFPKLKTIVLKLMPNVNRLKIADDALPVIEGLYNDSLPGLERVPVGIENLFSLKKLWLLNLHQDFKADWIHREMHRKMQHVPDLRV

SEQ ID NO: 108938 - protein, 490 aa, Oryza sativa
  Clone ID: PAT_MRT4530_13143C.1.pep
MPGDLRNCFLYCSMFPEDYSMSRESLVRLWVAEGFVVRKDGNKPEDVAEGNLMELIHRNMLEVVENDELSRVSTCKMHDIVRNLALDVAKEEMFGSASDNGTMTQLDTEVRRFSTCGWKDDSAPRVSFPHLRTLLSLQAVSSSTSMLNSIFSGSNYLSVLELQDSEISEVPTSIGNLFNLRYIGLRRTNVSKLPECIENLSNLQTLDIKQTKIVKLPRGIVKVKKLRHLIADRYADEKRTEFRYFIGVEAPKGLSGLEELQTLETVQASKELAEQLEKLTKLQNLWIDNISATNCAKLFTALSKMPLLSSLLLSACDEKEVLCFQNLNPISKMFHRLIVRGQWATGTLELPIFQEHGKNLRYLALSWCQLGEDPLRVLGLHVPNLTYLRLNNMNSANRLIITAGSFPKLKTIVLKLMPNVNRLKIADDALPVIEGLYIDSLAGLERVPVGIENLFSLKKLWLLNLHQDFKADWIHREMHRKMQHVPDLRV

SEQ ID NO: 108939 - protein, 70 aa, Oryza sativa
  unsure (1)..(70): unsure at all Xaa locations
  Clone ID: PAT_MRT4530_13144C.1.pep
ANIIILHIXREKSTMCLLSVCHVAGDHPVGHRHIAAFHDSYLCTSEHRFSPYIGDTIQCSRVGCHAIIIS

SEQ ID NO: 108940 - protein, 339 aa, Oryza sativa
  Clone ID: PAT_MRT4530_13145C.1.pep
MAEAVILAISKIGTTLGEEATKAVLAKLSEKVTNLKNLPRNVTRIEKELKMMNNVIQDLGTADIRKNTVKGWIAEVRKLAYHVEDVMDKYLYHAHQMQEDGKMKKFVKGAQYIKIFDEIADEIVRMEEEIKHVKDLMKWSLSAELMSTNTPDDIERQISGGCLPEFIKDEDLVGVEENRRKLTGWLYSNEPHGTVITVFGMGGLGKTTLVKNVYDREKGNFPAHAWIVVSQTYDVEELLRTLLMKVAYREQSPAANMNKMDVYELTDKIKKKLEDSKCLIVLDDVWDHEAYTMMRNAFQNLQESRIVITTRKEDVAALASSKYRLELQPLGNTDSFNLF

SEQ ID NO: 108941 - protein, 83 aa, Oryza sativa
  Clone ID: PAT_MRT4530_13146C.1.pep
EQASRARSGHSYSRCRIRRPIVLFLISGHEGGQVLIGSLCSTVMFYFSGPPKVWYSLWMSVDSIECNVGVSSSNRSRVHESLS

SEQ ID NO: 108942 - protein, 176 aa, Oryza sativa
  Clone ID: PAT_MRT4530_13147C.1.pep
MRIHPSPATTAGGSCGGKKDLRRLPHVYSKVLELPFPADTDVAVFEGPDAFHFVVSAAAALAGEVRVRTVRIHPGVVRVVVQAGGGGVHDDGDDDDMELDKWRSRLPEASCPAMAVAGYVNGQLVVTVPKGRGGGEVQGRAVSYAVFQTAFLEAKGRKLLNTENVFPTSADIEGID

SEQ ID NO: 108943 - protein, 224 aa, Oryza sativa
  Clone ID: PAT_MRT4530_13148C.1.pep
MFNLIGYKILGMDLNRPKTQARTPGHALLSGSPISIVSLAPLFCLCLSRVIHLLSLGLISLYMRIHPSPATTAGGSCGGKKDLRRLPHVYSKVLELPFPADTDVAVFEGPDAFHFVVSAAAALAGEVRVRTVRIHPGVVRVVVQAGGGGVHDDGDDDDMELDKWRSRLPEASCPAMAVAGYVNGQLVVTVPKGRGGGEGDNDGGEEAWRCCNGGKISGRLVVVQ

SEQ ID NO: 108944 - protein, 146 aa, Oryza sativa
  Clone ID: PAT_MRT4530_13149C.1.pep
MSHEQHNERAHIGLAFICTAADLFQLLLVSAQKIRSTERRGPPATDGGAHDHAPGQEGWPKAAAACERAYGLRACGARIIALDRDRALSSAHQIGRRGSSRGGWNDGPRRPNNGGCVAWIKDGRDILRYFLLSGVRLPCQPGFSHG

SEQ ID NO: 108945 - protein, 44 aa, Oryza sativa
  Clone ID: PAT_MRT4530_1314C.1.pep
VVHLSSHVALLLRQRWDLRDSWHACRRPSTGRIRLPSRFLRMGP

SEQ ID NO: 108946 - protein, 71 aa, Oryza sativa
  Clone ID: PAT_MRT4530_13150C.1.pep
GSLKQTSPVDPVVPRLEFSKVESFYRENHRSPGYYDGRFWTLWKLPMFGCTDATQVLKELEEAKKAYPDAF

SEQ ID NO: 108947 - protein, 1132 aa, Oryza sativa
  Clone ID: PAT_MRT4530_13151C.1.pep
MHGDWPESPSQEVLYADEIAAVRAVLGAGLPEARVVAAISRCGGNAERAINALLDDATAGVEDKPEPKKGKGAKTAAPPVKAERDAGGAAPKPPPPPVKVEVLDDEPLGSQESNGCSARVKKEREDELLVKAPPPMPDRVKEEDGVAAKRGAATANAAGISLVPRPKKRSRVHDEADTIDLTATHPVPYLNPRPIRAVPPPEAMEMLESRRVRARPPPPSSDLRMVVAPPDAEFGEFPEERDWFLVGRSYVTGLSTNRGRRRLDAGELVHFSFPSLERTYGGIKVSNKKAAALAEIVRFSTNRAGEIGKLSTEWTKCLVPLVSSSKVKIQGKIVFPTVELRLMQEILLYVSFYIHRSVFTASGNNSSWDLLAPANVDYSTNPLYRLFRLLKLRAFTKADITPEELAAGKRPRNLRGDDNDEDEPMAIVGLENRRTAGQTFPEQGTDEQAISEAALNKIVGTAETYDLEEAEPPSTLVSVLKPYQKEALFWMSQLEKGIDGDQAKKTLHPCWSAYKIVDKRAPAVYVNVFTGEATTQFQSVTQSARGGILADAMGLGKTVMTIALILSNPRGELEQDKRGTRDRDTKAQTSRSSVRGGTLIICPMALLGQWKDELEAHSTPGALSVFVYYGGDRTTDLRFMAQHSVVLTTYGVLQSAHKNDGSSIFHRIDWYRVVLDEAHTIKSPRTKAARAAYELTSHCRWCLTGTPLQNNLEDLFSLLCFLHVEPWGDASWWNKLIQRPYENGDERGLKLVRAILRPLMLRRTKETKDKMGNPILVLPPANIEIVECEQSEDERDFYEALFRRSKVQFDKFVAQGSVLNNYANILELLLRLRQCCDHPFLVISRADTQKYTDLDELAQRFLDGVQRDSARRSAPPSQAYVEEVVEEIRQGATTECPICLESASDDPVLTPCAHRMCRECLLSSWRTPSGGPCPLCRSPITKSELITLPSQCRFQVDPENNWKDSCKVIKLIKILEGLQEKREKSIVFSQFTSFFDLLEVPFNQKGIKFLRFDGKLSQKHREKVLKEFSESKDKLVLLMSLKAGGVGLNLTAASNVFLMDPWWNPAVEEQAIMRIHRIGQKRAVQVRRFIVKDTVEERMQKVQACKQRMISGALTDDEVRSARIEQLKMLFT

SEQ ID NO: 108948 - protein, 185 aa, Oryza sativa
  Clone ID: PAT_MRT4530_13152C.1.pep
MVASRRKMESEEARKVCFSKRRADLFKMASELSVHFNADVAAVVFSPAGNRAYSIGDPSVMDRFLSSLPAPAPPAETEPEPEVDWSVMEELSRLCGQLQAMVDAHKARLEKAEEKLRESGAAAWMMDLEAEVGRMAPEDVLALVTKLAVLRDGVAERAHEMLREALLAVAAPTPTTPTTPPPAGF

SEQ ID NO: 108949 - protein, 83 aa, Oryza sativa
  unsure (1)..(83): unsure at all Xaa locations
  Clone ID: PAT_MRT4530_13153C.1.pep
MPVRSAVIERSDRPAHGLTGQPTREVIKSSSTLEFFDLCFTGFRRSNRRCTGGQTGGIWVVKPAAATGXGRQLWRSDRRFNTG

SEQ ID NO: 108950 - protein, 62 aa, Oryza sativa
  unsure (1)..(62): unsure at all Xaa locations
  Clone ID: PAT_MRT4530_13154C.1.pep
SLSTVNGTVGKPLVIEIFNSFIKKGKKREKICLQAKKDRSEKNDNFLLATYNXTPLFSDSSK

SEQ ID NO: 108951 - protein, 74 aa, Oryza sativa
  Clone ID: PAT_MRT4530_13155C.1.pep
LGSISGKWAFYSLYKTFKFLRVAFVTTKARNYPKHDEEETQPHGAIGEGIFSNRKTWLGVTQMFTHLLAKPITS

SEQ ID NO: 108952 - protein, 56 aa, Oryza sativa
  Clone ID: PAT_MRT4530_13156C.1.pep
MEEGCRGGASRVAACWRLGGACGAESANELCEIPVLPFHLFDEGEVPRGTKSPDGL

SEQ ID NO: 108953 - protein, 666 aa, Oryza sativa
  Clone ID: PAT_MRT4530_13157C.1.pep
MHPALLLLPLASLLHAAAAIGHNETSTSGNTSCTPARCGNLTISYPFSLSGVQPVSCGYPVLDLTCDNRTGRAFLSRTFRDHLFRVDSIFYENNSLVAAVETTFAGDADCPVPDFNVTSSLSPYPFIISNTNKYLAFIYDCSIPEHVGQLQRPCGNRTMGAYISDKWNSTPPSGVRGNCNSVSVPVRGYYDGMKPVSGHYEQLIKDGFVLEWMRSVMGDQDCDGCRRRGGECRFEQLSFQCFCPDGLLCSNSTRTNTTSSHPSGKVNRGIKIAAGTAAAVVCLGILGVGSTVLYTRRKRKRSASFEGLIHGGTPLPSLTKEFSLAGLAYTHIFTYEELDEATDGFSDARELGVGGFGTVYKGILRNGDTVAVKRLYKNSYKSVEQFQNEVGILSRLRHPNLVTLFGCTSQTNSRDLLLVYEFVPNGTLADHLHGGAAARSSSLDWPTRLGIAVETASALEYLHTVEPQVVHRDVKTNNILLDEGFHVKVADFGLSRLFPADATHVSTAPQGTPGYLDPMYHQCYQLTDKSDVYSFGVVLVELISSKPAVDMNRRGGDVNLANMAVHMIQSYEMEQLVDPQLGYASDGETRRTVDLVAEVAFRCLQPEQDVRPPIGEVLDALREAQRMDKVGYVKDDAGLVKKSRDGSPDCVMYQWISPSTTSNNSS

SEQ ID NO: 108954 - protein, 55 aa, Oryza sativa
  Clone ID: PAT_MRT4530_13158C.1.pep
MEDPSSGFLSTPNNGLTPLPCMQPMQCSHYFSASPVVLKMMPQRPMQRRYPLGRC

SEQ ID NO: 108955 - protein, 172 aa, Oryza sativa
  Clone ID: PAT_MRT4530_13159C.1.pep
MEHQGQHGHVTSRVDEYGNPVGTGAGHGQMGTAGMGTHGTTGGMGTHGTTGGMGTHGTTGTGGGQFQPMREEHKTGGVLQRSGSSSSSSSEDDGMGGRRKKGIKEKIKEKLPGGNKGEQQHAMGGTGGAYGQQGHGTGMTTGTTGAHGTTTTDTGEKKGIMDKIKEKLPGQH

SEQ ID NO: 108956 - protein, 95 aa, Oryza sativa
  Clone ID: PAT_MRT4530_1315C.1.pep
MRIGRRPGRPQGVRVARFINAAGTTGFPNELYMPFVLRGVVHVRVELDASAAARFLGTPDLVDEVRGQPYDCREGRRATGLQAERILPAGRLRRR

SEQ ID NO: 108957 - protein, 98 aa, Oryza sativa
  Clone ID: PAT_MRT4530_13160C.1.pep
MAIQSAKTNKNQWGPLVSAAFSLSPFFASLGVPPMSACGSASSYAGNVLASPRGVVGRRQHGRPMLDLAKLERLLRHGKAVTELCTGKDGAPMPLSWI

SEQ ID NO: 108958 - protein, 380 aa, Oryza sativa
  unsure (1)..(380): unsure at all Xaa locations
  Clone ID: PAT_MRT4530_13161C.1.pep
MSQERSQSQSPRSPASAAGVPFLSISVTDPVKMGTGVQAYISYRVITKTNLPDFEGQEKIVIRRYSDFEWLHDRLAEKYKGIFIPPLPEKNAVEKFRFSKEFIELRRQALDLFVNRICADLRFSIRRAGGRRRPAERSQSQSPRSPASAAGVPFLSISVTDPVKMGTGVQAYISYRVITKTNLPDFEGQEKIVIRRYSDFEWLHDRLAEKYKGIFIPPLPEKNAVVKIWFHKEIIELSGCKEGNTSHSYSLKSLTQAXVGTVKSIKATMVGRANAFRQHQDLFQQKDYKCYNLLKLIFVXNIRKVLNYNXQLATDSTEACKSQLTLKKGMYLDTIGFLSWLTPCVCFFFQEFAIGQAKLAKDIADAWRGVLPKLEACSTS

SEQ ID NO: 108959 - protein, 75 aa, Oryza sativa
  Clone ID: PAT_MRT4530_13162C.1.pep
FPFFFEVPCNFSLVWAPFCLQNSLDSDNTPGRFYFFFFPGPGKNFLFLNLGLASFFLINYPPKTSPLNSKLCPAF

SEQ ID NO: 108960 - protein, 95 aa, Oryza sativa
  Clone ID: PAT_MRT4530_13163C.1.pep
EQTVLAMNYIYIYIYQLQAKRPKYIQHITDTKVSLPDLSPILYSCITLHDPTHTHTPPPICYNSTNICICARAPHDTTYYIRARTSSSSGLNPER

SEQ ID NO: 108961 - protein, 310 aa, Oryza sativa
  Clone ID: PAT_MRT4530_13164C.1.pep
AEKEKSLQIFVLQFVQTFRDWGPYHNIHLVDQEQGSDETVVGCSHGHPSEVILILIQEMSIITSTIAESGNSPESSPNYSEQPGDLGLSTERLHVLECLTILTRSMHNCRVFSYYGGVKKVTSLLKAAVAQLKIQNSLLAADNHVSCQAVENIKMMLNMLKYIVTIISNFMKLEPTILRIPHFLNSTKCASSKNHLATVTPSTSESGIFDTLQRWQQRAIVLVMGAGGVNSLVEQQMKSLSRLNSEQWTDLSLHFITLCTLRSTISGTRAQNHVRSIGGLEILLDGLGLPSSKFSVLKNSSIPKDERCKF

SEQ ID NO: 108962 - protein, 625 aa, Oryza sativa
  Clone ID: PAT_MRT4530_13165C.1.pep
MTTASLAHPLASSSSSSTRVEVEVMGDVFVSSDDIARNLIIDYGSGKIALTAACIHFRIPSAALNSPFHHCVASVLPTIALLSLPPKKKPLPPLSPTAVAKRSPQPPQPFVLRPGSHHSLFPTVFPEEKGEDLEYTNKTALAAEGSNEKAAVDANEVSLPLSNLSNTRQHSDRENNMPGKHGNDGMSKDMGRATRLKRLQTPINLFEDECVFCHSFRTPPQFHGPMAHYQKGKLVSSDNGSPCPTDIIYVHKKCLEWAPQVFYEGDTIVNLELEIKRAAKLKCKRCKLPGAALGCYYTKCNRSYHVPCAMMTLNCRWDVDNGCVMCPEHATMPLPCDKISSPRNESGNSSSFPQSQSSIEQSDSADCEWEYPIIDQWNTSSSLSQGQYLDKEGISTDEYRKEKQTDHLYTERDCPSDLWVLLGSALSESEKDSLQEFASWTDATVVNEWTENVTHVIVGKSAGSAWSRSYEVLMALLFGKWVVTVGWIMDCLVKFIPSPEASFELRFSHDSRASIGGNKKRRNQASEGSLIAAAGGQILETNGGSHLLRENLEKVAVKPCYFVYDGGAPRDFTQGLLDDLPKEMEEGREYAACGAQVISHLRVFDAIAAYDAQILSHKDHFTPDV

SEQ ID NO: 108963 - protein, 462 aa, Oryza sativa
  Clone ID: PAT_MRT4530_13166C.1.pep
MGRSVLEMVVAAAQGGGGAAGESVLGMFRYAVLPIAKVFVVCFMGFLMASKRVGVLKPSGRKLLNALVFSLLLPCLIFAQLGRSITIDKIMEWWFIPANIALGAVSASLVGLIVALIVRPPYPYFKFTITHIGIGNIGNIPLVLISALCRDQLNPFGDSNKCTQDGNAYLSFGQWVGAIIVYTYVFKMLAPPPGQTFDSCDEERDKLPIKAPNTMSSVAKYPSSAHGNTHEEEPLLSIEEEEEEEGQDVHSLGSKIMIPIKGMVRFLQKKQLLQPPIIASVLAITLGVVPFLKNLILTDDAPLFFLTDSCLILGEAMIPCILLAVGGNLVDGPGEGSRRLGVRTTVAIIFARLILVPIAGIGIVSFADKLGFIPKGDKMFKFVLLLQHSMPTSVLSGVYLLLSSSSLASFSMSNLDDWQPAECIYHNAQADLVNYARYSDQSTLYLPSTLKIEHADFRGELI

SEQ ID NO: 108964 - protein, 606 aa, Oryza sativa
  Clone ID: PAT_MRT4530_13167C.1.pep
MTTASLAHPLASSSSSSTRVEVEVMGDVFVSSDDIARNLIIDYGSGKIALTAACIHFRIPSAALNSPFHHCVASVLPTIALLSLPPKKKPLPPLSPTAVAKRSPQPPQPFVLRPGSHHSLFPTVFPEEKGEDLEYTNKTALAAEGSNEKAAVDANEVSLPLSNLSNTRQHSDRENNMPGKHGNDGMSKDMGRATRLKRLQTPINLFEDECVFCHSFRTPPQFHGPMAHYQKGKLVSSDNGSPCPTDIIYVHKKCLEWAPQVFYEGDTIVNLELEIKRAAKLKCKRCKLPGAALGCYYTKCNRSYHVPCAMMTLNCRWDVDNGCVMCPEHATMPLPCDKISSPRNESGNSSSFPQSQSSIEQSDSADCEWEYPIIDQWNTSSSLSQGQYLDKEGISTDEYRKEKQTDHLYTERDCPSDLWVLLGSALSESEKDSLQEFASWTDATVVNEWTENVTHVIVGKSAGSAWSRSYEVLMARLFGKWVVTAQKLFSGLNFCLSAYINPDDRQHIQSLIAAAGGQILETNGGSHLLRENLEKVAVKPCYFVYDGGAPRDFTQGLLDDLPKEMEEGREYAACGAQVISHLRVFDAIAAYDAQILSHKDHFTPDV

SEQ ID NO: 108965 - protein, 650 aa, Oryza sativa
  Clone ID: PAT_MRT4530_13168C.1.pep
MTTASLAHPLASSSSSSTRVEVEVMGDVFVSSDDIARNLIIDYGSGKIALTAACIHFRIPSAALNSPFHHCVASVLPTIALLSLPPKKKPLPPLSPTAVAKRSPQPPQPFVLRPGSHHSLFPTVFPEEKGEDLEYTNKTALAAEGSNEKAAVDANEVSLPLSNLSNTRQHSDRENNMPGKHGNDGMSKDMGRATRLKRLQTPINLFEDECVFCHSFRTPPQFHGPMAHYQKGKLVSSDNGSPCPTDIIYVHKKCLEWAPQVFYEGDTIVNLELEIKRAAKLKCKRCKLPGAALGCYYTKCNRSYHVPCAMMTLNCRWDVDNGCVMCPEHATMPLPCDKISSPRNESGNSSSFPQSQSSIEQSDSADCEWEYPIIDQWNTSSSLSQGQYLDKEGISTDEYRKEKQTDHLYTERDCPSDLWVLLGSALSESEKDSLQEFASWTDATVVNEWTENVTHVIVGKSAGSAWSRSYEVLMALLFGKWVVTVGWIMDCLVKFIPSPEASFELRFSHDSRASIGGNKKRRNQASEGAQKLFSGLNFCLSAYINPDDRQHIQSLIAAAGGQILETNGGSHLLRENLEKVAVKPCYFVYDGGAPRDFTQGLLDDLPKEMEEGREYAACGAQVISHLRVFDAIAAYDAQILSHKDHFTPDV

SEQ ID NO: 108966 - protein, 81 aa, Oryza sativa
  Clone ID: PAT_MRT4530_13169C.1.pep
NFLAYRRTRKPTAVHLLIRPTPRVHLKGNTAARCHRCYQASAPRRASVRIYSGWPVLPIWPSILQLRVISQSSLFFMSRWR

SEQ ID NO: 108967 - protein, 391 aa, Oryza sativa
  unsure (1)..(391): unsure at all Xaa locations
  Clone ID: PAT_MRT4530_1316C.1.pep
MGRRGAGAGAAVVVVAAFVAAAVASGDTLADLGGAAKGIDSVPEVNNLGPWAKGLLKGMPDSAAGPAEGPIAKYPLVLAEERTRRPDVLDHLRMYGGGWNITNKHYWASVSFTGIAGFVLAAGCTTNQTLYQSKHVVVILVGIXLIGLYLLFQIEGHIINILGSSCLTLATLFILLGIFLILNSAAKDTCEAMDEWAQHPQAETALSNILPCVDESTTNQTLYQSKHVVVILVGIVNRAISALSNRRPHHKHPGQFMPYLCSPYDANLTDRQCKSREVTFDNATTAWLNYTCTVPDSDLCSGPRTITPEIYSQLVLAANDCKFVRNTFSSIASQYCPPIWRDLSLVSAGLALIASGLTLGLLLMLFADRPQREEVSELPSGSRITPVDCSP

SEQ ID NO: 108968 - protein, 68 aa, Oryza sativa
  Clone ID: PAT_MRT4530_13170C.1.pep
KATPVLSISREAPPQREAPKKNFPQRSPKGGFQNSWVLRKTRNFAPGKAKIQVGPKEKKKFFTQLGPA

SEQ ID NO: 108969 - protein, 99 aa, Oryza sativa
  Clone ID: PAT_MRT4530_13171C.1.pep
MAAAALRCRLAAAASPGRRFLCRRASGDQQQERDALLRCCVESKLHSYKATMEYADEFNGSLRRAMFGMTALSVLCPFVGLVSGLWASSIALTDDDDDD

SEQ ID NO: 108970 - protein, 100 aa, Oryza sativa
  unsure (1)..(100): unsure at all Xaa locations
  Clone ID: PAT_MRT4530_13172C.1.pep
GXXRDQXGAHRTPREXGXXXGGXTXPPXEXXXGLAGRKAGXXTXPEAPAGVSGXPXVAVNXXVPXREIFTRFRFGAXXWSRSLPRLPFPXXPTXXFQKXR

SEQ ID NO: 108971 - protein, 118 aa, Oryza sativa
  Clone ID: PAT_MRT4530_13173C.1.pep
GSCCSAAAPPPPTTAAAPRAPPPPPPRSPSPAPTTTRSSSSRAGTRTWRSRTPTGARRARGRRRAAIPAPPPAAAPGRTPGTRRRRARRGRAPPPPPTRTRRPPPARPDPPPPASAAP

SEQ ID NO: 108972 - protein, 571 aa, Oryza sativa
  Clone ID: PAT_MRT4530_13174C.1.pep
MASWLKVAEDLLEVVDRRAKIVATELSDEQSSPQPSGSSSQEGQAKKGKLREKGPLKLATGDAGSRTAAQKERKSRQPPRERIKIEKIRPSPPVDSSSVDASASKPDVSSSDVKGLDDDGGAEKEEKVVVDRKNDIGAEVVDTEVEVQSTERSAEDAAIVVDGAADSGNSEGAAESSAPSVPDERCEPSISNQDAEIVSAVNLEEKDSAMEVIHEKNIKEVPDTQVSGKSQDSKREGLSDSPESTENQQEHKLDSGSVKDQDQLEEARGLLKNVVKTGQSKEARLARVCAGLSSRLQEYKSENAQLEELLVQEREKCSSYEAHMKQLQQELSMSRVEGSRAESNMVDALTAKNAEIESLVKSLDSWKKKAAASEEKLAALQEDMDGLKRNRELTETRVIQALREELATVERRAEEERIAHNATKMAAVEREVELEHRAVEASNALARIQRAADQSSSRAMELEHKVAVLEVECASLQQELQEMEARNRRAQKKPSEEANQVIQMQAWQEEVERARQSQREAETKISSLEVKAELQKMRVEMAGMKRDAEHYSRQVYTKLNTNMQKAPSRRE

SEQ ID NO: 108973 - protein, 395 aa, Oryza sativa
  Clone ID: PAT_MRT4530_13175C.1.pep
MTAAASWSRSVTETVRGSHQYTVKGFSMAKGVGAGRYVSSDTFAVGGYHWAVYLYPDGKNPEDNANYVSVFVALASDGADVRALFELTLLDQSGRGRHKVHSHFDRSLQAGPYTLKYRGSMWGYKRFYRRSLLESSDFLKDDCLVMNCTVGVVKNRLETPKNIHINIPPSDMGRCFNNLLNLRIGCDVSFEVGDERVQAHKWILAARSPVFKAQFFGPIGNPDLHTVIVEDVEPLVFKAMVNFIYSDELPSIHELAGSVSTWTSTVVVQHLLAAADRYGLDRLRLLCEEKLCDELTAETVATTLALAEQHHCTQLKSACLKFTAVRENLGAVMETEGFNYLEETCPSLLSDLLATVAVVDDDAASFNRKRGVGGNEGANPVESVEASDRRIRRRV

SEQ ID NO: 108974 - protein, 92 aa, Oryza sativa
  unsure (1)..(92): unsure at all Xaa locations
  Clone ID: PAT_MRT4530_13176C.1.pep
MHIFGKTLSGKTXITLEGECLDTIDNVKANIQDXEGILPDQQRPSPDGKQLEDGRTLADYSIQKELTLHLVLMHMAGMRICLKTLTGESITS

SEQ ID NO: 108975 - protein, 89 aa, Oryza sativa
  unsure (1)..(89): unsure at all Xaa locations
  Clone ID: PAT_MRT4530_13177C.1.pep
TRNQVVLILCCLYLWSVHKKKRKITKQKILLSSIFTGTADTHANLHFTWXPGVXGHNPAHGSFAPWFSTKRDDQLCESTGRWANAGXNR

SEQ ID NO: 108976 - protein, 147 aa, Oryza sativa
  Clone ID: PAT_MRT4530_13178C.1.pep
MTTPLKATRRHDNRSPRAAAVQIQPAAVPSSSLDWGKELDGRARGWVRSWAALSQRRAPTNGRQSPPTRRRAAISAAVPPADWLYQPSLKLQQQRRQRRRCWARGLLPRASEPRRIFSSKLQRHRLALLDGVNAPDLLHICVLSSMT

SEQ ID NO: 108977 - protein, 144 aa, Oryza sativa
  Clone ID: PAT_MRT4530_13179C.1.pep
MSLKLGGEYAPRLTSSRQEAARPATPPLPPLLLQLQLPINRNGRHHCHHARGAANRADSCSCAPRADTTSPPGVRRRRWRHACAWEEIASRSSELVAGSVPPSSSPILARGHRAPCPNPMMRRGQRRAGFAPQLLEETCCRAAA

SEQ ID NO: 108978 - protein, 172 aa, Oryza sativa
  unsure (1)..(172): unsure at all Xaa locations
  Clone ID: PAT_MRT4530_1317C.1.pep
VNRAISALSNRRPHHKHPGQFXPYLCSPYDANLTDRQCKSREVTFDNATTAWLNYTCTVPDSDLCSGPRTITPEIYSQLVLAANVSYALYHYAPLMLNLQDCKFVRNTFSSIASQYCPPIWRDLSLVSAGLALIASGLTLGLLLMLFADRPQREEVSELPSGSRITPVDCSP

SEQ ID NO: 108979 - protein, 104 aa, Oryza sativa
  Clone ID: PAT_MRT4530_13181C.1.pep
MAPMTSKIAGALTLVLLLVLTAVTEGQVLPTPCCRIDCCDGKPECCDPGFAATVVAMAVTTPAAAVTTSKARPAATTAGTTMARKLVLLLMCCIVEATIRSLRA

SEQ ID NO: 108980 - protein, 130 aa, Oryza sativa
  Clone ID: PAT_MRT4530_13182C.1.pep
MANQGDDLNDNTRGWLRGSGVAEVSSSHGLPLLSTSSLAARAWGDTGVWGVGVAGAQGGVGMTSPTRFRVVTRSTHYEWPREKSESQVDKVSSSIVFKDRRTDTAQWTELKAIRAIASASTIQAVLALTL

SEQ ID NO: 108981 - protein, 703 aa, Oryza sativa
  Clone ID: PAT_MRT4530_13183C.1.pep
MAGGGRGAGLPAAGEAAKAGRVGVGTTKRARDPSPNSKDPNGVVANLLWRRYSGKVVAEVKASILPYVASTLEAKQVEKGKEEGLTGKTSRERERRKGGFVGVIAAEKKPALQLHGDEKYQKKAGNDPVPPTIDDTSKTGGLHLHGGHVSQSPPDSNALSSQRFGSSSPGGDMKNKTRKRTCTFYAQGRCKNGKSCTFLHEGEVSGSDNQVYGNHGGTGEGSEIQHPSSSKEHQFKNSAGSSQHEIYRTLVHAYGEDNRGLTHPVVKHSCHMLKASHGFKIGGSLTANPTNEVVQLPVVQEKNHEPYFMGHQISLGTNNCLNDMGAYSRLRLDGGKLQFEVAKGDSPRDSHLSRSYLEKNPLKPDYRYQPFDSTISLDPHQYSKKLSAYGGATENLPHKHQEEKSSSHVSYSLNSYTGFRKQGHDSSDFFLVNQSLRATSHHGTLPLHQLTPDKDASHHKGADFDKGGTSRSTLHVSSSSQPVVASAGKLSPIKDEVWITSVPFVPSFNFPDFPGSTSPSKSQYDPLVDSIDPPKVESLNNLKTSNISCSISSQHVDTNVIRGGSLEKPLTFADKLARNVSAKGSNDFGLISYDRGHSSSLDGDNRVKTCERKNDASLNNEKSDFRFHLVEHVKELVKPIWKEGNLSKEAHKLIVKKSVDKIFASLEPNQMPETEKAITTYITASAPKIEKLVKAYVDRYRTS

SEQ ID NO: 108982 - protein, 115 aa, Oryza sativa
  unsure (1)..(115): unsure at all Xaa locations
  Clone ID: PAT_MRT4530_13184C.1.pep
MASLNRPIVFLTEGWFLWGNGSLAHHLLGQTPSQWQTFLFGRPGGCKLDRLQAFXPIRSGRPQAGPTDSYDVFNKWFQGTGLFVVXQVIKPKGLLLPHYTNGAFLEFIIQGGRLP

SEQ ID NO: 108983 - protein, 43 aa, Oryza sativa
  Clone ID: PAT_MRT4530_13185C.1.pep
TDDDEHAGAQVVVGSLDSDLKAFSHNPAHGSFAPLAFSPSAMT

SEQ ID NO: 108984 - protein, 115 aa, Oryza sativa
  Clone ID: PAT_MRT4530_13186C.1.pep
MRTTRRDGSVAVARPSRCGSRFRGGPSELSLSLAHGTGRWANVRSGLGLRRPHHLEPELRLCHHELVGHWAATATARERGDHGRRDPELSRRERGPSLAATVLLLQFLVIFVVGA

SEQ ID NO: 108985 - protein, 202 aa, Oryza sativa
  Clone ID: PAT_MRT4530_13187C.1.pep
GGCSRSRCRCRRTRRCWRRCRRATMCTTARSSSTRPPSPRSSASSTSRRSRWTSPPPPGSCRRRRRLFARRRGSTSPTTRARTARPWTRCSGRSRPPSRGAPASASRAPSRRCCSAPRGSGRKARWTPTTWSRTATATARPSPVARRRRTAWRRTTARGGRSGARRRWHRRRRRSRRRYGRSGAAGSRACASGRSGRRGGSC

SEQ ID NO: 108986 - protein, 450 aa, Oryza sativa
  Clone ID: PAT_MRT4530_13188C.1.pep
MGKQGPCRHCGVTSTPLWRNGPPDKPVLCNACGSRWRTKGSLTNYTPMHARDDIDAEEPRASKLKPPTLKLKEQKQLKKNPSHITMENGPFSDQNFRKMGDPDLSNRSGSGSALSYSESCAPYGTADASEMTASAQSHAWESLVPSKRRSCVTRPKPSQMEKLAKDLNSIMHEEQLLYLSGSSEEDLIYHSATPVDSFEMGYGSMLLRPNSKSLEEESEASSIPADNKSYITSESYSGSVSFVYSESKATSNQNVITEQPKKFLVQTSDNARRANLHTENQDTLENANSPLVSLHMEGKDSEETRVKTSASNRLTKSTMNPLKRPHDTHFQSSVELRGTMRSPKRVSKYGDAMGLKCQASFMPKPGNGKDLACSDRALNLFMLPPDKLSMLVPPQYANTDSDQDLLLDVPLNARHPEAELLCQPSQLSSVAHSSTSEAGNAGGEGRLKQP

SEQ ID NO: 108987 - protein, 176 aa, Oryza sativa
  Clone ID: PAT_MRT4530_13189C.1.pep
MGRGGGDGRDEELLPRRSDNLPSASFFHAREEAEPHDAAGGCGHRALLVSSTGVCSRSPPRSLPSCPASTHTLPPPPPGPPPPSTPPTTTAWIWWWTTSSSSLVTRIRRLAGGYKGKSTVDGRRRGGVDVSPLLPSPMLTPACLRSSPRGPAPLCSSDGSSDSNGGDRSSDFGVER

SEQ ID NO: 108988 - protein, 148 aa, Oryza sativa
  Clone ID: PAT_MRT4530_1318C.1.pep
MGRRGAGAGAAVVVVAAFVAAAVASGDTLADLGGAAKGIDSVPEVNNLGPWAKGLLKGMPDSAAGPAEGPIAKYPLVLAEERTRRPDVLDHLRMYGGGWNITYKHYWAYRSVQAIYELQIQSGQFISTCPNTVASYRTTYRPFMDKLT

SEQ ID NO: 108989 - protein, 99 aa, Oryza sativa
  Clone ID: PAT_MRT4530_13190C.1.pep
LTQNFSHRGCAGCRRARKGYAQDYSMYGHDAKLAEEIKKGAASNEGAEAKTGQGPAAVHEEVLGKEVAPPKPEALATTPHELTVADGKLLAVPTRVGMK

SEQ ID NO: 108990 - protein, 52 aa, Oryza sativa
  Clone ID: PAT_MRT4530_13191C.1.pep
IWTYVNIYVQTMTISHCLDNTDWTCYVAYLLNTIKFWSMETKIHRPQYDCPL

SEQ ID NO: 108991 - protein, 101 aa, Oryza sativa
  Clone ID: PAT_MRT4530_13192C.1.pep
VHACGSHRSRNYIRHARSRGFIHCIAICAANAKAVNFVRDFDMMNHNSTIFMQELDTILDMLITVSTEHAQIDHTCREQGAWPQEHLGSCCTAQLELQHPG

SEQ ID NO: 108992 - protein, 183 aa, Oryza sativa
  unsure (1)..(183): unsure at all Xaa locations
  Clone ID: PAT_MRT4530_13193C.1.pep
EEFCGRAWDSVPREXVVWDGVGGGQVWTCTELASRWVSLSSCPARQRGWRVRRVSARGGSTHCPECFPGEHPRILLQLDPDESSPLFGSRPPRSICIICFVENPRFSRFLWGSSCXXHPPLRFFLXQPCGVNLLVALTPALPVPGCPINNXXCPXKKKKKKKKKKKKKKKXKKKKKEKKKKKK

SEQ ID NO: 108993 - protein, 168 aa, Oryza sativa
  unsure (1)..(168): unsure at all Xaa locations
  Clone ID: PAT_MRT4530_13194C.1.pep
PRPPRPSTPVFESSENTPSALESHHVEEEEVAAPAPTIPVLADMFSFDIKPFLDEEXETTSQALVPLADDIKTTLMDISKRLEGSADPSEIDLMKFHPXRLEKAQRRIADRRERXDLETTIQANRLSINEEKAKLDELEAGPSATQANIDRLNNRKIHSHTGTMQCTT

SEQ ID NO: 108994 - protein, 458 aa, Oryza sativa
  Clone ID: PAT_MRT4530_13195C.1.pep
MALATTSSHALSCYLHPRRRRRGNVAVSPRSEGGGARRKEEVEIVIVGAGVAGLATAASLRRLGVGATVLEQGASLRAGGTSLTLFKNGWRVLDAIGVADELRAKHLRIQGMKMRSASSPASAAGGVLREFSFEEEAPGQEVRAVERRALLEALASKLPPGAISFSSKVRRVAVAGQQQGPGGATELELEDGRRIVAKVVVGCDGVNSPIARWMGFSEPRYVGHMAFRGLARYDGDGGQPFEAKVNYIYGRGMRAGFVPVSPTRVYWFICFNRPSPGPKITDPAALKREALELVRGWPEDLLAVMRDTPDDAVVRTPLVDRWLWPVLAPPASRGGVVLAGDAWHPMTPNLGQGACCALEDAVVLARRLATAAASEGGEASSYGEAMRAYERERWGRVFPLTARAGLVGALVQWGNPAVCAARDGVVIPRLVRLGPFLEHTNFDCGLLEPSAAAAAPSP

SEQ ID NO: 108995 - protein, 40 aa, Oryza sativa
  Clone ID: PAT_MRT4530_13196C.1.pep
VCAGLDQVSAFPCRTGQCFLSYPFASLPLLVFPDCLLIHH

SEQ ID NO: 108996 - protein, 83 aa, Oryza sativa
  unsure (1)..(83): unsure at all Xaa locations
  Clone ID: PAT_MRT4530_13197C.1.pep
MFFVISLTLLTIVNDALIGNNLISSWFGMVYSWFGDRTVQPGWLFXMVGPIXQGMLYSVGLILFXYLIVLLNSQIFAKCCFCK

SEQ ID NO: 108997 - protein, 278 aa, Oryza sativa
  Clone ID: PAT_MRT4530_13198C.1.pep
MQFLVRRGEAAAAVRGRRATASAASVGGMRHGSTSSTSERARTDPPVAVGREPSGGFDDGLWRWRILQTGAFATSTKKPIDGDDLGRVPRGQGRAPAAPDPSIAAGLAKAETRRRREPAFFAHGLHRLPFRCRLELLPTPSRLALADLLRVGELYGGANVLRPRRRPPFRLRPLAAARSPPSSTLVWQLIPHLQIYPRDGGKQRGRDLRGALRHAGSGKELGLWGQPGRGKRAGRLGGQMGAEQRSASPCINSFGSNSESTYCKKFTWSLGTCLNLAT

SEQ ID NO: 108998 - protein, 85 aa, Oryza sativa
  Clone ID: PAT_MRT4530_13199C.1.pep
YNGVLCICTAKLYIIDHRKKLKLNWLQGVWGGMLCGVALQTLILLFVVWRTDWKAEAAQASARVHKWGGTDETKPLLQGDHSDRD

SEQ ID NO: 108999 - protein, 80 aa, Oryza sativa
  Clone ID: PAT_MRT4530_1319C.1.pep
HRSRRLGASPPSPPHRRREASAWAATFGTSPPPPSARCFAGPPMAWRRLRVRPPASEGATRLLGRGSHLGPAQPARAPTP

SEQ ID NO: 109000 - protein, 46 aa, Oryza sativa
  unsure (1)..(46): unsure at all Xaa locations
  Clone ID: PAT_MRT4530_131C.1.pep
MKAVTGGGPSPLTASNVSARHRXGDTCDGPRPDGSPVSRQRCEDLA

SEQ ID NO: 109001 - protein, 685 aa, Oryza sativa
  Clone ID: PAT_MRT4530_13200C.1.pep
MPAADPATALAPAPTPPPARGTAAGPRLLLLQSPPPAFPLGSNDDQLERARARAAARAASVRRRSLAASLAPRAAAQQQHDLLNRDQVMDLFHNCIKLASENKINQKNTWELGLIDHLSEIIQAGEEDDDETNFQKASCTLEAGVKIYSLRVDSVHSEAYKVLGGINRAGRGDEAGTKDTLKIQKKVAIQSIHKKISPTSTLESSFDSLNVKKFDVAFTVDPLYHQTTAQFDEGGAKGLLSYNLGVYDSCRVLFDSFEAPDKCILSDMQTEMAELIGLSFAKEQIEQMIIHMPLCNDISPTLSNIVYQFDDENRRPPHEAISRQIPVMEDQVVDGNDVANDDITQNDMQNDCGTWDFGGCDDQESVYDEHCDPMDHSSMNGQEETDEYTFESAEGLDVNERIDKIADFLSFGMGFSAKTNAWAGPEHWKYRKAKDLDPVPTKPDDSDAPKKTKKKRGKDEPDIDFSKALEHDMPNIFAPPKNSKSLLLPANRATSNNKLPEDCHYRPESLVKLFLLPDVLCLARRRKKPLGGSRENTDDFIPSEPWDGDDFCNDHVDEGNGDTDVEDAVDLITKPRQVNKIDIQYDKVSKQVDVHALKEVLWNHINTSADTDDLQEDKDTESPLCLSKVLQDLPSCNPDAAATEISPHLYFICLLHLANEHSLTLRDRPTLDEIDIYIPASSLVK

SEQ ID NO: 109002 - protein, 59 aa, Oryza sativa
  Clone ID: PAT_MRT4530_13201C.1.pep
SVYTLAEALVAVALPPTVLYRLIVLPYRRAPFFHDSCLFVMSVLFRPPDTNLKKNVIQD

SEQ ID NO: 109003 - protein, 95 aa, Oryza sativa
  unsure (1)..(95): unsure at all Xaa locations
  Clone ID: PAT_MRT4530_13202C.1.pep
ERSVSTASWYVRWATYCASVXEQTAPVCQAHLCGFEVLQESGVLVPFAPCXDLRQVFAICDVPDRYPVGKVVRVDPFWQIGIWSEYEVTQWIQAS

SEQ ID NO: 109004 - protein, 186 aa, Oryza sativa
  Clone ID: PAT_MRT4530_13203C.1.pep
GGGGPGPPQGVRPPLKRGRQPRWNRLFFQPPQVQNGHRPLRGQVLPQGNQRVPPLFFCRGFPPQQVFCLWGLIDQWITLLFWVVINRDRSVVFPKKKKNQMGGGKKKQINPPKLHVCKHASLGHVSLIMGFWGRIILFRVSAVFRLSFYRFRSNRPIVVALAPYMYLINAPKTPRAIWVFKKTPVQ

SEQ ID NO: 109005 - protein, 332 aa, Oryza sativa
  Clone ID: PAT_MRT4530_13204C.1.pep
MVAPAGSFFQEAALPEQRLVEGVAFPAVLVPSAAAAAAGGGLDAFLDAVRSERASTVEPLLRGAGAVLLRGFPARAAADFDRAVDAFGYAELPYVGGAAPRSNVVGRVFTANESPPDQKIPFHHEMAQVPTFPAKLFFFCEVEPKIGGETPIVLSHYVYKRMKEKYPEFVEKLEKDGLIYTRVLGEGDDPSSPIGRGWHSTFLTKDKSIAEERAAKLGMKLEWTEDGVKTIMGPIPAVKWDESRGRKIWFNSMVAAYTGWKDARNDPVRAVTFGDGSPLPADVIAGCGEILEEECVAVPWRQGDILLIDNWAVLHSRRSFEPPRRILASLCK

SEQ ID NO: 109006 - protein, 58 aa, Oryza sativa
  Clone ID: PAT_MRT4530_13205C.1.pep
WRCLYMYLVYDSLMWDPEMYSMAAMSAHAKYSTLQSSYDRSNNHYECICFRKRRSTAL

SEQ ID NO: 109007 - protein, 45 aa, Oryza sativa
  Clone ID: PAT_MRT4530_13206C.1.pep
DRLVVDKTAVSGTPMVVVLVLCADHAPSLSPRHLVHLRAMHVRDD

SEQ ID NO: 109008 - protein, 413 aa, Oryza sativa
  Clone ID: PAT_MRT4530_13207C.1.pep
MKASQVWQRGSKDMTAMPPPRQRGAAKKPMWIIVLLSLVCVALIGAYAYPPRRYSACYFFASSVCTPFKDWLPTVTRRERTDEEIVSSVVMRDLLAMPMPVSKNPKIALMFLTPGSLPFEKLWEKFLQGHEDRYSIYIHASRERPVHSSSLFVGREIHSEKVVWGRISMVDAEKRLLANALEDVDNQFFVLLSDSCVPLHTFDYIYNFLMGTNVSFIDCFLDPGPHGSGRYSVEMLPEIEQRDFRKGAQWFAVTRRHALLILADHLYYNKFELYCKPVTGITVGTRVPGFIPKRENDTLPAEGRNCIADEHYLPTLFNMVDPGGISNWSVTHVDWSEGKWHPRSYRAIDVTYALLKNITAIKENFRITSDDKKVVTMTPCMWNGTKRPCYLFARKFYPEALNNLLKHSSYTST

SEQ ID NO: 109009 - protein, 44 aa, Oryza sativa
  Clone ID: PAT_MRT4530_13208C.1.pep
MATAAATATPMPARRNGNAMGTSDVYGGIRARKKSRGKNGLRPV

SEQ ID NO: 109010 - protein, 495 aa, Oryza sativa
  Clone ID: PAT_MRT4530_13209C.1.pep
MAARSFSSASTTTILLRSGRWRRTMRAAAFPFRVSCSAAAAAAAGGTVVIGLAADSGCGKTTFVRRLTSVLGAGTAAAAAPPWGGNPGSNTLLGDAATVICLDDYHSLDRAGRKERGVTALDPRANDFDLMYRQLKAIKEGRAVAKPIYNHATGLLDPPELITPPKILVVEGLHPMYDERVRGLLDFSIYLDISSDIKFAWKIQRDMAERGHSLESIKASIEARKPDFDAYIDPQKQYADAVIEVLPTRLIAAADDDGDEGKVLRVKLIMKEGVEHFAPAYLFDEGSTISWIPCGRKLSCSYPGIKFSYFPDTYFGHEVSVLEMDGKFDKLDELIYVESHLSNLSTKYYGEVTQQMLKHADFPGSNNGTGLFQTIVGLKIRDLYEQPEDELLSLLQSLADMDITYKALQETDIGRHVNGLRKHPSGEVRLLAISSSSSSSASPWTGSSAAATAASWRESGSGSAMGSTTVVAVAGSTGISATSCFSLPWNPSPRW

SEQ ID NO: 109011 - protein, 115 aa, Oryza sativa
  Clone ID: PAT_MRT4530_1320C.1.pep
MGGWLVALARSSGGVGVGGGGGKDGGGGWRWSRHVKCACVEWKWTGSSSGSGSQGGPPSAGPIAGVVVVIRFPEVAELLDVCWLEIIGKLQLSLLSPATTYAAVTPRNSRIEFQA

SEQ ID NO: 109012 - protein, 47 aa, Oryza sativa
  Clone ID: PAT_MRT4530_13210C.1.pep
FFFFFFFFFFFFFFFFFFFFFFNQRMSITVILLQTGLYRIDQNQTKK

SEQ ID NO: 109013 - protein, 185 aa, Oryza sativa
  Clone ID: PAT_MRT4530_13211C.1.pep
MTSTAVATTVSVSGSINDERTLVSSCGVPMWHYKYMRKNNVLPTVDTSPHEDAIGDKVVERAAAAVGKGELGRIKPPFKALARRLYHRAPSFSDPDDDPPFTRVTECPPRPASKPAHATKKKNQGGSIKQPELVRSDLPFNFRYSYSKTDPAWRPIGFQRDLVDLDGANALAMEGMLALLHMYIV

SEQ ID NO: 109014 - protein, 86 aa, Oryza sativa
  Clone ID: PAT_MRT4530_13212C.1.pep
GSSSRAAWYRAGAHIGDVSGFCSGSVCSRCGVSLAWPNSVSGAVPVGVDLVVLSRVWGWGGGGCLLVGGVCSGLFLLGVLGGACRA

SEQ ID NO: 109015 - protein, 567 aa, Oryza sativa
  Clone ID: PAT_MRT4530_13213C.1.pep
MRGAVAVKAGSRPPWVGLGAAVWVQVAGGASSTFALYSHALKVALAADQRRLALLGVACDVGENLGLLPGVLCNRLHPALLLLVGAAACLLGYGSTWLAVSASGPALPYWLIWFALCLAANSGAWLGTAVLVTNMRNFPLSRGAVAGILKGYAGLSAAVYTVIYTGVLHDSASNFLLFVTLGVPVVCLVTMYFVRPCEPSLVENSSEQVHFLFTQLSSVLLGVYLVAATILDHFVTLTDAVNYVLLVIMVLVLFVPLTVPLKMTLFPSNRRKGQSDSSECSSSSADHDHTESLLPSSSASNLGNIEDDDSMDIDILLAEGEGAIKQKRRRPKRGEDFRFREALLKADFWLLFAVYFIGVGSGVTVLNNLAQVGIAAGVADTTISLALFSFGNFFGRLGGGAVSEYLVRSRTLPRTTLITCTQVMMIIIYLLFALGHHATLHVSVALLGICYGAQFSVMVSTSSELFGLKHFGKIFNFISLGNPLGALLFNSLAGYVYDQEVERQHATTMDTDIACHGPNCFRLTFCVLAGVASLGTLLSIVLTVRIRPVYQMLYAGGSFSQPRSSAH

SEQ ID NO: 109016 - protein, 48 aa, Oryza sativa
  unsure (1)..(48): unsure at all Xaa locations
  Clone ID: PAT_MRT4530_13214C.1.pep
FHLANSVEFGSFRFSRLIIMASIKSLLCIXLIXILLLVETTAPHGQXY

SEQ ID NO: 109017 - protein, 138 aa, Oryza sativa
  Clone ID: PAT_MRT4530_13215C.1.pep
LRRMLVSQMEMGMNSVQPNAQFPVPHKSLSLDINGNKTDIVISKYEDNFMVMVTQIGCMGTILAARKDESVFSDPTYNVSVLFGKRDEPLLLACARQLIEHISGSGSARSLMISLGLKDHSQATMKYIVSTIIENRLW

SEQ ID NO: 109018 - protein, 60 aa, Oryza sativa
  Clone ID: PAT_MRT4530_13216C.1.pep
FERQRKKSPWLCVCLLPQIKPACGASSAAVFHVYVNLNICYKMDLALVDSKVKTVPPFRP

SEQ ID NO: 109019 - protein, 158 aa, Oryza sativa
  Clone ID: PAT_MRT4530_13217C.1.pep
MTFFVVSLITRSMLVSQMEMGMNSVQPNAQFPVPHKSLSLDINGNKTDIVISKYEDNFMVMVTQIGCMGTILAASISDHVFFLINRKDESVFSDPTYNVSVLFGKRDEPLLLACARQLIEHISGSGSARSLMISLGLKDHSQATMKYIVSTIIENRLW

SEQ ID NO: 109020 - protein, 63 aa, Oryza sativa
  Clone ID: PAT_MRT4530_13218C.1.pep
SLYETCSPHLFQSFQRYIPGSWGSPLGALTPGAILGGKPIVTLVGIHRCLCPGVLELVLLHGP

SEQ ID NO: 109021 - protein, 51 aa, Oryza sativa
  Clone ID: PAT_MRT4530_13219C.1.pep
SPPRLCDYATADGRLRLHRQLAFITVDWCLRPHGCEIMPLLMGIFVFTAAG

SEQ ID NO: 109022 - protein, 232 aa, Oryza sativa
  Clone ID: PAT_MRT4530_1321C.1.pep
MTSRKELGDDDLERRLWIRSPPFTPLPPGILRPSPSSMACREAPRPVAEWLPHDKVLDAHGELSAEAPLPPHPQRGSPFSMRTPLRAPPYDPRLRSSRLPPLPWAPRRVGVGLKLQHLIPMEGRGAAPRRTEEEEQQQPQGIEDGMFKFDLVPREESCSTQAQIEGHYDHGWFGDSTSAWELGLLDAEIGDDCGLHTLPRGDVTMDSDWDPGVALEAPGSMWGPTIGPVFFL

SEQ ID NO: 109023 - protein, 37 aa, Oryza sativa
  Clone ID: PAT_MRT4530_13220C.1.pep
AVAPGMANLIGYCCDSDERLLIAEFMPNDTLAKHLFH

SEQ ID NO: 109024 - protein, 72 aa, Oryza sativa
  Clone ID: PAT_MRT4530_13221C.1.pep
MARIFPHSSHPLLSPLLVTTDSGGKGSGLGLRWWQAPATVAAGEVGTRATAVGLGKRDPALGRYRSTVLSPR

SEQ ID NO: 109025 - protein, 92 aa, Oryza sativa
  Clone ID: PAT_MRT4530_13222C.1.pep
MAWQACHRARLGRACAVPYVAEAPCGWRGEGGGWRAAEYTPPGTPVRACPAVCLGEEQPSSRPCARAHRKGRAASPCHRSLGRNGSVLHRPR

SEQ ID NO: 109026 - protein, 71 aa, Oryza sativa
  unsure (1)..(71): unsure at all Xaa locations
  Clone ID: PAT_MRT4530_13223C.1.pep
VTSAPYYPAPIPFSCATAFGSALTTFFFXTRIRMSIYNHGADLHGRLSPMIWLLLLGVHHLGSVWPGPSGP

SEQ ID NO: 109027 - protein, 203 aa, Oryza sativa
  unsure (1)..(203): unsure at all Xaa locations
  Clone ID: PAT_MRT4530_13224C.1.pep
TKPIFEQIGRYSCKPYSMTVDTNAKLSSTDGNPVIDLTVYRSLDGALEYLTSTRYXDISYVVQQILXAIKRILCYLCCTLDHGLYXKHSSTFDLVAXMQLTXAGCPDTKMFTXGYVVFLGDNLVSLSSKRQNYVSRSSSKAEXSVMANAVAKICRVTVLYCDNVTVVYLSTNRRRLSSPRPPLFLPHAVGLSSPVGPPPPTLH

SEQ ID NO: 109028 - protein, 83 aa, Oryza sativa
  Clone ID: PAT_MRT4530_13225C.1.pep
MLYRVILQKKKKKKKKKKKKKKKKKKKKKKKKKKKKKKKKKKKKKKKKKKGGGRFKGPRFTSPGLQGKIFFMGPPKSNPRAGV

SEQ ID NO: 109029 - protein, 55 aa, Oryza sativa
  Clone ID: PAT_MRT4530_13226C.1.pep
MHGDVCIRNMLFSKTVGRWQRCREAVRDNSMTPHRRCAGKQERPRRSHSHHDGWT

SEQ ID NO: 109030 - protein, 271 aa, Oryza sativa
  Clone ID: PAT_MRT4530_13227C.1.pep
MAMASSNDENERREQAEKALQRAEELFAAGNVRSAHLQAGRAKRLCPSLPGVASAAAAYEVHAAARPGKGNNWRAVLGMRYGDAATLDTIKDQFQRLSLLLLHHPDDDNNNNAGRRAAVEGAVELLRRACEDALSAVAAGSSMEDDDDDGTSRRPHAAAAPHNYKMPPPAMQLHVPREAIVIYCPSCKSEFAGKVGRLEQQVGMKCARCTEWLSPPWQKKPQAKKEPPAGPGRPAVFQCPAKCPECGEQYVHGVRRPVVPPVQGVHQESHG

SEQ ID NO: 109031 - protein, 45 aa, Oryza sativa
  unsure (1)..(45): unsure at all Xaa locations
  Clone ID: PAT_MRT4530_13228C.1.pep
YYVLSALSMFCRISLLGIYDFCLMRLXFGTSILYMARSMFMQVVV

SEQ ID NO: 109032 - protein, 347 aa, Oryza sativa
  unsure (1)..(347): unsure at all Xaa locations
  Clone ID: PAT_MRT4530_13229C.1.pep
MAGAGAGCGPQSPLFCAPRKCRRRRARARFGASPRRAGSLLSSAPRRRPSRRHRSALTSRASALVCTKAAEPGNRNRRRNTSILLRHATPSGTANILIDAGKLRTIDAVIITHSHADAIGGLQILLLKQATLLILIETTHHARFALELSKRNKNSFGTGLDCLRDWTNNVQPTIPIYVAERDYEVMKMTHYYLIDTSVVIPGAAVSALQFNIIKEEPFTVHNLEADTCDHRFVGQKYVNYKVIPLPVWHGQGYRSLGFRFGRVCYIXDALRPDRSSSTHFGLPRALEEVRKIKPKKTLFTECTVYYEXGMMHLMDHEKVNNELAKLMETEGLDIQLSYDGLRVPVWL

SEQ ID NO: 109033 - protein, 401 aa, Oryza sativa
  Clone ID: PAT_MRT4530_1322C.1.pep
METVASDSLDQQRKEAMYGRILAKLDELGARLDHAMGSLSPSSVPATPVDSLVSVSSPGATSSVDSQKVFDEMPSNKEPTTASVLHVTMSHVLYPVTAEVLLQVFSPYGAEEVRVYNQGTIQVEAFILFRLCQDATRAREALHGCCIYNGCCFLDVKYMQSCPNDIMSVAPVRCLSICNGHGTSLLMAVSTALPSSVPITTSLDASSISSPTYVNDVPSSTKPISASFFTERKGTSQRIIKWVSRIRVAHRPIRWAMKKKEVYVLTHIGGVSLFEMNENDLVHETSYESNESSALAFVEMPQNIKLPVEHLTPWVQNMVPNSMVNVVVCCETSDIPMSIWCLCRPLWRACSYSNQMLQEVFPWSRDGLCPWKYETKGDQLLLDKIFPWQRNGFSPGNKNQQ

SEQ ID NO: 109034 - protein, 237 aa, Oryza sativa
  Clone ID: PAT_MRT4530_13230C.1.pep
MQKDKTIIKVIGNYKLEVPSFGSGTNYGQVIFALGRGENMSLMVSHGTISWTDYPVLLRNHNMFLSCDIPEGGSGGPVVDHGGNMIGIAFVENPGPVFISIKTIMTCMEMWDQFSRVARPLLGMQLKSVELLDVSIQEELCRDYNITSGFIVSQVLVDSTAEKLGIRRGDVIDFQDIDCSTLSQLEDHLLSLGWGYLKGMHLTVDLKVEVHNLFDSYRESITFPVQFTDASKQLVVS

SEQ ID NO: 109035 - protein, 407 aa, Oryza sativa
  unsure (1)..(407): unsure at all Xaa locations
  Clone ID: PAT_MRT4530_13231C.1.pep
MAGAGAGAGAIAALLRAAHVPPAPRARSIRGLAAARGLPPLVRATAAAIAPSSFCPYLPRLSSARSFSSSTSCSAGASLGGAVSTSPSEQEKQRQQSELIFLGTGTSEGIPRVSCLTNPSKTCTVCTKAAEPGNRNRRRNTSILLRHATPSGTANILIDAGKLRTIDAVIITHSHADAIGGLQILLLKQATLLILIETTHHARFALELSKRNKNSFGTGLDCLRDWTNNVQPTIPIYVAERDYEVMKMTHYYLIDTSVVIPGAAVSALQFNIIKEEPFTVHNLEADTCDHRFVGQKYVNYKVIPLPVWHGQGYRSLGFRFGRVCYIXDALRPDRSSSTHFGLPRALEEVRKIKPKKTLFTECTVYYEXGMMHLMDHEKVNNELAKLMETEGLDIQLSYDGLRVPVWL

SEQ ID NO: 109036 - protein, 28 aa, Oryza sativa
  Clone ID: PAT_MRT4530_13232C.1.pep
GWCGPGVVTQHGTCAGTGHTDVAKRGRS

SEQ ID NO: 109037 - protein, 63 aa, Oryza sativa
  Clone ID: PAT_MRT4530_13233C.1.pep
ADQRALSWRLKTPGHNNSLFSGLHGGAARWSELLLSAASNCAKLKMLAAVDQDLTRSIAMMPA

SEQ ID NO: 109038 - protein, 63 aa, Oryza sativa
  Clone ID: PAT_MRT4530_13234C.1.pep
AAEIVSTASPAGARRTTDCGASSVTVVQSHPCQVSWFIRTNLDSVQCPSRVVVTSVQAYSGRS

SEQ ID NO: 109039 - protein, 279 aa, Oryza sativa
  Clone ID: PAT_MRT4530_13235C.1.pep
MFNILQRRPLLRVSEQPEQRVDGLQRRPHPVQVPGEVPLRRDLVPGGGAQLPGHLPEDYRREHLPYSGHGAAQPLLLLDTLDSSQNGRMDWHYPNPLQRSERNIFEEDKSMSMRVPPVGDGMIVTSALIIWKGLMVATGSESPVVVVLSGSMEPGFKRGDILFLHMSKDPIRTGEIVVFNIDGREIPIVHRVIKVHEREESAEVDILTKVNCFSGDNNFGDDRLLYAHGQLWLHQHHIMGRAVGFLPYVGWVTIIMTEKPFIKYLLIGALGLLVITSKE

SEQ ID NO: 109040 - protein, 42 aa, Oryza sativa
  unsure (1)..(42): unsure at all Xaa locations
  Clone ID: PAT_MRT4530_13236C.1.pep
IQVFKGLTNMLSERALNLNHRTLSFEGCSGYYETCQAICXGC

SEQ ID NO: 109041 - protein, 89 aa, Oryza sativa
  Clone ID: PAT_MRT4530_13237C.1.pep
MSFIIIFAPKTWQGIRALSIDKDNAPKWSPATLEEVKNEDIDRLFEPFSSEKELQVPSDDSNSSFLVFRELHRHLLQVGATLKQLQKED

SEQ ID NO: 109042 - protein, 50 aa, Oryza sativa
  Clone ID: PAT_MRT4530_13238C.1.pep
PPVPKVAKRAPALSPSPKNFLLSIASGGVVLFPIVGPVVPVSNFDPVKRP

SEQ ID NO: 109043 - protein, 86 aa, Oryza sativa
  Clone ID: PAT_MRT4530_13239C.1.pep
MACSGDFNWMWRFRHLEPLPTFNGEDDPQIWLESIEQFFVEQRIYGGREVVDCIKPPDQKISASARRLSVREGCSVMGMDQAHAAV

SEQ ID NO: 109044 - protein, 36 aa, Oryza sativa
  Clone ID: PAT_MRT4530_1323C.1.pep
LLTSQTLAMAWGGFDYRTVLAAVRRPGTSSNNNEDS

SEQ ID NO: 109045 - protein, 501 aa, Oryza sativa
  Clone ID: PAT_MRT4530_13240C.1.pep
MPSPGTPPSPPTTLITTQAPPIQPPPPPGGNSMIMPSSLTTAGTSQSPPDATTAGAPPPPAPSVGAWGGNVPSGLLIGVAFAGFLLALASMFLFLCIKNRWKRRRRPAQVMNLARRRTLVVPERVASPEVYQPSNGPTASPSGTSSYEFSGTTSWFTYDELAAVTGGFAEEKVIGEGGFGKVYMGALGDGRCVAVKQLKVGSGQGEKEFRAEVDTISRVHHRHLVTLVGYSVTEHHHLLVYEFVSNKTLDHHLHGGGLPVMDWPKRMKIAIGSARGLTYLHEDCHPRIIHRDIKSANILLDDAFEAKVADFGLAKFTNDSVTHVSTRVMGTFGYLAPEYASSGKLTDRSDVFSFGVVLLELITGRKPVDSSQPLGEESLVEWARPLLVDALETDDFRELADPALERRYSKSEMRRMVEAAAACIRYSVTKRPRMVQVWRSLDVEGSSPDLTNGVKLGQSMAYDSNQYSADIELFRRMAFANDLSTAELGYSGKDDVRRPPR

SEQ ID NO: 109046 - protein, 172 aa, Oryza sativa
  Clone ID: PAT_MRT4530_13241C.1.pep
TLDHHLLVVGLPVMDCPKRMNIAIGSARGLTYLHEDCHPRIIHRDIKSPNILLHDAFEAKVADFGLAKFTNDSVTHVSTRVMGTFGYLAPEYASSGKLTDRSDVFSFGVVLLELITGRKPVDSSQPLGEESLVEWARPLLVDALETDDFRELADPALERRYSKSEMRRMVEA

SEQ ID NO: 109047 - protein, 100 aa, Oryza sativa
  Clone ID: PAT_MRT4530_13242C.1.pep
KPNIFLAAGKTRHFLGAGKPWRENITGFFPPQELNKTPIRQKMNLQQMGSTLSQEESPICICKGKRKAGSLAWSFQGSHHPQAFKKRRSCKHRAKGWNPR

SEQ ID NO: 109048 - protein, 70 aa, Oryza sativa
  unsure (1)..(70): unsure at all Xaa locations
  Clone ID: PAT_MRT4530_13243C.1.pep
XTXHRQXXXRGXPPIIEVRTSTXGRPXSKAARXQRSSAXGGGVGALRWXRCXRSSGLXAMGACASIXTRP

SEQ ID NO: 109049 - protein, 160 aa, Oryza sativa
  Clone ID: PAT_MRT4530_13244C.1.pep
PEYKTAFQGYCSANKTRIWHKQYKRHHLLLLRLRKRDGATIFTYAHFFGSAAPWCSASESLCSAACDEPPPRPPRRLRHTGLILRRPSSLAYHSPSVRAHRPYRDPHRGAPAPPPPRELIPLPVHPESGTGHAHVSAPVSERVQVTASDVQRARGHRTPC

SEQ ID NO: 109050 - protein, 44 aa, Oryza sativa
  unsure (1)..(44): unsure at all Xaa locations
  Clone ID: PAT_MRT4530_13245C.1.pep
PXGLMPPWMPPXYXHWSXVCRXVMSYRRCVFKREEWLELIXTRI

SEQ ID NO: 109051 - protein, 44 aa, Oryza sativa
  Clone ID: PAT_MRT4530_13246C.1.pep
MNIIFAYALLAIAACNASERYDALSPSYRQYQLLSHLLLQEQVL

SEQ ID NO: 109052 - protein, 233 aa, Oryza sativa
  Clone ID: PAT_MRT4530_13247C.1.pep
MAGKDDDVKVLGVVVSPFAIRVRIALNIKGVSYEYVEEDIFNKSELLLTSNPVHKKVPVLIHGGKPISESLVIVQYVDEVWAAAPSVLPADPYDRAVARFWAAYVDNNMFPGMAGVLFAATEEERAAKAEETLAALAQLEKAFAECAGGKAFFGGDSIGYVDLALGSNLHWFEALRRLFGVALLDAGKTPLLAAWAKRFVEAEAAKGVVPDAGVAVELGKKLQARAAAASTAA

SEQ ID NO: 109053 - protein, 264 aa, Oryza sativa
  Clone ID: PAT_MRT4530_13248C.1.pep
MAGKDDDVKVLGVVVSPFAIRVRIALNIKGVSYEYVEEDIFNKSELLLTSNPVHKKVPVLIHGGKPISESLVIVQYVDEVWAAAPSVLPADPYDRAVARFWAAYVDNNVSTVLYTVLAMAMSPKLFDEQLLVISLVVLQMFPGMAGVLFAATEEERAAKAEETLAALAQLEKAFAECAGGKAFFGGDSIGYVDLALGSNLHWFEALRRLFGVALLDAGKTPLLAAWAKRFVEAEAAKGVVPDAGVAVELGKKLQARAAAASTAA

SEQ ID NO: 109054 - protein, 476 aa, Oryza sativa
  Clone ID: PAT_MRT4530_13249C.1.pep
MDLRVAAPASVAAAARCGTSLARPWPARASEDAALEARDSKTVVAVILGGGAGTTLLPPPHRRGAPRTRVAAAARRPESPQRQRPKRGINKVYILTQFNSASLNRHLSRAYNFSNGVAFGDGFVEVLAATQTPGSEGKRWFQGTADAVRQFDWLFDDAKAKDIDDVLILSGDHLYRMDYMDFVQSHRQRGADISICCLPIDDSRASDFGLMKIDDTGRVIAFSEKPKGDDLKAMQVDTTVLGLPQDEAKEKPYIASMGVYIFKKEILLNLLRWRFPTANDFGSEIIPASAKEINVKAYLFNDYWEDIGTIKSFFEANLSLAEQPPRFSFYDANKPMYTSRRNLPPSMINNSKITDSIISHGCFLDSCRIEHSVVGIRSRIGSNVHLKDTVMLGADFYETDLERGELLAEGKVPIGIGENTKIQNCIIDKNARIGKNVTISNSEGVQEADRTSEGFYIRSGITIVLKNSIIADGLVI

SEQ ID NO: 109055 - protein, 328 aa, Oryza sativa
  Clone ID: PAT_MRT4530_1324C.1.pep
MSPRREQAEEQQQQGWREEAVSGASLRQVDLERGANGWASPPGDLFHLRARGYFSGGGGGGGGGGGGGRRGKAPSAAEWLLRPAGVDWLRSHSRLDHVLARDDIPVAAAFRRARLRKDPSAHFLLAVNLQVPGRPDAYSAVFYFAAEAAIPAESLLGRFVHGDDAYRNARFKIVNRIVKGPWLVRATVGNYAACLLGRALTCRYHGGDGYLEIDVDIGSSAIASAILHLALGAVTSVTIDMGFLVESQSEEELPERLFGAVRIAQMEMGAAKYVETAPDDVVPDAGRAGAGFRVHSAKVANDSRHQERAAGKVGRSMSCQERGSGGGG

SEQ ID NO: 109056 - protein, 74 aa, Oryza sativa
  Clone ID: PAT_MRT4530_13250C.1.pep
MNRSQEGTGDYSPLPFVLSPRIGVPWSSEAGRAWKAVGRLRTSAYGAVKRAVVGGRYGGKKVAASDGLMDHHYE

SEQ ID NO: 109057 - protein, 175 aa, Oryza sativa
  unsure (1)..(175): unsure at all Xaa locations
  Clone ID: PAT_MRT4530_13251C.1.pep
RLPGKHCGTCAGLGHQESSLRCALEEALFLGRIFVMPSRMCLSSVHNTKGILHSTNATSEQRWEENSCSMDSLYDIDLISKIVPVILDNSKTWHEIMSRSMKSDGGMAHVQGIGRAELKDNPLYSKALVINRTASPLAWFMECKDRKSRSSVMLSYTFLPXMPAKKLRDAANKMN

SEQ ID NO: 109058 - protein, 78 aa, Oryza sativa
  Clone ID: PAT_MRT4530_13252C.1.pep
PDLIAGDPRLAPPPFFSFPREVDAYRFLTSSRVWLFGCRLISVWFLVCFFFFLFFFFACRHPEYQSFVWVLPDINYCS

SEQ ID NO: 109059 - protein, 122 aa, Oryza sativa
  Clone ID: PAT_MRT4530_13253C.1.pep
MGDMQIVLAAGKIEAQYVEMKVPLYSYGCEKKIKKALSHLRGIHSVQVDYQQQKVTVWGICNRDDVLAAVRKKRRAARFWGADQPDLGEDSMPADARKHYLQAFTAYRFRKSWKKLFPLIRL

SEQ ID NO: 109060 - protein, 517 aa, Oryza sativa
  Clone ID: PAT_MRT4530_13254C.1.pep
MAMKRTMKVVFSLALLLLPLASVAEEFDFMYLAQQWPDSYCSTHKCLVKPPPPSHFTIHGLWPSYNKLIDGKMWLEDCNKEDPLDPTQIQDLEKQLDQKWPSLKQTNLEFWSLEWKKHGTCSNLGQHAYFEAALALERLTNLTKILADGGVGPSDVKTYTFREISDALARGTGFRTYFKCSKNKAGDTLLSEVRQCVDRYGEKLINCTALSFDYCDNADKIKMPQSVGGPGGPRNTQKNSGPRPNRRTKWRRVWTRVRTLHSFPSRCFGDQAQGSKGGVLARRQAAGCGDATGVSVRVWRLMAAAATCGLRAASNATMQSARKGRLSKRALGQGVPAGRLKGRNDLKRKTATRLTTYSLKTGDCLIYIDVVQGCISTFDLLDCSDLPGLVFFINTQIGTPNGTRQKSELQLQFFSMAEKPPASPSSAGPGSIKEKIQKLGLSEVDEANIVPVTLDKLTPEQQKDLDTMMQQAQNQFLSSFTETRKGTLESTKVFKVMVLREFKVKALIKMATRHSYS

SEQ ID NO: 109061 - protein, 229 aa, Oryza sativa
  Clone ID: PAT_MRT4530_13255C.1.pep
MAASLWLQLPAPPASAAVHNPVFLTGNLSSSLLCKKHPQAARGSILCSSSSSSNSSASVVTKEQEAVAAASSSQEEGVAVSETEFVSYRDDPNFRGCRGCGREEVERGCNGEGRIQGGIATVPGFGWWPIKAYRPCPGFVASGGRYRRQGQSMDDVASGRGKKRELRGDPVQEISSLEMLDKDVQNFNPSLQNSVADVISQCLMAFMGCILLPGVIAKLYRNFESTTIL

SEQ ID NO: 109062 - protein, 132 aa, Oryza sativa
  Clone ID: PAT_MRT4530_13256C.1.pep
MGYTNVIKQKQKGSDRILMPSVEGQQAGKWIVIDSGSIIIHALEERAREYYDLESIWTKEVSPNISVQVNKDDKVVSSMYLHPMNFEDGGRRSTRQQRDAHGDFVNFMISRLSLLDMLIEGKVLKRDKFPCK

SEQ ID NO: 109063 - protein, 53 aa, Oryza sativa
  Clone ID: PAT_MRT4530_13257C.1.pep
MADRSDNELGTTGGLLDLPSLPWDELDDDTEARKNDNVLTHSCTREREGEGER

SEQ ID NO: 109064 - protein, 86 aa, Oryza sativa
  Clone ID: PAT_MRT4530_13258C.1.pep
MNRSLLGHLLNADDDDEVLTNKSGLFSSMSPRRTNYIETDTTSLILGRQIDDPTGCDMAHARAYTSYFTIRLSSSPTPGPRQHLNL

SEQ ID NO: 109065 - protein, 175 aa, Oryza sativa
  unsure (1)..(175): unsure at all Xaa locations
  Clone ID: PAT_MRT4530_13259C.1.pep
MWPARQAAQKACAQPWLPRCASDAGTSSMQILQKRNDVVVADGAIADEEQEHLTTLATRVMAAAEXGRALGGGDESGGWRRLRMSCSCCVLARRVDGATAVKLICRRRSGARHGGRHDQLLELELRGVHLVRYPDNPVATVFVVSMADCYQQQLVDVHGRIAMDRPMSEWKKLLN

SEQ ID NO: 109066 - protein, 798 aa, Oryza sativa
  unsure (1)..(798): unsure at all Xaa locations
  Clone ID: PAT_MRT4530_1325C.1.pep
MDSDEKEKKRENKETITKKMEIKRIKQTRENIPGLKNETQKDKDINKQGKIQAQIQVMKEIAGTRKRESEEGGINAGETMRRKFQKTGLEEIKRDIQISENKGNLQMEAGKMSYTNLMQQIIQSPRVTMQTNEEGIEAYTNLLQTPVAFDNSMILTTSRFSPQETDQQDGFYQQQISTTERIYQEFDAIYNNNNMTTWSERSSERDIKELYESKNNHFKRQVNGTTMAMQSNEHPNEEDIQQNSRNENGQINSGQVNEEITEVRNDTEGAQKVQNNCEQSTITASNEEINEVIDKRHIPEVGMEFRSDKEAHGFFNFYAYLVGFSIVNTHHYKTTSKKMNGDETMETFKWVFEAFLTAMGGKHPETIITDQDLAMKSAIEKVFPDTKHTNCLFHIMKKWRERTGNTFSEKKNKDLYNEFYDIVHNCLTRVEFETLWPQMIEKYGLQNIKYLQTMWRTRENYIPLYFKLDFCPFIHSTALSEVTNARFKRGVGPTHSVMSFLKEFEIINDTIFDTEFCKDHQSRTKKPKTLWSSYKIELQASEMYNLRIFKKFQDELQETLNQEIAVIEHGKTYEVYAAENLTKQEFRQRKYVIITDLAQXNYVCICAKXHILKVMLFLKISKIPEKYIIERWKKKERKCIARIEKPASDENSSVLRFNVLSRRMADMASKASKSKDTYLYMLDQMDRLDGNLDLLIEQAPENLQQNNQGSTTKESNGEXETEETMNEQEDIEDPNLANTKGKKISXNKSNCREAXRDSKKALHTMWKNKSYNRDMPIDGRHIHYAKKNEISIFRKEVS

SEQ ID NO: 109067 - protein, 147 aa, Oryza sativa
  Clone ID: PAT_MRT4530_13260C.1.pep
HSFGEDEYARIGGDCDKVIQWNGYRVFGVLAMSRSIGDRYLKPWIIPVPEVTIVSRAKDDECLILASDGLWDVMSNEEVCEIARKRILLWHKKNSTSSSSAPRVGDSADSAAQAAAECLSKLALQKGSKDNITVVVVDLKAQRKFKS

SEQ ID NO: 109068 - protein, 42 aa, Oryza sativa
  Clone ID: PAT_MRT4530_13261C.1.pep
GQAPTVSPCPPPPVDSKRLGSDVGFPNGLQSKPRGEWRRLRA

SEQ ID NO: 109069 - protein, 59 aa, Oryza sativa
  Clone ID: PAT_MRT4530_13262C.1.pep
HSATSFLRWTDRSNRHRRSGRTLWIRSTEPMVPWEASTENDSATLRRLWASAKTGQTPA

SEQ ID NO: 109070 - protein, 99 aa, Oryza sativa
  Clone ID: PAT_MRT4530_13263C.1.pep
MGEWIWGGAACDEEQDRWEITNPSHWEWRMRGQCPYTTITVITVAFAVDVGGSRYGAVLVGRWWATKVEYVRAAVRLSIEPYSLRTSAQRCSTCLCGST

SEQ ID NO: 109071 - protein, 50 aa, Oryza sativa
  Clone ID: PAT_MRT4530_13264C.1.pep
GTHKCCQQQGSRIQWLEYTVNSLMHKLNSYVSKEMLLWFLEIDILLLSRS

SEQ ID NO: 109072 - protein, 148 aa, Oryza sativa
  Clone ID: PAT_MRT4530_13265C.1.pep
CELSAIGRTPRAATKPNQSTPPPRHGFPVPVLLTSPPAASTPAPASPAPAAPVPIPLPPHLSPHDPSLLLSLDVFHSKPSDSPKPLVGSARSPLRDLLFSTNPNPSPDSPASALITLPLLRPSGRPQGKLRIRLALRERSPSPPEPQY

SEQ ID NO: 109073 - protein, 55 aa, Oryza sativa
  Clone ID: PAT_MRT4530_13266C.1.pep
CHMQQLSTFYCFGLFVGMLEKVFFSVSLDYQFRSRPGPLVEFVSKSKGYYPFPVR

SEQ ID NO: 109074 - protein, 327 aa, Oryza sativa
  Clone ID: PAT_MRT4530_13267C.1.pep
MASPSPSSSPLHPQHQHQHPLPPHPQPQYQSPPPPMPPPPPAAPLKAIDLEVTVVSGKHLKNVNWRRGDLRAYVVAYLDPSRRAATRPDDVGGCKPAWNERVVLPLPPHLSPHDPSLLLSLDVFHSKPSDSPKPLVGSARSPLRDLLFSTNPNPSPDSPASALITLPLLRPSGRPQGKLRIRLALRERSPPPPEPQYPPPSSSPYYFPPPPPPAYSAPPPPQYGSEQYYRSGGYYSAPPPPPQYEYTAGPSAPVEYNRQYDPRAGSGSGNGRYGVGTGIAVGTVTGALGGLAIDEGVKYKEEKSADRVEDKVVPAGRDDDSRGYREY

SEQ ID NO: 109075 - protein, 77 aa, Oryza sativa
  Clone ID: PAT_MRT4530_13268C.1.pep
MRLYQELPQRLSAEEVEADTAVLTLAEDKNTTCLSRVKATVLVEDGVPREPHDMLLEMRENVEGHDVIGEQRPKRAP

SEQ ID NO: 109076 - protein, 1350 aa, Oryza sativa
  unsure (1)..(1350): unsure at all Xaa locations
  Clone ID: PAT_MRT4530_13269C.1.pep
MTSSGKRADGFLRRFRRRRLLAFLRREHLYATLDALGGETRLFLNARTLQTMLADCRWEEARRDSVEWQFLRIQAALIVKELVINTPEFSHLLRLPRYPVNPECMMPVWFGCCRKHQRKIIGRMPASLLAHCFLPKERKFTAFNSFLHAGVLHQRNKVLARVLEVKEHSDSCKKPSFAPVEVYFSCFSLLASLFSLFSSHIQSGPFSVSVRLDNTAPGRRGYRPRPTVTHSYHLRNRGLLAVAPNILVSASSDPSSCRASTSTMAANNGDSDDIWRQRFEEVLACLDAAIVGDRPPRYHKLDFPKFDGHGDPLPFLNRCEQFFRGQRTPEDDKLWLASYHHLDGAQQWYTRLEQDHGAPSWRRFSDLLNLSYGPPLRSAPLGELAACRRTTTVDDYSERFLDLLARAGYLSEDPQVQLYTVGLQEPLSLDVQMQNPTTLEVAMSLARSYERRAISVHHDRLRAAAYPSPTTSSXTRQLLPGSAPVAVRPYRHPARHKDELECQCRXGLIRRSSSAFSSPVLLVKKADGSWRFCVDYRALNERTIKDKYPIPVVDELLDEMHGATIFSKLDLRSGYHQVRMHPDDIDKTAFRTHDGLYEFLVMPFGLTNAPTTFQSLMNDVLRPFLRRFVLVFFDDILIYSPSWTAHLQHVRTVFMALRAAKLFVKRSKCSFGDASVAYLXHIVPRHGVAMDASKIQAVVDWPRPHSPKDLRGFLXDGFTWSPSADDAFQRLKLALTTAPVLTLPDFTTAFTVECDASGTGFGAVLHQGAGPIAYFSRPVAARYQALAAYERELIGLVQAVRHWRPYLWGRQFLVKTDHYSLKYLLDQRLSTIPQHHWVSKLLGFDFTVEYKPGKQNAAADALSRRAPPEGQLLALSMPTFDLLHELRSSSASDPALVTLRDEINAGTCGAPWALVDGFVTFKRRIYVPPESPWLSAIVAAAHDEGHEGXQKTLHRLRRDFHTPHDRRLVSDFVRGCLVCQRNKTEHLHPAGLLLPLPVPAAVWQDXVILTVVDKISKYAHFIALAHLYTAETVVRAFFTDIVRLHGVPTSIVSDRDTVFPSAFWTALFAATGTKLHRSSAFHPQSDGQSEAANKTISMYPRCLTGDRPRHWLRWLPWAEYVYNTSFHAALRTTPFKLVYGRDPPSIRAYDASETRVVAVAQSMEERDAFLADVRVRLEQAQQYAKRYYDKHLWLRVRHRVPASLPDATKGKLRPRFYGPYQVLAVINNVAYRLALPPGTRLHDVFMGPPVRLSFPPSSRYLPPLPSSAEQTDRRERRGVGAPVAGGRRYWRRVVFPGVAHLGSAVAGQGSRFAGGGRGRHGDDFVKEKGTAPASVRDWLVMAAVHTRRRQ

SEQ ID NO: 109077 - protein, 55 aa, Oryza sativa
  Clone ID: PAT_MRT4530_1326C.1.pep
NFETFPVFKEIIPYIRVFTHSFHAPMICLIPCRPLSFIFYLVCVQSFIFLSPADS

SEQ ID NO: 109078 - protein, 58 aa, Oryza sativa
  Clone ID: PAT_MRT4530_13270C.1.pep
MEVTLPSITNSKFKSTRVVQITSSLSITGAQGWPATAGCSGSGDHVGGVGAGAPVQRI

SEQ ID NO: 109079 - protein, 566 aa, Oryza sativa
  Clone ID: PAT_MRT4530_13271C.1.pep
MREEKKIKEEREERGRKKGSACVMTSSGKRADGFLRRFRRRRLLAFLRREHLYATLDALGGETRLFLNARTLQTMLADCRWEEARRYVGRFLPRRQIGVEARAVLRLIAYLSAVDDVAQGRRPGSEFAGDHLEREFEADATSSNTMVCADFVRKFSRKRSSFPGRWDSVEWQFLRIQAALIVKELVINTPEFSHLLRLPRYPVLPEASEKDHRSDAGISSSPLFSSKGEVSFTKETSHIQSGPFSVSVRLDNTAPGRRGYRPRPTVTHSYHLRNRGLLAVAPNILVSASSDPSSCRASTSTMAANNGDSDDIWRQRFEEVLACLDAAIVGDRPPRYHKLDFPKFDGHGDPLPFLNRCEQFFRGQRTPEDDKLWLASYHHLDGAQQWYTRLEQDHGAPSWRRFSDLLNLSYGPPLRSAPLGELAACRRTTTVDDYSERFLDLLARAGYLSEDPQVQLYTVGLQEPLSLDVQMQNPTTLEVAMSLARSYERRAISVHHDRLRAAAYPSPTTSSAPARSGIGHRSHRCQASGRATCAGTRCPPAVARRDGRTPPTRALLQLRRAVLTGP

SEQ ID NO: 109080 - protein, 203 aa, Oryza sativa
  Clone ID: PAT_MRT4530_13272C.1.pep
RDPPSIRAYDASETRVVAVAQSMEERDAFLADVRVRLEQAQQYAKRYYDKHLWLRVRHRVPASLPDATKGKLRPRFYGPYQVLAVINNVAYRLALPPGTRLHDVFMGPPVRLSFPPSSRYLPPLPSSAEQTDRRERRGVGAPVAGGRRYWRRVVFPGVAHLGSAVAGQGSERGGRNGEHNCMNRRERERERERAPVTLDSKGK

SEQ ID NO: 109081 - protein, 81 aa, Oryza sativa
  Clone ID: PAT_MRT4530_13273C.1.pep
MGLGIRAREGDLGGSRKENIVSGVGPVVRVSLAEAGGHVYGDPGEVGPVWHSPTREGGSSSNEEERDTGNLASGPGFTAGQ

SEQ ID NO: 109082 - protein, 84 aa, Oryza sativa
  Clone ID: PAT_MRT4530_13274C.1.pep
LRDGTGNALHKRAGARLAISCHSYYTLVIGTVMHVDEADAGVYDIHTRRRDELELFLNGMDRLAIAHVALALVDTHMQLDHLIT

SEQ ID NO: 109083 - protein, 526 aa, Oryza sativa
  Clone ID: PAT_MRT4530_13275C.1.pep
MEAADLSAAAEALALQVDLLQLPPEIPAPGAPALSVVLDRLFAHWLTLPDTVALVGCLVQKAKASGGGGGGGGGGGAAGAAVGPGSAMLPSMMMQGGAAVPPLSPRSPRLSRRPSGVGTGGQSNRSASPLRPATARAVKEVIPQFYFQDGRPPTYELKKQCIAIVDQLFAGHSNGLRIQEFRLVTRELCKLPSFFTTVLFGKIDKENTGFVTRDAFIDFWLNSNMVTMDVATQVFIILKQKNQDFLTKHCLPAETVVYRIFYCLSRIGGGHLILRELKRGNLIDALRHADDEEDINKVLKYFSYEHFYVIYCKFWELDTDHDFFIDKENLIKYGNHALTYRIVDRIFSEVPRKFTSKVEGKMGYEDFVHFILSEEDKSSEPSQEYWFRCIDVDGNGILTHNELQFFFEEQLHRMECMAQEPVLFEDILCQLIDMIGPENETFFTLKDFRRCKLSGHFFNILFNLNKFMAFEARDPFLIRQMREEPSLTDWDRFARREYIRLAMEEDGEDASNASGDVWDESLESPF

SEQ ID NO: 109084 - protein, 61 aa, Oryza sativa
  Clone ID: PAT_MRT4530_13276C.1.pep
VSPRLFLFWAIAAWVVVRSPRSRVSAMPFVLVHWSPASSSSSTYALHHVFGFIPDLPYLAP

SEQ ID NO: 109085 - protein, 977 aa, Oryza sativa
  Clone ID: PAT_MRT4530_13277C.1.pep
METCKGTIVQRYKMKLVADVPGTCFSKDGEVQQVLDGTAQSGGKSAADVSGDKGDGSQGVQGEDLSPDADCSANCSQCAISLADSSSIGFCTCCTIIGTRTSDKQPRQHAANQVVLEHLVHNVQPDQTVIPQVIAEHLGVPQQRPWADMIADVMREQFGLKPKDTGNLYRHPYPEWFEMPGPTRQPRGAPEGGHAGTADGRRRARAPMVAGGGHRYGGAAAERGEGRGKRIGGPRLTPGRRRRRERRPERRKAAARLGWTGSTELRRSACETEGWTRSARMRRSRKEAAPRGEGRSGRGIAGRGGLGAGGPGRKGMTGGPHPRGIMKKMMAVLIIIGVVSTLDYAGMKEVEQEINHWLKKTKPKQEWRVKNQVPTAEEATVDEAKRLTKGKSVVTASVNMVFTLPAEFGAKQADVDEVEEASAKLVLSLEQAVFEKPEGIENRHVKPLYVNGYVNGKPMSKMMVNGGAAVNLMPYATFRKLGRNAEDLIKTNMVLKNFGGNPSETKGVLNVELTAGSKTIPTTFFVIDGKGSYNLLLGSDWIHANCCIPSTMHQCLIQWQGDKIEIVPADSRLKTESPSYYFEGILEVIKKNGKVRVCIDFRDLNKATPKDEYPMPVTDQLVDAASGLFEWVVMTFGLKSAGATFQRAMNYIYHDVIGWLVEVYIDDVVVKSKEIEDHIADLGKVFERTRRYGLKMNPMKCAFGVSAGQFLGFLVHERGIEITQRSVNAIKNIQPPENKIELQEMIGKINFVGRNKIFRCGEVVLVLVFFLYKPYATNNQAEYEVVVKGLQLLKEVEADAIEIMGDSLLVISQLAGEYECKNNTLIVYNEKCRELMKEFRLVTLKHVSREQNIEANDLAQGASGYKPMIKDVKVPPYKLVYGHEAVLPWEVRVGSRRTELQNDLTADEYYNLMANEREDLVQSRLRALAKVTKDKERVARHYNKKVVPKSFSEEELELTCCKDSMEKFMDEHLMENI

SEQ ID NO: 109086 - protein, 913 aa, Oryza sativa
  Clone ID: PAT_MRT4530_13278C.1.pep
MEKYNKSRMVRLNQVIKVQQMVLKGFKVMVLKELKVMVLRDFNSSHNIVDKNVNRLIQDQVAAMFLPAQPTVDPIQQQPIQQTPPSWADLEKHFHSYFYSGVHEMKLSDLTATAEWVRSKKVIPCQWVKNSGKEERQQIQEAIEGGKIKFDDSKRPMKVDGNPFPVNMVHTAGRTADEGRARGFQVNSARIINKYQKKYDKQRERHYEEDDGSFNPHWGCEFFRFCWNEGMRLPSIEDCPGCSYVTESSSRSYNRGNRLRQIRVPVDQRLGPVNQDRGQEDNEDRKTQWCPSGIFTKNQKRRVQMLRNRERFQEVEQEINHWLKETKPKQEWRVKNQVPTADEATTDEAKRLAKGKSVVTASVNMMESPSFYFEGVVEGSNVYTKDTVDDLNDKQGQGFMSADDLEDIDIGPVPVIKKNGKVRVCIDFRDLNKATPKDEYPMPVADQLVDAASGHKILSFMDGNAGYNQIFMAEEDIHKTDFHGAIGLFEWVVMTFGLKSAGATYQRAMNYIYHDLIGWLVEVYIDDVVVKSKEIEDHIADLRKVFERTRKYDLKMNPTKCAFGVSAGQFLGFLVHERGIEVTQRSVNAIKKIQPPENKTELLRHYLLSNECTVICKADVVKYMLSAPFLKGRVEKWIFSLTEFDLRYESPKAVRGQAIADFIVDHRDDSIGSVEVVLWTLFFDGSVCTHGCGIGLVIISPRGASFEFAYTIKPYATNNQAEYEAVLKGLQLLKEVEANAIEIMGDSLLVISQLVGEYECKNDILMIYNEKCRELMKEFRLVTLRHVSREHNIEANDLAQGASGYKPMIKDVKIEVAALTFDDWRYDVHHYLQNPSQSASQKLRYKALKYTLLDDELYYRTIDGVLLKCLSADQAKVAISEVHEEICGTHQSAHKMKWLLRRAGYFWPTIVTP

SEQ ID NO: 109087 - protein, 294 aa, Oryza sativa
  Clone ID: PAT_MRT4530_13279C.1.pep
MVAGGDWSSPPAEQPKCSPFFLLQEPICFHHGNALEVFVFLGPPSSDQHLIYIMLKPALAELAGLDVITLVKVIKSRVETVRQNKEDCELLAERADMILDLLRRVQASKVIEDPDMWKPTEGLKSTLCRAGAIVKSCQEEWSYAYRFCKGGRIARELRKVLKDLKFYILHLIGMITIINHDQNTRYYYIPETDVVKPQDATASNAGKPVALEETGLKKFTLSELEVATDNFSLEKQIGIGAFSIVYKAWELWRGGNLMEFIDPSLRGETHSAAEIQGWVQIALLCVQRVEIIST

SEQ ID NO: 109088 - protein, 164 aa, Oryza sativa
  Clone ID: PAT_MRT4530_1327C.1.pep
SSSASTPRPASSAPRRRAGGGAASSRTPRSSTPSARSTARTASPGCTAPSTPPTGARCPAATSSSSRPRRSPPVTAVASPSTSSLTAAATPGSCSTAAAASSSSPRSDHDSAAWRRPTAPRSSSTRAPPNSPSRCSRRTSGRPMTSTPSVSSATATTVLCVSSA

SEQ ID NO: 109089 - protein, 433 aa, Oryza sativa
  Clone ID: PAT_MRT4530_13280C.1.pep
MDISRTNEGYTSCGPVVEMSWHRAGVLLLGAQPWLPVSGILAVARVGFVLLSMARMGWELCHVFCPYAVVRSVNAIKKIQPPKNKTALQEMIGKINFVRRFISNLSGRLEPFTPLLRLKADQKFTWGAEQQKALDSIKEYLSSPPVLIPPQKLRHYLLSNECTVICKADVVKYMLSAPISKGRVGKWIFSLTEFDLRYESPKAIKGQAIADFIVDHRDNSIGSVEIVPWTLFFDGSVCTHGCGIGLVIISARGASFEFAYTIKPYTTNNQAEYEAVLKGLQLLKEVEADVVEIMDDSLLVISQLAGEYECKNDTLMVYNEKCRELLRGFQLVISKHVSREQNVEANDLAQGASRYKPMIKDVRVEVATLSANDWRYDVHHYLQNPSQSASRKLRYKALRHTLLDDELYYRTIDGFLLKCLSADQTQVAIGDGT

SEQ ID NO: 109090 - protein, 68 aa, Oryza sativa
  Clone ID: PAT_MRT4530_13281C.1.pep
AHCHLGHSGQHQACQARLAWRTIQIFFSFLCLCLRCSVGQCLGTFRLSILRRWRYCQYRTTFCCELPV

SEQ ID NO: 109091 - protein, 1351 aa, Oryza sativa
  Clone ID: PAT_MRT4530_13282C.1.pep
MATDLSQSLDLRNLYWHPYPEWFERVPLPNRFKVLDFSKFSAQDSVSTYEHVSRFLAQCDEASAVDALRVRLFPLSLSGSAFTWFSSLSYGSINSWADLEKQFHSYFYSGVHEMKLSDLTAIRQRHDEPVQDYIQRFREMRNKCYSLSLTDAQLADLVFQGMIALIKEKFSSQDFDSLSHLAQKVTLHEQRFAEARKNFKKVSHICPYIYGSDDDDDDDSTVAAAEWVRSKKVIPCQWVKSSGKEERQQIQAAIEDGKIKFDYSKKPMRVDGNPFPVNMVHTAGRTADGGKARGFQVNSAKIINKYQRKYGKQQQEKYYGEDDGGFDPHWGCEFFRFCWNEGMRLPSIEDCPGCSNVAESSNRSYNRNNRLRQTRKAKPRQEWRVKKLAVVADEPEADEEKRLAKGKSVVTASINMVFTLPAKFGAKQADVDEVEEASARLVLSPEQAVFEKPEGTENRHLKPLYINGYVNGKPMSKMMVDGGASVNLMPYATFRKLGRNVEDLIKTNMVLKDFSGNPSETKEMDGLDCLSGKVWEGDFLKVSDCDIQPLKMESPSYYFEGVVEGSNVYTKDTVDDLDDKTKLIELLKEFRDCFVWEYYKMPGLSRSIVEHRLPIKPGVRPHQQPPRRCKANMLEPVKAEIKRLYYACFIRPYRYAEWVSSIVPVIKKNGKVRVCIGFRDLNKATQKDEYPMPVADQLVDAASGHKILSFMDGNAGYNQIFMAEEDIHKTAFRCPGAIVLFEWVVMTFGLKSAGATYQRAMNYIYHDLISWLVEVYIDDVVVKSKEIEDHIADLKKVFERTRKYGLKMNPTKCAFGVSAGQFLGFLVHERGIEITQRSVNAIKKIQPLENKTELLILLEEHQKALDSIKEYLSSPPVLIPPQKGIPFRLYLSAGRVGKWIFSLTEFDLRYESPKAVKGQAIADFIVDHRDDSIGLVEVVPWTLFFDGSVCTHGCGIGLVIISPRGASFEFAYTIKPYATNNQAEYEAVLKGLQLLKEVEADAVEIMGDSLLVVSQLVGEYECKNDTLMVYNEKCQELMKEFRLVTLKHVSREQNVEANDLAKGASGYKPMMKYVKIEVATLTADDWRYDVHHYLQNPSQSASRKLRYRALKYTLLDDELYYRTIDGVLLKCLNADQAKVAIGEFADSMGIKLLNSSPYYAQANGQAEASNKSLIKLIKRKISDYPRQWHTRLAEALWSYRMACHGSIQVPPYKLVSGHEAVLPWEVRIGSRRTELQNDLTADEYYNLMADEREDLVQLRLRALAKATKDKERVVVPKSFSEGELVWKLILPIGTRDNKFSKWSPNWEAPFQIYKVVSKGAYMLQGLDGDVYGRALNGKYLKKYYPSVWVNA

SEQ ID NO: 109092 - protein, 118 aa, Oryza sativa
  Clone ID: PAT_MRT4530_13283C.1.pep
MPSRRCTHSPKGECAAVEWPCPGAPPPSSPRGGIGYGRRRQSTTRSRRQRPAAAVDLPARAGDGQRRRRTPALVGDGGGLPRASALACGGGRSSRARRRRPAAAADSRAVSVTTSCGE

SEQ ID NO: 109093 - protein, 62 aa, Oryza sativa
  Clone ID: PAT_MRT4530_13284C.1.pep
STISSECGSILSSECCWGASYIWYQPSVLLCTLPYDLSCTHLHNHPNRIVVMRLNIISDIII

SEQ ID NO: 109094 - protein, 344 aa, Oryza sativa
  Clone ID: PAT_MRT4530_13285C.1.pep
MAGATAATPMDIDAAAPPPGAAAKGKAPLSSTPGGRAAPWVEKYRPQSLGDVAAHRDIVDTIDRLTNENRLPHLLLYGPPGTGKTSTILAVARKLYGSQYGNMILELNASDERGIDVVRQQIQDFASARSLSFGAKQSVKMVLLDEADAMTKDAQFALRRATSSNLPHLTVIEKHTRSTRFALICNHVNKIIPALQSRCTRFRFAPLDGTHVRERLKHIIQSEGLDVDDGGLTALVRLSNGDMRKALNILQSTHMASKQITEEAVYLCTGNPMPKDIEQIAYWLLNESFSTSFKCISDMKMRKGLALVDIIREMPSDVRIKLINDLADIEYVLFSAVKLITCQI

SEQ ID NO: 109095 - protein, 1005 aa, Oryza sativa
  Clone ID: PAT_MRT4530_13286C.1.pep
METRKGTVVQKYKVVPRMGRYNKSRLAQLNQVVKVLHMGSGDKGDGSQGVQGEDLGPDDQSVIPQVIPEHLVRNIQPNFQNYQGGNLNYQYQPPSPQVQYQQGGSAQSQFAPQYNQFEPMPQQAQGLPQQRPWADMIADVMREQFGLKPKDTRNLYWHPYPEWFERVQLPKRYKVPDFSKFSGQDNVSTYGHVSRFLAQCGEASAVDALRRFAEARKSFKKINHVYPYIDGSDDDDDDDPEVAAAEWVRSKKVILCQWVKSFGKEERYDFDVTKADKIFDLLLREKQIQFPAGHIIPSAEELGKRRGSMISNRRGIMKKMMAVLILNGAVSFSDSVGMKKAKPRQEWRVKNLVAVADEPKADEAKRLAKGKSVAVFEKPEGTENRHLKPLYINGYVNGKPMSKMMVDGGAIVNLMPYATFRKLGRNAKDLIKTNMVLKDFGGNPSETKGVLNVELTVGSKTIPTTFFVINGKGSYSLLHGRDWIHANCCIPSTVHQCLIQWQGDKIEIVPADRSVNVASADLALWEMDGIDCLSGKMESPSYYFEGVVEDSNVYTKDTVDDLDDKQGQGFMSADDLEEIDIGPGDRPRPTFISKNLCPEFRTKLIELLKEFKDCFAWEYYEMPGLSRSIVEHRLPIKPGVKPHQQPPRRCKADMLEPVKAEIKCLYDAGFIHPYRYAEWVSSIVPVIKKNGKVRVCIDFRDLNKATRKDEYPMPVADQLVDAASGHKILSFMDGNAGGIEITLRSVNAIKKIQPPENKTELQDMIGKINFVRRFIYNLSGRLEPFTPLLRLKADQKFTWGAEQQNALDSIKEYLSSPPVLITPQKGIPFRLYLSAGEKSIGSVLIQELEGKDRVVFYLSRRLLDAETRYSPVEKLCLCLYFSCTRLRHYLLSNECTVICKADVVKYMLSAPILKGRVGKWIFSLTEFDLRYESPKAIKGQTIADFIVDHRDDSIGSIDIVPWTLFFDGSVLTHGCGIGLVIISPRGASFEFAYTIKSYATNNQAE

SEQ ID NO: 109096 - protein, 367 aa, Oryza sativa
  unsure (1)..(367): unsure at all Xaa locations
  Clone ID: PAT_MRT4530_13287C.1.pep
MAGATAATPMDIDAAAPPPGAAAKGKAPLSSTPGGRAAPWVEKYRPQSLGDVAAHRDIVDTIDRLTNENRLPHLLIHVPPFHRKTSTKMACARSLYGSRNDHMNLAFNASDMRGSDVVWQXIQDYARALSLSFEARQSVKLVLFDEADAMTKDAQFALRRVIEKHTRSTRFALICNHVNKIIPALQSRCTRFRFAPLDGTHVRERLKHIIQSEGLDVDDGGLTALVRLSNGDMRKALNILQSTHMASKQITEEAVYLCTGNPMPKDIEQIAYWLLNESFSTSFKCILNYQSISDMKMRKGLALVDIIREVTMFVFKIQMPSDVRIKLINDLADIEYRLSFACNDKLQLGALISTFTGARTAMVAAAH

SEQ ID NO: 109097 - protein, 2021 aa, Oryza sativa
  unsure (1)..(2021): unsure at all Xaa locations
  Clone ID: PAT_MRT4530_13288C.1.pep
LQDQINWHAHRPKGKFWTCTGVKQISQASCFXTSTRFWHTQXDRLEVRTAIAFXLMAEKPPASPSSAGKEGPPKSRILKLGGSEVHEGNIVPVTVDKLTPEQKKEFDVMMQQTQNQFLNSFMETRQGTIVQRYKMKLVADVPGTSSSKDGKVQQDSDGTAQSGDKGVADGSGDKDDGSQGVQGENPNLDGNTAQLQFNNFQDRIDYAVQHALINQSGVLVNTLSNMVKSMVDGSIAEYQATGPVYLPGGVFPNYRPLITNNQSAAQPIAPNAPSAQPIAPVSIPAPAAPSSAPGQLINPRLLVREQPQHAGQNVNRLTQDQVATMFLPNPLVVDPAXNSRFSRRHQGNRLFSWVEDTXXSAEAACHNSDCPXAFGSSCATRFADVMREQFGLKRKDAGNLYRHPYPEWFERVQLPNRYKVPDFSKFSGQDSVSTYEHVSRFLAQCGEASATDALRVRLFPLSLSGSAFTWFSSLPYNSINSWADLEKQFHSYFYSGXHEMKLSDLTAIKQRHDEPVXDYIQRFREMRNKCYSLSLTDAQLADLAFQGMIAPIREKFSSQDFDSLSHLAQKVTLHEQRFAEAKKNFKKVNHVCPYIYGSDDDDDDSEVAAAEWVRSKKVIPCQWVKSSGKEERYDFDITKDDKIFDLLLREKQIQLPAGHTIPSVEELGKRRYCKWHNSGSHFTNDCKVFRQQMQTAIEGGKIKFDDSKRSMKVDGNPFPVNMIHTSGRTADGGKARGFXVNSTKIINKYQKKYDKQQQEGCYDEDNGMRLPSIEDCPRCSNVAESSSRSYNRSNRLRQARVPVHXRLGPVNQDRDQGGDEDRKNQWCPSGIFTKNQKRRKTKPRQEWRVKNQATTADEVKVDEARXLAKGKSVLTASVNMIFTLPAEFGANQADIDEIEEASARLVLSPEQAVFEKPEGTKNRHLKPLYINGYVNGKPMSKMMVDGGAAVNLMPYATFRKLGRNADDLIKTNMVLKDFGGNPLETKGVLNVELTVGSKTIPTTFFVIDGRGSYSLLLGRDWIHANCCIPSTMHQCLIQWQGDKIEIVPADSQLKMENPNYYFEGVVEGSNVYTKDTVDDLDDKQGQGFMSADDLEEIDIGPEFRTKLIELLKEFRDCFAWEYYEMPGLSRSIVEHRLPIKPGVRPHQQPPRRCKADMLEPVKAEIKRLYDAGFIRPYRYAEWVSSIVPVIKKNDLNKATPKDEYPMLVADQXVDAASGHKILSFMDGNVGYNQIFMAEEDIHKTAFRCPGAIGLFEWVVMTFGLKSAGATYQRAMNYIYHDLIGWLVEVYIDDVVVKSKEIEDHIADLRKVFERIRKYGLKMNPTKCAFGISAGQFLGFLVHEKGIEITQRNVDAIKKIXPPENKTELQKMIGKINFVRKFISNLSGRLEPFXTPLLRLKADQKFTWGAEQQKALDSIKEYLNSPLVLIPPQKGIPFRLNLSADEKSIGSVLIQELEGKKRVVFYLSRRLLDAETRYSPVERLCLCLYFLCTRLRHYLLSNECTVICKADVVKYMLSAPILKGRVGKWIFSLTKFDLRYESPKAIKGQAIADFIVDHRDDSIGSVEVVPWTLFFDGSVCTHGCGIGLVIISPRGASFEFAYTIKPYATNNXAEYEAVLKGLRLLKEVEANAIEIMGDSLLVISQLAGEYECKNDTLMVYNEMCRELMKEFWLVTLKHISREQNIEANDLAQGASGYKPMVKDVKVEIATLTADDWRYDVHQYXQNPSQSASQKLRYKALKYTLLDDDLYYRTIDRVLLKCLSADQAKVAIGEVHEGICGTHQSAHKMKCLLRHAGYFWPTMLEDCFKYYKGCQDCQKFGAIQRASASAMNPIIKPWPFRGWGIDMIGMIXHKFILVATDYFTKWVEAIPLKKVDSGDAIQFVQEHIIYRFGIPQTITTDQGSIFVSDEFVQFADNMGIKLLNSSPYYTQANGQAEASNKSLIKLIKKKISDYPRQWHTRLAEALWSYRMACHGSIQVPPYKLVYRHEAVLPWEVRIGSRTTXLLNGKYLKKYYXLSVWVNA

SEQ ID NO: 109098 - protein, 382 aa, Oryza sativa
  Clone ID: PAT_MRT4530_13289C.1.pep
MAGATAATPMDIDAAAPPPGAAAKGKAPLSSTPGGRAAPWVEKYRPQSLGDVAAHRDIVDTIDRLTNENRLPHLLLYGPPGTGKTSTILAVARKLYGSQYGNMILELNASDERGIDVVRQQIQDFASARSLSFGAKQSVKMVLLDEADAMTKDAQFALRRATSSNLPHLTVIEKHTRSTRFALICNHVNKIIPALQSRCTRFRFAPLDGTHVRERLKHIIQSEGLDVDDGGLTALVRLSNGDMRKALNILQSTHMASKQITEEAVYLCTGNPMPKDIEQIAYWLLNESFSTSFKCILNYQSHTPNNYNSWFKHELCNLFFAVSLVKTLSYLLQMPSDVRIKLINDLADIEYRLSFACNDKLQLGALISTFTGARTAMDAAAH

SEQ ID NO: 109099 - protein, 55 aa, Oryza sativa
  Clone ID: PAT_MRT4530_1328C.1.pep
MSIQRVNSKKTLKNRSSGNAQRKRTRLPRGPHSRGPDAAASEDPLFVEVEADVWE

SEQ ID NO: 109100 - protein, 702 aa, Oryza sativa
  unsure (1)..(702): unsure at all Xaa locations
  Clone ID: PAT_MRT4530_13290C.1.pep
MEKYSKFQMVLLNQVIKVLQMVLKGFRVMVLKEFKVMVLRDFKSMVDGSIDEYQATGPVYLPGGQLINPRLLVREQPQHSGQNVNRLTQDQVTAMFLPAQPIVDPIQQQPIQQTPPRQQVVQPIQQTPPRHWADLEKHFYSYFYSGVHEMKLSDLTAIKQRHDEPVQDYIQRFREMRNKCYSLSLTDAQLADLAFQGMIAPIREKFSSQYFDSLSHLAQKVTLHEQRFAEARKNFEKVNHVCPYIYGSDDDDDDSEIAAAEWVRSKKVIPCQWVKSSGKEERYDFDITKADKIFDLLLSEKQIQLPTGHTIPSAEELGKRRYCKWHNSGSHSTNDCKVFRQQIQAAIEGGKIKFDDSKRPMKVDGNPFPVNVVEXFQKKYDKQQERHYEEDDGGFDPHWGCEFFRFCWNEEDEAKAGVAQQAVFEKPEGTENRHLKPLYVNGYVNGKPMSKMMVDGGAAVNLMPYATFRKLGKNAEDLIKTNMVLKDFGGNPSETKGVLNVELTVGSKTIPTTFFVIDGKGSYSLLLGRDWIHANCCIPSTMHQCLIQWQGDKIEIVPADSQLKMESPSYYFEGVVEGSNVCTKDTVDDLDDKQRQGFMSADDLEGIDIGPGDRPRPTFISKNFSPEFRTKLIELLKKFRDWFFREYYEMPGLSRSIVEHRLPIKPGVRPHQQPPRRCKADMLEPVKAEIKRLYDVGFIRPC

SEQ ID NO: 109101 - protein, 1309 aa, Oryza sativa
  Clone ID: PAT_MRT4530_13291C.1.pep
MALLKLRSRSLHNSGSHSTNDCKVFRQQIQAAIEGGKIKFDDSKRPMKVDGNPFPVNMVHTAGRTVDGGRARGFQVNSAKIINKYQKKYDKQLERYYEEDDGGFDPHWGCEFFRFCWNEGMRLPSIQDYPGCSNVAENSSRSFNRSNRLWQARVPAHQRLGPKRRVQRLRNRERFQEVEQEINHRLKKTKPKQEWRVKNQAPIADEATVDEAKRLAKGKSVVTASVNMVFTLPAEFGVKQADVDEVEEESAKLVLSPEQAVFEKPEGTENRHLKPLYINGYVNGKPMSKMMVDGGAAVNLMPYATFRKLGRNAEDLINTNMVLKDFGGNPSETKGVLNVELTVGSKTIPTTFFVIDGKVARQKIEIVPTDSQLKTESPSYYFEGVVEGSNVYTKDTVDDLDDKQGQGFMSADDLEEIDIGPGDRPRPTFISKNLSSEFRTKLIELLKEFIDCFAWEYYEMPGLSRSIVEHRLPIKPGLRPHQQPPKRCKVHMLEPVKAEIQRLYDAGFIRPCRYAEDLNKATPKDEYPMPVADQLVDAASGHKILSFMDGNAGYNQIFMAEEDIHKTAFRCPGAIGLFEWVVMTFGLKSAGATYQRAMNYIYHDLIGWLVEVYIDDVVVKSKEIEDHIVDLRKVFERTRKYGLKMNPTKLEPFTPLLRLKADQKFTWGAEQQKALDSIKEYLSSPPILIPPSKGVTFRLYLSASGKSIGSVLIQELEGKERVVFYLSRQLLDAETIYSPVEKLCLCLYFSCTRFRHYLLSNECTVICKANVVKYMLSAPILKGRVGKWIFSLTEFDLRYESPKAVKGQAIVNFIVDHRDNSIGSVEIVPWTLFFDGSVCTHGCGIGLVRISPWGACFEFAYTIKPYATNNQAEYEAVLKGLQLLKEVEADAIEIMGDSLLVISQLAGEYECKNDTLLVYNEKCQELMEFRLVTLKHVSREQNIEANDLAQGAPGYKPMIKYIRVEVAALTADHWRYDVHQYLQNPSQSASRKLRYNTLKYTLLDDELYYRTIDGVLLKCLSANQAKVAIGEVHEGICGTHQSAHKMKWLLGRAGYFWPTMLEDCFKYYKGCQDCQKFGAIQRAPASALNPIIKPWSFRGWGIDMIDMINPPSTNGQAEASNKSLIKLIKRKISDHPWQWHTRLAEALWSYRMACHGSIQVPPYKLVYGHEAVLPWEVRIGSRRTELQNDLTADEYYNLMADEREDLVQSRLRALAKVTNDKEWVARHYNKKVVPKTFSEGELVWKLILPIGTRDTKFGKWSPNWEGPFQIYKVVSKGAYMLQGLDGEVYGRALNGKYLKKYYPSVWVNA

SEQ ID NO: 109102 - protein, 657 aa, Oryza sativa
  unsure (1)..(657): unsure at all Xaa locations
  Clone ID: PAT_MRT4530_13292C.1.pep
MSKMMVDGGAAVNLMPYATFRKLGRNAEDLIKTNMVLKDFGGNPSETKRNFQCGTDSRQLRHYLLSNECTVICKANVVKYMLSALILNGRVGKWIFSLTKFDLRYESPKATKGQAIADFIVDHCDDSIGSVEVVPWTLFFDGSVCTHGCGIGLVIISPRGACFEFAYTIKPYATNNQAEHEAVLKGLQLLKEVEADAIEIMGDSLLVISQLAGEYECKNDTLMVYNEKCRELMKEFWLVTLKHVSREQNIEANDLTQGASGYKPIIKDIKIEVAALTADDWRYDVHQYLQNPSQSASRKLRYKALKYTLLDDELYYQTIDGVLLKCLSADQAKVAIXTMLEDCFKYYXGCQDCQNFGAIQRAPASAINPIIKPWPFRGWGIDMIGMINPSSSKGHKFILVATDYFTKWVEAIPLKKVDSGDAIQFVQEHIIYRFGIPQTITTDQDSIFVFDEFVQFADSMGIKLLNSSPYYAQANGQAEASNKSLIKLIKRKISDFPRQWHTRLAKAFWSYRMACHGSIQVPPYKLVYGHEAVLPWEVRIGSRRTELQSDLTADEYYNLMADDREDLVQSRLRALAKVTKDKERVAWHYNKKVVPKTFSEGELMWKLILPIGTRDNEFGKWSPNWEGPFQIYKVVSKGAYMLQGLDGEVYGRALNGK

SEQ ID NO: 109103 - protein, 155 aa, Oryza sativa
  unsure (1)..(155): unsure at all Xaa locations
  Clone ID: PAT_MRT4530_13293C.1.pep
MQESSSVQYILQQXMAASGDYRLLQSVRNVYAMGKGGFVLWQMAPDMWYVELPVGGSKVHVGSNEGLIWHHTPWLGAHAAKGPVRLLRRVPASSRSEHLTFSTSPPGPVAARAGEEGRGRRWLGGGVRRWRERSPPRQGRRGRRRPRSPAGREDG

SEQ ID NO: 109104 - protein, 655 aa, Oryza sativa
  Clone ID: PAT_MRT4530_13294C.1.pep
MDIVVGVLLILGLMPMPFEVIMAAADDGGGVFCDNLKFVSATLPNKTSSSPHHYATAAAGQAPDVVYVLALCRGDLNDTACGESVAYTFARLINESCVANYTAGAYYGDCTGVYSFQNFLDPSDATEDEEPFERWNVNNITGDGENVRFIAGLIQQLLSETVERAAGAAGRFATGVVDTGRTFPLVYSLAQCTPDLSAGDCLACLRRLTGMINSTMAVRMGAQIHVTRCYFRYEAYVFYDSKPMLHLTGAPAPAIPKRHKSKLWVIPIVIIPVVAFFCFIVYCGWRRGHRKGIMGLQARRTDNLQGEEELVWDLEGKNPEFSVFEFDQVLEATSNFSEVNKLGEGGFGAVYKGHFPDGIEIAVKRLASHSGQGFIEFKNEVQLIAKLQHRNLVRLLGCCSHEEEKILVYEFLPNKSLDLFIFDENKRALLDWYKRLEIIEGIAHGLLYLHKHSRLSVIHRDLKPSNILLDSEMNPKISDFGLARIFSSNNTEGNTTRRVVGTYGYMAPEYASVGLFSIKSDVFSFGVLFLEIISGKKNSGSHHSGDFINLLGFAWSLWGEGRWLELIDESLVSKYPPAENEIMRCINIALLCVQENAADRPTMSDVVAMLSSKTMVLAEPKHPGYFNVRVANEEQSVLTEPCSVNDMTISAISAR

SEQ ID NO: 109105 - protein, 558 aa, Oryza sativa
  Clone ID: PAT_MRT4530_13295C.1.pep
MGIVKVASCAPTEERAYSCGDEDITQEEKMLLQRFPIHESDDYEHEEVNCELAKSGDQICSVPYGLYDLPELNDILSLETWNLCLTEDDRFRLAAYLPDMDQHDFFVTMKELFSGSDLFFGSPVKSFFHRLNGGFYSPEVSQARELLMIFERRRYYHFLKSHHDGMIFKFASMDKVGGRCGASTGLQGKVNSWNDRRHEDPLTGVDISGSPFNRSLSIANEVKDATLPPLKRTKRMDGTVTTHCSAKRKGIVYRDKSMEMSSLKSPVFHVPGELTTCIRLPKGVLKIKTDCASLIDHNEGIHRTPEPMLADQLGIQVSSLPCASALDVHGFAMNSAYYYHINTSKSTLRNLHVRPYQREGTLDTYPHSVESPFGVQIMVPEELKRGYYSRMPNSFHQSTTKHSPEYCNEAPHEKNLLKNFGQQNAVIPESSPDPFTRNTDCHQTNGYMTHGLKTAESISEVLTLGTDTAGPYKHLLEQSETMRYPEGLKLKTPASQSVTEVEEGHRYPFTYKRRKLQKRLDLVDPVKKSTMVDSEPLSALASVANVKIKGNQALKIGS

SEQ ID NO: 109106 - protein, 217 aa, Oryza sativa
  Clone ID: PAT_MRT4530_13296C.1.pep
MELARVETLVTTHYLVRHFRWQLCCGLRGGEHGFPSPIRGETLGKEFFLARSAAASLSRATNVGHRRASSSGETRHRRDSSGETPPALPPYHAMEIVDAHECRRKTLPRYLLLGQTTRYYYRKAFCMRAKGIFAYDCPKRKGEKGGATQGSRAAPAAAAVKRGGGAGGGARGSRATPAAAAPPLEAPVLATEEHEDDVVVVVAVVATSSALASSARQ

SEQ ID NO: 109107 - protein, 93 aa, Oryza sativa
  Clone ID: PAT_MRT4530_13297C.1.pep
SSGAPPPHQHCGATRRSTQRTPSNLARGRPRYALHTSTRGKAYGGTSPRPCSKDTGPHSTSDTCAPRPQAQTHHTVCRVESTREGPPPVQGTQ

SEQ ID NO: 109108 - protein, 96 aa, Oryza sativa
  Clone ID: PAT_MRT4530_13298C.1.pep
MGHHHKNDDKAAAAAGGDHRKEEKHHKHMEQLAKLGAVAAGAYAMHEKHKAKKEPENARSHRVKEEIAATIAAGSVGLAIHEHHKKKEAKKHGHHH

SEQ ID NO: 109109 - protein, 98 aa, Oryza sativa
  Clone ID: PAT_MRT4530_13299C.1.pep
TVKETVGDNFSANIKSSVPGSVQKTIYMDGSSHPTHPVSKGVAKVELVPTVKSEIGIGGSPSPIIVCFSTTKFCRFFPEPKRIVDRNFNLLSLYDPKG

SEQ ID NO: 109110 - protein, 134 aa, Oryza sativa
  Clone ID: PAT_MRT4530_1329C.1.pep
MAMYAEVTNYLGTHSSTTLPEGRCHDMACSQAIPVHVIFGELAASEAATTMVSCCRVGLRSSEALVGSELMGSTYMEQASLHVLCTTFIILSFSREQRQKIPFCRNLIKGKRKKFTIPGMGFQVQKQNKTIKGA

SEQ ID NO: 109111 - protein, 60 aa, Oryza sativa
  Clone ID: PAT_MRT4530_132C.1.pep
MMVVRMCCVFRVVVVVDGDHGWFQVGSCSYSGGVVLAKRIGTTDSGESGAAWEQTGGGSM

SEQ ID NO: 109112 - protein, 126 aa, Oryza sativa
  Clone ID: PAT_MRT4530_13300C.1.pep
MLLDPDLLATFCGAVDTYAWVLEEAKHHDDDNVVVGLGLRRGWLLLLLLAQSQPTISLLSHFFCSCYFGRHSDIGISEDSVGDGASRDELRATGPGRRVAALVLPQLFVDGRYSGSRRGGHAPPLP

SEQ ID NO: 109113 - protein, 112 aa, Oryza sativa
  Clone ID: PAT_MRT4530_13301C.1.pep
SNSKSPSFCPDSSAAAFRQRRQRRRSPKRRLPRPTPATPPPNNHPAVAATQNWSRSSPRIRSQANPSRWPPPLLLLLLRLPTAAEMAGAEHRATPVAYGWLSIPEVASPEIG

SEQ ID NO: 109114 - protein, 84 aa, Oryza sativa
  Clone ID: PAT_MRT4530_13302C.1.pep
MAANNPTLGTLTIYRSLTVITPPVEIEPIVPLRYSDKPPRNPRKFWLGMPREDKELKSTMTAIASSRTRRPSQPKENSRFICER

SEQ ID NO: 109115 - protein, 124 aa, Oryza sativa
  unsure (1)..(124): unsure at all Xaa locations
  Clone ID: PAT_MRT4530_13303C.1.pep
TWRGSGQLDPKLXRGQPPPTWIXGAAAAPPWAXPPSGGATWVWGRPDPKLGEGSSRNTPGSTPLGGSHLGGGSRRDTLGXPPRGEPRGFEGGLLPXLGGGSRRSTPGLIPLGGSHVGLTAASSL

SEQ ID NO: 109116 - protein, 147 aa, Oryza sativa
  Clone ID: PAT_MRT4530_13304C.1.pep
VFLLEKAEELMRGGLHPSELIIAYTKAINKTIEILEDLDEKGSQNMDERNTEDVALRMRSADACKQSGQEDMLSPLAADACNQVCPKNPANFNDDNARLAKLLGGGLHNSSVGRELDLKNDAGGSIKKTDKAKTALSAGGVDTSAPE

SEQ ID NO: 109117 - protein, 110 aa, Oryza sativa
  unsure (1)..(110): unsure at all Xaa locations
  Clone ID: PAT_MRT4530_13305C.1.pep
RTRGRTRGRTRGRTRGRAQGGGPVGGGGAAAVTVREAQLLLRGHHRRLLPPPAWLARLAGIHGDIYASPRDHICASLHNWALPIADPLFKTXLQLQRMHMLWFCTCDIWH

SEQ ID NO: 109118 - protein, 184 aa, Oryza sativa
  Clone ID: PAT_MRT4530_13306C.1.pep
MEMESPRSPEAEIGHRVEDLWEVAEPQLSPSEKLNSCFEDITVASFHRPLGSQDALKKNLSPVRKRRTFLDFLILYANMSLAGIHGDIYASPRDHICASLHNWALPIADPLFKTRFYSFVCQPCLQFAVAEDAYALVLQWRCMHKWACRSYNKDMIWWSTEGTIIQCCLQTVLFFTPGVWLDII

SEQ ID NO: 109119 - protein, 101 aa, Oryza sativa
  Clone ID: PAT_MRT4530_13307C.1.pep
SRRRRIRPRRGLAAADPASPRPGYGGSCLPAAQRRRIRPPRGPPPAPERHRSHAREPPPRRLPPPSLACLPSLPRTRLASSSPRQNRRCRLWGGRSASEDP

SEQ ID NO: 109120 - protein, 188 aa, Oryza sativa
  unsure (1)..(188): unsure at all Xaa locations
  Clone ID: PAT_MRT4530_13308C.1.pep
MYRSNPGAKCGVLTEEIEISKLSAGLGDQLNKQEVSVSQEQALVVWQTEGISSQPVDDPDSQEEGEDCQLEALMDWDLQKGFVNPIMEDDEEGKCDIPTESDIEKMRAEEDELEDDNSSKQSPSXGGGEVFQEVKKKKLRKEILPVKRQSLRVKDKDVPLRLLLLVTLFWGVMNLKPWKLRLFSSKQN

SEQ ID NO: 109121 - protein, 164 aa, Oryza sativa
  Clone ID: PAT_MRT4530_13309C.1.pep
DRKVQIELLGNKWIASFRQIITVEEIHELVRLGSLIQDVNLSTIPDDISWKWNESGIYTSKSAYLFQFEGSFASINFSSLWKAPAEPKSRFFGWLVLHQKTPTTQNLLRRHWPCNWICCLCTCAFKDTNHLFNGCPFVRQVWSFVCSWLNLAVVEDLGRLEQLG

SEQ ID NO: 109122 - protein, 88 aa, Oryza sativa
  Clone ID: PAT_MRT4530_1330C.1.pep
MPNSPTGLKKRVKLTGPKACPGLRTWPVPKHVTYKDQGEPETQDKVGFEVDPGLTRIKVSMLFSLKNVGLTRTKEKTGSEADLSPRWA

SEQ ID NO: 109123 - protein, 124 aa, Oryza sativa
  Clone ID: PAT_MRT4530_13310C.1.pep
NNRGLDLQEGSELRGKCIARDSEYVRDVMLNSSSPKTRAARQQPHSWRLTKVGAGAAADRLPSTSGRRAQRGALNQAVEMHVRGRPSSGIHRVDTLHRNKGFYVVLESCMDKHLTRRSPVASMP

SEQ ID NO: 109124 - protein, 463 aa, Oryza sativa
  Clone ID: PAT_MRT4530_13311C.1.pep
LHLLNVGWERKATSRRLVLGGSTTASASSTAATSLASLAAAAASAGGDTPSSSPAPSSSPSGPSLSLYLFPFTAKCHCRPLPPNFVASSKVAAPSSSFLLAPRRSCSSTSPRRRRRPTTATSGSATRAATTCAASSTTASTATSTSTPAARTCRAASLSAGPRSSSPPAARLPGGASSARRRGAAPTSAATTGPSSRSSSRSSCSSSASSPASSPRGHSPANAPAPSSSSRGSSGSPTSASSPSTPPTSSPSTSPSGTSTSGPLACITRATAAASSRMPQLPTNRCRSRSPIDLPIIWHRGWKSWTPTTTTTTSPSSSAPSRRWTSPSSRRTAVSCWPAAGAATTSATRRPTAGSSSPSASTTSTCCSSARGRWTSPARAATSSCWTTAATSYGATTTSRAATIAGWSSGTSTTLRTTISAISTNATRSPTSSKSSTTATTSSPSSALLGATISSGGLSFVLL

SEQ ID NO: 109125 - protein, 323 aa, Oryza sativa
  unsure (1)..(323): unsure at all Xaa locations
  Clone ID: PAT_MRT4530_13312C.1.pep
EITNDLLAPSPPSPPPPGGTYPTTPSYQTSRAACRPEQRTASPPRARGGERSCRSRRSSAATSPRGHSPANAPAPSSSSRGSSGSPTSASSPSTPPTSSPSTSPSGTSTSGPLACITRATAAASSRMPQLPTNRCRSRSPIDLPIIWHRGWKSWTPTTTTTTSPSSSAPSRRWTSPSSRRTAVSCWPAAGAATTSATRRPTAGSSSRHPLSRRNTASTPAFTTTTSTTMRDXTTSASTTSTCCSSARGRWTSPARAATSSCWTTAATSYGATTTSRAATIAGWSSGTSTTLRTTISAISTNATRSPTSSKSSTTATTSSPSSA

SEQ ID NO: 109126 - protein, 49 aa, Oryza sativa
  Clone ID: PAT_MRT4530_13313C.1.pep
EHAASINTQLTIETIIHGRQILATFSFSRESQDRDDKQSSWADTYTTYM

SEQ ID NO: 109127 - protein, 623 aa, Oryza sativa
  unsure (1)..(623): unsure at all Xaa locations
  Clone ID: PAT_MRT4530_13314C.1.pep
MASRSRAVSSGFTKAPTFSVTTASQLHDAIDRLLPRLRGDPSLAPAARALAAAATASLPPSTVLSNRLLHLLSSHPATLPDALALFSSIAAPDICSHNTLISALSRSPRHLPSARELFDRMPQRDHFAWSALVSGYTRHGQPEAALALYRRMQEEPGNDGADNEFTASSALAAAAAARCGRAGRELHCHVVRRGIDAAGGDAVLWSALADMYAKCGRVDDARRVFDRMPVRDAVSWTAMVERYFDGGRGGEGFRLFLHMXGPEFAVESFGRQVHGRMAKSGTGXLCFAESALLRMYSKCGDMGSAVRVFEAMAKPDLVSWTAVISGYAQNGQPEEALRYFDMFLRSGIKPDHVTFVGVLSACAHAGLVDKGLEIFHSIKEQYCIEHTADHYACVIDLLSRSGQFERAEKMIGNMAVKPNKFLWASLLGGCRIHKNVGLARRAAEALFEIEPENPATYVTLANIYASVGLFDEVEDVRRIMESKGITKMPASSWIEVGRRVHVFLVGDKSHPKADEIYALLKKLYVKMVEEGYVADIEFVLHDVEDEQKEQDIGYHSERLAVAFGIIATPEGSPIKVFKNLRICGDCHAAIKLISQIVQRDIIVRDSNRFHHFKDGICSCRDYW

SEQ ID NO: 109128 - protein, 58 aa, Oryza sativa
  Clone ID: PAT_MRT4530_13315C.1.pep
LVSSHTKSSPILVYLFEQIIVLFFLPIFMLVSCQVETQVEGKQNIVRNKAWQELMNLN

SEQ ID NO: 109129 - protein, 54 aa, Oryza sativa
  Clone ID: PAT_MRT4530_13316C.1.pep
RSTTQLLTRTRDRPYETDHTWTLGQFFRLVTAHEYHSLNPALRNNHESKTSLNK

SEQ ID NO: 109130 - protein, 430 aa, Oryza sativa
  Clone ID: PAT_MRT4530_13317C.1.pep
MAPVQTPEQSNGSLTLNPVVQRVLSRGKSLLSPSTPRSPPPSYGSIVTVLSIDGGGVRGIIPGTILAFLEEKLQELDGPEARLANYFDVIAGTSTGGLVTAMLTAPNDNGDPLFAARDINDFYLEHCPRIFPPVSKGPLGLFKSMTGPKYDGRHLHSVVQQLLGDKRVDSTITNIVVPTFDIKLLQPTIFSTYNARKDVSKNALLSDVCISTSAAPTYLPGHRFETTDKDGKPREFNLVDGGFAANNPTLLAMTHVTKQILLGCQDFFPIKPADYGKFMILSLGTGSAKIEKKFDAVESGRWGVLGWLFNKGATPLIDSFSQASADLVDIHASVLFQALHCEKRYLRIQDDELTGDAASVDVSTPENLQRLVGVGKALLKKQACKVDLETGKNEPDMNRKSNEEELVLFAEMLSRERKARLQKKQGSMKI

SEQ ID NO: 109131 - protein, 107 aa, Oryza sativa
  Clone ID: PAT_MRT4530_13318C.1.pep
DCCGDPSFIGKIGSGIQGVKCSWLVGQALQRAYEGQKSVLFANYANKDPACVPTVKSLFRVLTLWAVFVGYETESCKQFLPHIGAQPSIAVQNVLKPFLHEICQTHT

SEQ ID NO: 109132 - protein, 51 aa, Oryza sativa
  Clone ID: PAT_MRT4530_13319C.1.pep
SHVAVDYYYMVAQTNVMQFLGIPICAFLNLIIYLTGMGIYVTLIARYVKKF

SEQ ID NO: 109133 - protein, 522 aa, Oryza sativa
  unsure (1)..(522): unsure at all Xaa locations
  Clone ID: PAT_MRT4530_1331C.1.pep
MAAAAATSPARAAAWTFAAATCVKLLLVPTYRSTDFDVHRYWLALTHALPARRWYTDASSQWTLDYPPFFAYFSRLLALPAPLVDASLVSLPVPDAPPSFAYLLYLRLTVAFSDLLLLLSSVLLLATDALTRRRRRPFLSLALVLWSPALLAVDHVHFQYNGFLMGLLLLSLHFLEQGRDLAGGVVFAALLCSKHLFLVAAPVYFVYLFRHYCCGRGVVRGLGRLVLMGAGVAAVFAAAFVPFLYYGQILXQMQQLFNRLFPFGRGLCHAYWAPNFWVFYILLDKIFAFLLRRLGFNIQIPEASFTGGLVGNSSPFAVLPKVTPITTFLLVILAMSPCLMKAFSKPQPRHIIRWVSYATTCGFMFGWHVHEKASLHFTIPLALIAMDSLEDAKHYFVLSIVSCYSLFPLLFENQEYPIKVMLLLTYATLMWVGFSSHFAAKSPQEGKKVNESGSVVRKNSFIGWISFSYLLGIVAIELWSQVFHHYVFGSRFPFLPLIMVSLYCGVGMMYSWMWQLAWIVRH

SEQ ID NO: 109134 - protein, 58 aa, Oryza sativa
  Clone ID: PAT_MRT4530_13320C.1.pep
WYTLPRTAITSSHFAWMCSVPRVDSTHGGRTHIHLGPGASLEARHHTQHHSALARSRG

SEQ ID NO: 109135 - protein, 1509 aa, Oryza sativa
  unsure (1)..(1509): unsure at all Xaa locations
  Clone ID: PAT_MRT4530_13321C.1.pep
MDLASYAAAAPAPPRWLTSRTCDVLPSAAPSSSGFGEWAAFLFLSDCCQRVHLSALASLLLLLLLCFALRRTASSSWSPRARRGGADGIDRDEGKRPVLHRPGPAPAVRVGVGYVVALSASLALAVFYAVLLVLSLVTRGGGGGVLEPVFLALQCAAHLAAAAVVAHEKRFRAVHHPLTLRLFWLAASALAVLLAGSAIARLASGAAALPDDALAIAVLVLSLPLPLLAIAGATGITVVVAAAESSHEEGAEGNGNGEDVRDYKNVTLYATASWPSRLMWAWMHPLLKRGYRAALDLTDVPTLAPEHRPERMYELFLSNWPAAWATKDNNPVRHALLRCFWPLFLLNASLAVLRLTVMYVGPTLIQSFVDFTSASPRRPLWDGVRLVAALLAAKTAEAFCSHQYNFHCQKLGMQIRGALITALYRKGLRLSCSARQKHGLGMIVNYMAVDAQQLSDMMLQIHYLWLMPLQRWCSHFPCQRQSGPVEPWVGSLVGVALGLLYLYLGPPVTAALGGVVAVMMFVLAGARRNNRYQFRLMTERDKRMKATNEMLNYMRVIKFQAWEEHFSARIEAFRRGEFGWLTRFMYSISGNIIALWSAPIAIAALVFATSVLLGVRLDAGLVFTATSFFKILQEPMRNFPQSIIQVSQAMVSLGRLDSYMTSAELDEGAVERGPAVGAGMTAVRVRGGEFAWEEEEEAAGQQAVLRGIDIDVRAGTLAAVVGMVGSGKSSLLGCILGEMRKISGDAGEHGVRAADGVDPERDDRGEHPVRAGDAAGAVQGGDPGVLPGQGPGDDGVRGPDGDRGARHQPERRAEAAHPARPRRLPGRRRLPPRRRLQRRRRPHRLRYLPRLRPRRPQGQDRPPRHPPARLPPQRPRHLRHARRRRRPVRPLPRPPPHRHRLRRARRGPRVLHGARRERRARSFAVARGQPAALPPAVVRAQGEGERVVERRHQDGEGVVAADQGGGAGERARELHGVQAVHDGGVGVVGADAGARRVRGVAGLHHGRRLLARLPDLRRRVPARPLHQGVRHHRRRVRGDRHGEVPPRRHHRPRHRQHLLQAGPQHHPPRPHVLLRHHPLRQDPHQGVIGPDERGSVVAVLRVDERFHVHHGDRRGDHDVSGGLAFGRPRRTLAHAQPLVPEILHLDVEGADQAGVDHQGSRDPPLLGDGAGRHGDQVLPEAGQLLPREPQPPQRQPQDGLPQQCSQRVARPAAGAHRKPCPLRHRLAHGHVAVQHRPSTXSRTSHLRQNGGSRRLLPLQTGHTKATSISLISSFGXRHNTPLVLKGITLSIHGGEKIGVVGRTGSGKSTLIQALFRIVEPSEGKIIIDGIDICTLGLHDLRSRFGIIPQEPVLFEGTIRSNIDPLQLYSDDEIWQALERCQLKDAVTSKPEKLDASVVDNGENWSVGQRQLLCLGRVMLKHSRILFMDEATASVDSRTDAVIQKIIREEFSACTIISIAHRIPTVMDCDRVLVIDAGLAKEFDSPANLIERPSLFGALVQEYATRSSDI

SEQ ID NO: 109136 - protein, 226 aa, Oryza sativa
  unsure (1)..(226): unsure at all Xaa locations
  Clone ID: PAT_MRT4530_13322C.1.pep
GRAGGRVGASLKMDFHNNAANEWLGLRLELIGSLVLCVTALLMVTLPSNIVLPEYVGLSLSYGLSLNSVMFWAIWLSCNIENKMVSVERIKQFTNIPSEAEWRIKETAPSANWPHKGDIDIIDLKFRYRHNTPLVLKGITLSIHGGEKIGVVGRTGSGKSTLIQALXRIVEPSEGKIIIDGIDICTLGLHDLRSRFGIIPQEPVLFEGXIRSNIDPLQLYSDDENW

SEQ ID NO: 109137 - protein, 37 aa, Oryza sativa
  Clone ID: PAT_MRT4530_13323C.1.pep
MYVSSVIGSSNYGTPVSCVCWRLRVVRHGSAPFHESL

SEQ ID NO: 109138 - protein, 91 aa, Oryza sativa
  unsure (1)..(91): unsure at all Xaa locations
  Clone ID: PAT_MRT4530_13324C.1.pep
ADLRRGDSAGEHGVRAADGVDPERDDRGEHPVRAGDAAGAVQGGDPGVLPGQGPGDDGVGGPDGDRGARHQPERRAEAAHSARPRXLPXXR

SEQ ID NO: 109139 - protein, 244 aa, Oryza sativa
  Clone ID: PAT_MRT4530_13325C.1.pep
MQAIRPGRSCRLGRSCGRDGVSSRCLARLHRSSGSSNGGGGAVRCAKAAAQSMEAVKKDEEARVVALRAVEATPESFAPFGQVIAATPDGDEFGPHDAQLDLTRGIPRFYIMRLEKRPLEFWTITHHASVTQCLGSIGGEDWYLGVAKPSIVEDGAHEQGGDGRKPVQSRAGHYYLPPDPAEVCVFRVSGAKFLKLHIGTWHAGPQFKADAVDFYNLELSNTNIVDHTTHDFKKDDGVTFVIED

SEQ ID NO: 109140 - protein, 48 aa, Oryza sativa
  unsure (1)..(48): unsure at all Xaa locations
  Clone ID: PAT_MRT4530_13326C.1.pep
TFACLSSFTSVTIFYLFSPFFFXLSQSAMQILYDQSASDFNTMLSNCS

SEQ ID NO: 109141 - protein, 114 aa, Oryza sativa
  Clone ID: PAT_MRT4530_13327C.1.pep
PRVRPRVRWSVGQRQLLCLGRVMLKHSRILFMDEATASVDSRTDAVIQKIIREEFSACTIISIAHRIPTVMDCDRVLVIDAGLAKEFDSPANLIERPSLFGALVQEYATRSSDI

SEQ ID NO: 109142 - protein, 250 aa, Oryza sativa
  Clone ID: PAT_MRT4530_13328C.1.pep
MEKAQDTGDVYRTNVPSPGASTLAPARDECLETLILTGRGEAATIGSLDGCGQCAGSLTNRDSWTTTITSDNHHGATLQSQAVGGEERRSGKRKAVVGELALSVSASSPNRPSPTPPAASLRETVTPRRCPVSSPASRLPAVRADAVPSPPASPPYATPRRRGGAATAVPSPPREAATPRLRAGVATAVRASATPSSPSASPPSAPTPLRAAVSPPWLSPVTYTEKDIFSKVSEEDIIQTFMTKAKRTLR

SEQ ID NO: 109143 - protein, 425 aa, Oryza sativa
  Clone ID: PAT_MRT4530_13329C.1.pep
MAWAELPEECVAGILHHLLCLPDHSMFSGVCTRWRTIAMRHLPPMQPWLFMPSTNATSFFCVACERTHQGPCLPDNARGARFCGAHLEGWVAAAEIPHDDRSVPGNRAPALLNLCTGERVLLPRSLRNNNPDTTFINHIQAVILSYTPCQAHPYYAAAIVSGKPNIMFWRPGMSDWVPPMLKWDSGFKMWQKQLSKDPIEDANYIFFGPLGGGFYVLNNKEDLLVYTPKANDRHGELTMSSVNKYQLRRNPRPTMPGPGEVLGRYLVESRGQLLMVVRFVSTEKATVAFDVFKLELKPPSWKKLTLDTLADRTIFLVRGCSCAVEMRKSSQCPPNIYFLDDSARFNGAGSSTSQVQQVEGPFPCGDTGRCCEQGIVRCLPREPPSDSSPWTWFYLPPYEALSRKWFMEQLIKQGEQLRLQEHQDG

SEQ ID NO: 109144 - protein, 128 aa, Oryza sativa
  Clone ID: PAT_MRT4530_1332C.1.pep
GQPTPMKHHGDLEPPSHSVHAFTRARPAWEVGEVGSAIAPPSAVQNPPRCDQIRRRLAEPPVTHHHRARPRSAVEEVEPPHLPPADATPAVACRPEPLSPPLRRMRNCMPPPDPYKVEREGKMGGQIK

SEQ ID NO: 109145 - protein, 170 aa, Oryza sativa
  Clone ID: PAT_MRT4530_13330C.1.pep
MVVRFVSTEKATVAFDVFKLELKPPSWKKLTLDTLADQTIFLGRGCSFAVEMRKSSQCPPNIYFLDDSVSFSGAGSSTSQAQQVQGPFPCGDTGRCCEQGIVRCPPREPPSDSSPWTWFYLPPYVAFLEWFKTQAIKQLEQVLSKFLRISNVNLIGNCCAKMKHDSAVLI

SEQ ID NO: 109146 - protein, 995 aa, Oryza sativa
  unsure (1)..(995): unsure at all Xaa locations
  Clone ID: PAT_MRT4530_13331C.1.pep
GQSSTSPFGQTSSNPFGAQTGGFGQANTTTTNPFAPKPFGSPITAFGAQTGNSPFGTTSTGAFGQPSAPTGQPSTQAFGTPSSSPFGSSTPAFGASPAPTKFAGSSLFGQKPSFGGFGSSPSQSSAFGGPFQQAQPAFGGSTFGAATPFGTTSTGAFGQPSTPAFGSTSTGAFGQPSTPAFGATSAGAFGQPSTPAFGTPSSSPFGSSAPAFGASPAPAFGATSSTFGSAAFGSSTFGASSTPAFGATTTPAFGTTTPAFGSTSPSLFGATSTPAFGASSTPGFGASSSASFGTSTSAFSFGSSPSFGQTASTFGSTPFGTSTSPFGAQTSPFGSQTAAPTFGQTSFGNQAGGTRIQPYTQTPDADSATSGAQPTAKLDSISAMEAYKAKSHEELRWEDYQRGDKGGPNPSGTPAATPSFPSPLNNQFPQNPSNAFQTSNAFQTTSVSNPFAAKPSTGFGSTSTTLFNSPFNNTSAASSSPFASTTSIPLFTQTSSSLFANSTPGFASSSPFGASLSNPSSFSTGLSLVNTQSAGLFSSSPAFAQQPFTQASSGFGLSTPAFSTGSLFSTPTPGMTGGLFGSMSSLPTSNSNRFVFCLLINLRFFYLVKQNWVXFCACACMVTAGPTGGFPGISXYESAPFGQPTPSQSNMVMQPALVTNPFGTLPAMESPXMSIGNGGSAPSVQYGISSLPVADKPLTNRTSLSMVVPRHLSQRRIKVLPRKYNPISDGKVVPFFADDEESPATPKADAFFIPRENPRNLIIRPIDQWPSRVSVDMQPIPKSLVETDKLKGNLAISXNQVXSSIENGIQRDDRASNEPDTVTRHGNGTSVERLVPKLVHADYYTEPSLEELAAKERAEPGYCSRVRDFAVGRHDYGSIKFIGETDVRGLDLESIVEFNNREVIVYKDDSKKPPVGEGLNKAAVVTLLNIKCMNKKTGDQYTEGPRVGKYKEMLVKKAEEQGAEFISFDAANGEWKFRVKHFSSYGFGEAEIVSC

SEQ ID NO: 109147 - protein, 132 aa, Oryza sativa
  unsure (1)..(132): unsure at all Xaa locations
  Clone ID: PAT_MRT4530_13332C.1.pep
CRNSARGEIARVALAAADALGLPFVRPYWSGRTAGDFAHGANFAXGGATALSPDFYRERGVHVRDTVHLDMEMNWFRDLLGLLCPDDLAETEGATDPGEGQDPQDLEQEAGDEASEDPYAYYQEGDEDEGAQ

SEQ ID NO: 109148 - protein, 843 aa, Oryza sativa
  Clone ID: PAT_MRT4530_13333C.1.pep
TGAFGQPSAPAFGSMSTGAFGQPSAPAFGSTSTGAFGQPSTQAFGTPTFGAASTPTFGTTTTPSFGATTTPAFGTTTPAFGSTSTSVFGASSAPAFGSTGFGSSTTPGFGSSGTTAFGAGSTPGFGASSSGMSTSAFNFGSSPSFGQTIPTFGSTPFGTTSSTFGSQTSTFGSQTTAPAFGQTSFGNQAGGTRIQPYTQTPDADSATSGTQPAAKLNSISAMEAYKAKSHEELRWQDYQRGDKGGPNPSGTPAVTPSFPSPVNNQFSPNPPNAFPSASANNPFAPKQPSTGFGTFQQTQPAFGSSTFGASSTPAFGATTTPAFGTTTPAFGSTSPSLFGATSAPAFGSSGFGSSGTPAFGASSTPGFGASSSASFGTSTSAFSFGSSPSFGQTASTFGSTPFGTSTSPFGAQTSPFDADSATSGAQPTAKLDSISAMEAYKAKSHEELRWEDYQRGDKDGVSTICPYSKHVLLPTSNSNRTPSQSNMVMQPALVTNPFGTLPAMPQMSIGNGGSAPSVQYGISSLPVADKPLTNRTSLSMVVPRHLSQRRIKVLPRKYNPISDGKVPFFADDEESPATPKADAFFIPRENPRNLIIRPIDQWPSRGTVDRQPIPKNLVDTDKHKGPLAISPTRSTSIENGIQRDDRASNEPDTVTRHGNGTSVERLVPKLVHADYYTEPSLEELAAKERAEPGYCSRVRDFAVGRHDYGSIKFIGETDVRGLDLESIVEFNNREVIVYKDDSKKPPVGEGLNKAAVVTLLNIKCMNKKTGDQYTEGPRVDKYKEMLVKKAEEQGAEFISFDAVNGEWKFRVKHFSSYGFVVGPALGEEAGDGGKRKQVPEEPR

SEQ ID NO: 109149 - protein, 158 aa, Oryza sativa
  unsure (1)..(158): unsure at all Xaa locations
  Clone ID: PAT_MRT4530_13334C.1.pep
TAFGAQTGNSPFGTTSTGAFGQPSAPTFGSTSPXFAGSSLFGQKPSFGGFGSSPSQSSAFGGPFQQAQPAFGGSTFGAASTPTFGTTTTPSFGATTTPAFGTTTPAFGSTSTSVFGASSAPAFGSTGFGSSTTPGFGSSGTTAFGAGSTPGFGASSSG

SEQ ID NO: 109150 - protein, 247 aa, Oryza sativa
  Clone ID: PAT_MRT4530_13335C.1.pep
MICLFLAAFGQSSTSPFGQTSSNPFGAQTGFGQASTSTSNPFAPKPFGSPTTTFGAQTGGSPFGTTSTGAFGQPSTPAFGSTSTGAFGQPSTPAFGATSAGAFGQPSTPAFGTPSSSPFGSSAPAFGASPAQCCCFNCSSELSFCMTCDTTIRKFAGSSLFGQKPSFGGFGSSPSQSNAFGGTFQQTQPAFGSSTFGASSTPAFGATTTPAFGTTTPAFGSTSPSLFGATSAPAFGSSGFGSSGTPA

SEQ ID NO: 109151 - protein, 43 aa, Oryza sativa
  Clone ID: PAT_MRT4530_13336C.1.pep
NCQGSINIAGGVQSTGENSLILYYSMNLSHYLLIPLIPFFFSK

SEQ ID NO: 109152 - protein, 300 aa, Oryza sativa
  Clone ID: PAT_MRT4530_13337C.1.pep
PFASTTSIPLFTQTSSSLFANSTPGFASSSPFGASLSNPSSFSTGLSLVNTQSAGLFSSSPAFAQQPFTQASSGFGLSTPAFSTGSLFSTPTPGMTGGLFGSMSSPFSSTAFQQSAPTPSMFSFQPQTQTAPTGGFPGISNTMNQAPFGQPTPSQSNMVMQPALVTNPFGTLPAMPQMSIGNGGSAPSVQYGISSLPVADKPLTNRTSLSMVVPRHLSQRRIKVLPRKYNPISDGKVPFFADDEESPATPKADAFFIPRENPRNLIIRPIDQWPSRGTVDRQPIPKNLVDTDKHKGPLAI

SEQ ID NO: 109153 - protein, 68 aa, Oryza sativa
  Clone ID: PAT_MRT4530_13338C.1.pep
VHTGREEHEPLQEQSQGDASLRPHNHSCCPACSEPSQHPAYVYILQQPCSRLRARAIRRRHVKRTHEN

SEQ ID NO: 109154 - protein, 145 aa, Oryza sativa
  Clone ID: PAT_MRT4530_13339C.1.pep
ACCQRTCLNQGYCSRVRDFAVGRHDYGSIKFIGETDVRGLDLESIVEFNNREVIVYKDDSKKPPVGEGLNKAAVVTLLNIKCMNKKTGDQYTEGPRVDKYKEMLVKKAEEQGAEFISFDAVNGEWKFRVKHFSSYGFGEAEIVSC

SEQ ID NO: 109155 - protein, 386 aa, Oryza sativa
  Clone ID: PAT_MRT4530_1333C.1.pep
MGLLLLSLHFLEQGRDLAGGVVFAALLCSKHLFLVAAPVYFVYLFRHYCCGRGVVRGLGRLVLMGAGVAAVFAAAFVPFLYYGQVSFARLIYLWNGRIGCIIGTILSYSLQQIILQMQQLFNRLFPFGRGLCHAYWAPNFWVFYILLDKIFAFLLRRLGFNIQIPEASFTGGLVGNSSPFAVLPKVTPITTFLLVILAMSPCLMKAFSKPQPRHIIRWVSYATTCGFMFGWHVHEKASLHFTIPLALIAMDSLEDAKHYFVLSIVSCYSLFPLLFENQEYPIKVMLLLTYATLMWVGFSSHFAAKSPQEGKKVNESGSVVRKNSFIGWISFSYLLGIVAIELWSQVFHHYVFGSRFPFLPLIMVSLYCGVGMMYSWMWQLAWIVRH

SEQ ID NO: 109156 - protein, 69 aa, Oryza sativa
  Clone ID: PAT_MRT4530_13340C.1.pep
NMGEHICTGLDGKSSPRFPRESPGRQLRRSALTPETSWQQLTSSRKLGVLKISIGRALERTGYTWANFT

SEQ ID NO: 109157 - protein, 61 aa, Oryza sativa
  Clone ID: PAT_MRT4530_13341C.1.pep
VLQHKSNCLLQNKIIPLAHKMENEFHVEWANHDAHINLNVFESVRKNNKINYRIIIFLPKK

SEQ ID NO: 109158 - protein, 346 aa, Oryza sativa
  Clone ID: PAT_MRT4530_13342C.1.pep
MARIIRRHGGGRILRRSREEKRRLSEGGGGASQQPQGPAEDDYCPVIGSKINMDGISDQEVANAYSFVFSFDEALRSIKLEEGRLLIHIADLYEMKRSLDDKITSLKAAVKSSPSADILRRIKSTRTKNNETQEEIYADKSLLAKTRLKLVKLEESPRSWRISIDEVAVVADSDGDADVNAEQLLHLLEHVGAIGENTEVERFDEKKLFLESTGCGGTKYEPLIGSDLKANIRRYRQLLGMVPHHDREVEGDGFGTHGGRRQLRPCQKYKSGRIASRRRRGAGRGPAALGPTSKDTHMLATPAAAPDGTRPPTDMTQNSKSSAVSFVTKPLAAASARGSGTTPAMT

SEQ ID NO: 109159 - protein, 78 aa, Oryza sativa
  Clone ID: PAT_MRT4530_13343C.1.pep
LLVLIRLQGPARTYWPDPRVRVRSPSPSPAPSRRAPTIARVSPSPERKIMGAEAEHRMYPYPAPATGPPTLVGRTDRN

SEQ ID NO: 109160 - protein, 51 aa, Oryza sativa
  Clone ID: PAT_MRT4530_13344C.1.pep
MACASTIILRGFSRDSRRFGGRGGTCPGLKILTRKLAFIYVISFVDVMEKD

SEQ ID NO: 109161 - protein, 200 aa, Oryza sativa
  Clone ID: PAT_MRT4530_13345C.1.pep
MAAAAGGGDPRRKLRHPSVEAAGRATPLGPVPCHARSRRRRRRPPPKGAAGFRSPDSTTGHRPFTRGSGRGPTSEPQYLGNHPWSIMASQEKPTPPPPPPPHPPAPEAVPRVRRFGGGPPGGGGGGGYPNPPDAAIPDAATLREQWRFAVRQYSRWYSHAWGTAILAGAAFFGLGWLVKGSNPLPSRAEHHASNAKEEEG

SEQ ID NO: 109162 - protein, 195 aa, Oryza sativa
  Clone ID: PAT_MRT4530_13346C.1.pep
MRRRRFGLLLGDRWASQAHDEALLASELGCSLAGAFDGLRGECTGLPCDPSHARRVASLPASDAGGRIPARLRLDHVVEGVSGRGGVGASGEEGLGAAEEGSGEDDDGGGAVLMLAPRRERGERSGDWLLLLAPRRSSSSSTVPGLSPSRWRGTWRGWEWERRPTAAASGELLLLPSSPATTPPSTAGSLPGPLP

SEQ ID NO: 109163 - protein, 51 aa, Oryza sativa
  Clone ID: PAT_MRT4530_13347C.1.pep
WSRVQGERDQHAKRGKASLGQALDVQHRGLGVVNGGLRNKTGEVSVQHQTT

SEQ ID NO: 109164 - protein, 59 aa, Oryza sativa
  Clone ID: PAT_MRT4530_13348C.1.pep
QYQCSHRRFLPSSTCLLILIISMSLTELVVPQFTSVLSRPLATRRMLFSHAMSMGRHTH

SEQ ID NO: 109165 - protein, 244 aa, Oryza sativa
  Clone ID: PAT_MRT4530_13349C.1.pep
MRRRIQWCRGTRTTDLALAVSEGGVAVADFDGEAAVLWEGREHWRRRTVRQATVAGGGPEGGVVATPSRDARWEVGSGAITVACVGRSAAVHRFGGGGVLREVGAGAIARRRRTASGAAACRWRRWAIFAFPTCHGHILPQMLGCGWYGYTFERCWGLNSKPPVGDGGEARGALSFGKPGRHGTGAVYRLILSWLAATCRSYGVCWPYSCGAEPATRSQLFARLCVISHGVYSWSGLLSPKERE

SEQ ID NO: 109166 - protein, 67 aa, Oryza sativa
  unsure (1)..(67): unsure at all Xaa locations
  Clone ID: PAT_MRT4530_1334C.1.pep
GRWYTDXSSQWTLDYXPFFAYFXRXLALPXPLVDASLVSLHVPDAPPSFAYLLYLRLTVAFSDPDAW

SEQ ID NO: 109167 - protein, 255 aa, Oryza sativa
  Clone ID: PAT_MRT4530_13350C.1.pep
MDSAVDGPRQPPARAGSRLCTRCGERKAALKRPKTLEQICRECFYVVFEDEIHQTIVDNNLFKPGDRVAIGASGGKVADTTDLLQYGLPLKIVSYKDLYGWTMDDIVKAIGLKNNCTFCGVFRRQALDRGAALLKVDKIVTGHNADDIAETVLLNILRGDIARLSRCTFITTGEDGPIPRCKPFKYTYEKEIVIYPYYAISHIIPRAILDIIKSGENFRISTTTRMPEQGTCERCGYISSQDILLADLLNETDVN

SEQ ID NO: 109168 - protein, 98 aa, Oryza sativa
  Clone ID: PAT_MRT4530_13351C.1.pep
PQGFFWFSHFPKGPVLGGLPLNDLKGGKTIWLWGFFPLLLLLLKNLVCPGLLSTPFVKNMSLFWNSPKVLCGLNFLKGWVSIFLKFEPPQKFIFFFLG

SEQ ID NO: 109169 - protein, 567 aa, Oryza sativa
  Clone ID: PAT_MRT4530_13352C.1.pep
MAGMLVGFTDFSTSMAPSFLLSLLLSSSSSSSMAVQMGEKAAARVGVGRRRRRRAHALVGGDDADGGKGSGAAAQIGEKAAARASGDGGDVRVRCCRRCHRWGEGEGAQGLTTSQLGAPVYASRPYAACPRDWSTCSCAADALLWRRQLLAPADADALLSSSLPHLEDDNRWEKGSTRRVASGRAQRRRQGAVSLRRRRRLRLRLRRARSSYLRRAPHHSGGHEARAEWRRRRVPFLLSSASCKILCPSQLPMDSAVDGPRQPPARAGSRLCTRCGERKAALKRPKTLEQICRECFYIVFEDEIHQTIVENNLFKPGDRVAIGASGGKDSTVLAYVLSELNHRHKYCLDWFLLSVDEGVKGYRDHSRETTMQKYGLPLKIISYKDLYGWTMDDIVKAIGLKNNCTFCGVFRRQALDRGAALLKVDKIVTGHNADDIAETVLLNILRGDIARLSRCTFITTGEDGPIPRCKPFKYTYEKEIVIYPYYAISHIFSCIYSPNAYRGFAREFIKDLERMRPRAILDIIKSGENFRISTTTRMPEQGTCERCGYISSQDLFLADLLNETDAN

SEQ ID NO: 109170 - protein, 88 aa, Oryza sativa
  Clone ID: PAT_MRT4530_13353C.1.pep
LQVPVPGIPGSTHASLNYKSLYCIFYSLHPKYKAQPLITQRPRKYLITFLVWITSMHESKEDVPQPEPLPLKFFLPQPKPLPLKFEIY

SEQ ID NO: 109171 - protein, 71 aa, Oryza sativa
  Clone ID: PAT_MRT4530_13354C.1.pep
QDYRSPRPISTSGRPNGHSQTHYLSDFRHLASLIGLAKEPLWGPGKRKKEIEQRSPLSVRSSRHVEIRLGL

SEQ ID NO: 109172 - protein, 68 aa, Oryza sativa
  Clone ID: PAT_MRT4530_13355C.1.pep
TTCTSAQQIVLKICYEIDDLCSQAVHAPTDRKNFQMWLSNLGEIYAAFYNILHSRLHHIMACGARTVC

SEQ ID NO: 109173 - protein, 211 aa, Oryza sativa
  Clone ID: PAT_MRT4530_13356C.1.pep
MVTGRRAGAVSTVCGRWGRGAASNGWEEPDVAVAGNGPRWQRAGRRLAERCYTVQQRHRAQPVRGTGKLGVRIANEGDRAGARDREDARHCGRRRIVDTISPITPSSMVQVSSATAASSIPPRSMSTILHLAFQTSVREERPCDRGLDVGSVEAAGELVKEAVRGPEGVGSGGAYPVNVIVAMASCQRRSSVTWAAAIWRKGVRDLGGREV

SEQ ID NO: 109174 - protein, 125 aa, Oryza sativa
  Clone ID: PAT_MRT4530_13357C.1.pep
MATITLTGYAAQATAADQGLSSRTEVWNARCRIVDMLRGGMDDAAVAEETCTMLDGVMGEMVSTMLRMVATTDLARDVARLRRHDSERVCALATGVVRSGGRPPCPVLPLYLLHWQSGHLASPSP

SEQ ID NO: 109175 - protein, 155 aa, Oryza sativa
  Clone ID: PAT_MRT4530_13358C.1.pep
MGGEAASSRGQRLPEAVAPAAAAPSPPPDPAGGEAASSRGGRLPEAAAAAVAPSPPPNPAGGEAASSRGWRLPEAAAAAAAPSPPPDLAEGEAASSRGRRRQLQRTTAATAAVPQRRISRGRRPEATQGRRTKDELRYWKGWKGAKRFCEWWCHK

SEQ ID NO: 109176 - protein, 88 aa, Oryza sativa
  Clone ID: PAT_MRT4530_13359C.1.pep
PRGPANFNALNDTSMLHSVNARYKPPVADNANDTMQPMQMDPLEEPPDVVSDNPRSQHHPSNWVGADEDDDDDEDEELFVQTTPHYMD

SEQ ID NO: 109177 - protein, 343 aa, Oryza sativa
  Clone ID: PAT_MRT4530_1335C.1.pep
MEPPQLDGQCGGEPPASVEGVVFMPYATADSSLRVMADDGDGSLREGCRRREPLWIVFDVSGTIHLSTGLRVSSYKTIDGRGQRVTLSGKGLQLRECEHVIVCNLEVEGCRGHDADAVAVKPGSRHVWIDRCGLRGCGDGLLDVTRGSTDVTVSRCRFSAHDKAVLIGGSAGHVEDRAIRVTIHHCLFDGTRQRHPRVRFGRVHLYNNYTRGWGIYAVCASVESQIVSQCNIYEAGEKKKVFKYMIEQAADRDQSSTGFIRSEGDLFLNGAEECTAQDSEAAADELWDFKIQELDFYQSCSVQPASMALKELLECFTGWQPVPLPEDTCLEEETDSAPADTTA

SEQ ID NO: 109178 - protein, 76 aa, Oryza sativa
  unsure (1)..(76): unsure at all Xaa locations
  Clone ID: PAT_MRT4530_13360C.1.pep
MVYHEHDLCYSVGRPGFQVPALHYLENISPDLLLLNKEYAWHIGGXFSQQEVQEWRLLYHSSLHGQSFNTFLGNVT

SEQ ID NO: 109179 - protein, 48 aa, Oryza sativa
  Clone ID: PAT_MRT4530_13361C.1.pep
MQKSGGDRPVEDVVVAKDGGRTGISDEAAEARAGEGDEVMKRRRTHYR

SEQ ID NO: 109180 - protein, 201 aa, Oryza sativa
  Clone ID: PAT_MRT4530_13362C.1.pep
MEKEWSTYATHGYPRLLLYICLSVPDPIYELLFPTSSFLARSLDGATSTIDTAGGGRRRHTSASNRAYSPPNHLRRRLRRKRQARFGGGGGPARVEWPRARAKRMRPVTRGGAPAPASGAPGQQRRLDNRRGSPLATACEGPVAQLDGDGCNASSEEGREPSVAGAAVRAHRLPEPSLSRHRSRSVLALPPPPPDLPCLPS

SEQ ID NO: 109181 - protein, 289 aa, Oryza sativa
  Clone ID: PAT_MRT4530_13363C.1.pep
MAVEVATQKIRWGELEEDDEGDLDFLLPPRVVSGPDENGFKKVVEYRFDDKGNKVKVTRTFRVRKIARARLSKSAIERRSWPKFGDAVQEDVGARLTMVSTEEIVLERPRAPGSKAEEPSASGDPLASKSGAVLMVCRTCGKKGDHWTSKCPYKDLAPQTEAFVDRPPTADGSGPPGGAVKGAYVPPSMRSGAVDRVGHDMRRRNDENSVRVTNLSEDTREPDLLELFRTFGPVSRVYVAVDQKTGASRGFGFVNFVHREDAEKAISKLNGYGYDNLILRVEWATPRPN

SEQ ID NO: 109182 - protein, 110 aa, Oryza sativa
  Clone ID: PAT_MRT4530_13364C.1.pep
MPGGGVVDGICRWLRRHGRTASAYQPHPSGDGGLEVVPGPFTLPARTSPLPPPSDGQLKKESLRFGTESNISISYYNLLLHGITVYIVFKLNKTSKKHLYKVGILGQDFV

SEQ ID NO: 109183 - protein, 82 aa, Oryza sativa
  Clone ID: PAT_MRT4530_13365C.1.pep
YLFFLTFLLLSTVSRNGLLRPPFLSYNTRGRRVSPSMQRWPPHSSKDKEAEEEAISSSSRVAGPLEQQSKRYSCGRVGMDMV

SEQ ID NO: 109184 - protein, 512 aa, Oryza sativa
  unsure (1)..(512): unsure at all Xaa locations
  Clone ID: PAT_MRT4530_13366C.1.pep
MEVSLPLLIGVVLAFLLLFVLVNIKNSCRSWWPPPEKEKKKLRLPPGPWQLPLVGSLHHVLLSRHADLPHRALRELAGKYGPLMMLRFGAVPTLVVSSAEAAREVLKTYDAAFASXYLTPTLAVLSRGGRDILFSPYCDLWRQLRRICVHELLSARRVQSLRHGREDEAARLVRSVAAECAARGGAAVVNVGELISRAVNDSVVRSAVGARSARRDEFVRELDESVRLSGGFNLADLYPSSWLARRLSGAMRETERCNRSLMAIMDDIIREHGDGEEDLLGVLLRLQRNGDVQCPLTTDLITNVVLDMFAAGSETSSTTLEWALTELVRNPHIMEKAQSEVREIFRGENKLTEEMMDKLSYLRLVIRETLRLHLPVPFLLPRQCREPCSVMGYDIPVGTKVLVNAWAIARDNQYWDDPEVFKPERFENNRVDFKGIDFEFIPFGAGRRICPGIALGLANIELMLASLLYHFDWEFLDRDRNDEIDLSETFGITAKRKSKLMVYATQRIPCLG

SEQ ID NO: 109185 - protein, 333 aa, Oryza sativa
  Clone ID: PAT_MRT4530_13367C.1.pep
GAAARVHPPPSPPRDEASSSGSAAAAAEDDDDGPDSPQEEEDEGLARCIPVKAYFLSTSIDLKSLQADHGSDVVPPSTRSLNYIALRYSEFPQEIMDIGVKDNRFCYRYVVVFQYGSAVLFNIADHEAEHYLDIIRKHASGWLPEMRKDDYAVVEKPSLTTWMKGGLDYIVLKSLDTDGIRIIASVLGQSIALDHYIRQVDDMVEEFTEINRVMEKTGNFTMQRKKLFQLVGKANSNLADVIIRLGLFDRSEIAWKNSNYAQILEYLREEYELNQRFGSLDFKLKFVEHNIHFLQEVLQNRRSDLLEWGVIILLIIEIVISLYEIIKDSSMMS

SEQ ID NO: 109186 - protein, 1007 aa, Oryza sativa
  Clone ID: PAT_MRT4530_13368C.1.pep
MPPPSLLLPPLLLLLGLHAAAAAVSEVSALMAFKNALTIPPTAAAFFARWDAAAASPCNFTGVDCANSGGGGVTAVAVEGLGVAATSVPFDVLCGSLPSLAKLSLPSNALAGGIGGVAGCTALEVLDLAFNGFSGHVPDLSPLTRLQRLNVSQNSFTGAFPWRALASMPGLTVLAAGDNGFFEKTETFPDEITALTNLTVLYLSAANIGGVIPPGIGNLAKLVDLELSDNALTGEIPPEITKLTNLLQLELYNNSLHGELPAGFGNLTKLQFFDASMNHLTGSLSELRSLTQLVSLQLFYNGFTGDVPPEFGEFKELVNLSLYNNNLTGELPRDLGSWAEFNFIDVSTNALSGPIPPFMCKRGKMTRLLMLENNFSGQIPATYANCTTLVRFRVSKNSMSGDVPDGLWALPNVDIIDLANNQFTGGIGDGIGRAALLSSLDLAGNRFSGAIPPSIGDASNLETIDISSNGLSGKIPASIGRLARLGSLNIARNGITGAIPASIGECSSLSTVNFTGNKLAGAIPSELGTLPRLNSLDLSGNDLSGAVPASLAALKLSSLNMSDNKLVGPVPEPLSIAAYGESFKGNPGLCATNGVDFLRRCSPGSGGHSAATARTVVTCLLAGLAVVLAALGAVMYIKKRRRAEAEAEEAAGGKVFGKKGSWDLKSFRVLAFDEHEVIDGVRDENLIGSGGSGNVYRVKLGSGAVVAVKHITRTRAAAAAARSTAASAAMLRSPSAARRTASVRCREFDSEVGTLSSIRHVNVVKLLCSITSDDGAASLLVYEHLPNGSLYERLHEGQKLGGRGGLGWPERYDIAVGAARGLEYLHHGCDRPILHRDVKSSNILLDESFKPRIADFGLAKILDGAAATPDTTSAGVVAGTLGYMAPEYSYTWKVTEKSDVYSFGVVLLELVTGRTAIMAEYGESRDIVEWVSRRLDSRDKVMSLLDASIGEEWEKEEAVRVLRVAVVCTSRTPSMRPSMRSVVQMLEAAAIGREFAVVTSVKVKVIP

SEQ ID NO: 109187 - protein, 419 aa, Oryza sativa
  Clone ID: PAT_MRT4530_13369C.1.pep
MISQFFVLSQRGDHIVFRDYRGEVPKGSAEIFFRKVKFWNDDEAEEAPPVFNVDGVNYIHVKVAGLFFVVTTMVNVSPSLLLELLQRIARVTKDYLGVLNEDSLRKNFILVYELLDEVIDFGYPQTTSTEVLKSYIFNEPIMVDAGRLPPLGPAAMFMQGTKRMPGTAVTKSVVATEPGGKKREEIFVDIIERISVTFSSSGYILTSEIDGTIQMKSYLTGNPEIRLALNEDLSIGRTGSSSYDYRSSSGGGAVILDDCNFHESVHLDSFDIDRTLHLIPPDGEFAVMNYRITQEFKPPFRVTALIEEAGPSRIVGGSEHTLRAKLTFSQESHGIILDCSFLVYAPSDFSVIKLMSRFFWNAGNLTKEAGPVNMNFTIPMYNTSKLQVRYLQIAKKSKTYNPYRWVRYVTQANSYVARL

SEQ ID NO: 109188 - protein, 27 aa, Oryza sativa
  Clone ID: PAT_MRT4530_1336C.1.pep
HVSSFLPQPKNSLPLKLSHHRPPIHST

SEQ ID NO: 109189 - protein, 89 aa, Oryza sativa
  Clone ID: PAT_MRT4530_13370C.1.pep
DGIPGLQNATQQKNQYQFTNFGSLARRSIYTGYSPLLHVKISISDKIAKMCVMDQCPQYRQRLQDFLSFAECKLQIKLKFVPLSGQQQW

SEQ ID NO: 109190 - protein, 47 aa, Oryza sativa
  Clone ID: PAT_MRT4530_13371C.1.pep
VSEWWRCRRRRRRRRQTAAPPPASNNSSSPPAPGSLSPPSLTPPAAP

SEQ ID NO: 109191 - protein, 599 aa, Oryza sativa
  Clone ID: PAT_MRT4530_13372C.1.pep
MSSPSSPPPANQTATPPPANQTAAPPPASNNSSSPPAPGSLSPPSLTPPAAPSPPSTTPSSPAAAAAASSSGLTTPVVVGIVVGGLVVLLLVTILLVCLFKKKKRHHHHHPPPPPPPHLLHYYGHPPPPPPPPPPFKGDHYGGVYQNWQQNGPPPPPDHVLKKVPSHPSPPPPPAPLNVHSGGSGSNYSGGDNSQPLVSPGAALGFSRCTFTYEDLSAATDGFSDANLLGQGGFGYVHKGVLPNGTEVAVKQLRDGSGQGEREFQAEVEIISRVHHKHLVTLVGYCISGGKRLLVYEYVPNNTLELHLHGRGRPTMEWPTRLRIALGAAKGLAYLHEDCHPKIIHRDIKSANILLDARFEAKVADFGLAKLTSDNNTHVSTRVMGTFGYLAPEYASSGQLTEKSDVFSFGVMLLELITGRRPVRSNQSQMDDSLVDWARPLMMRASDDGNYDALVDPRLGQEYNGNEMARMIACAAACVRHSARRRPRMSQVVRALEGDVSLDDLNEGVRPGHSRFLGSYNSNEYDTGHYNEDLKKFRKMAFGSGNLESSQQTQPTEFVPNRSVSMGDARQIPETEMEMGSLKKDGDSNGTRDSQASRR

SEQ ID NO: 109192 - protein, 82 aa, Oryza sativa
  unsure (1)..(82): unsure at all Xaa locations
  Clone ID: PAT_MRT4530_13373C.1.pep
APPPPPPPWPSPRSPPPPPPPPPPPPPAPXLPLRSPAPPPPPAAGAASRSSPSPXPPPPPPNPNPPPPVRRRAREDDDDEGE

SEQ ID NO: 109193 - protein, 122 aa, Oryza sativa
  unsure (1)..(122): unsure at all Xaa locations
  Clone ID: PAT_MRT4530_13374C.1.pep
WGKENREAPLRTACPPGIPLDLVSNFEIKSFDACANPHLGLAAIVAAGIDGLRRSLTLPEPTESNPAGYASNSKLKRMPKDLMESVEALAADKIMHXMIGDKLVTAVIVYERLEXDHYEKNP

SEQ ID NO: 109194 - protein, 41 aa, Oryza sativa
  Clone ID: PAT_MRT4530_13375C.1.pep
EISHGLHGLGCQVLTLLLYRGSSRRLLKKSFHAFIFALVRQ

SEQ ID NO: 109195 - protein, 95 aa, Oryza sativa
  Clone ID: PAT_MRT4530_13376C.1.pep
VKQCEPLRRPFTESVSFGFVSQGRSVLGVESGPPAGRCGMGFRADPRRAGNRGARRRWGKFRAGIRHSVIKRASLYWWLGKCHGVVPSKDRACVW

SEQ ID NO: 109196 - protein, 181 aa, Oryza sativa
  Clone ID: PAT_MRT4530_13377C.1.pep
MATVKLPMWTNPETITKVVMVFYIQDIVFLEGKLYAVTEAEEIFAFDDADIEHYSHLPSDQWRWTHVDKQAPAFGRTEFYLVACHTMGKVLVVSRDFGRARVPDTGGGRAAARYHTSRFKVGSSVQEAKQMAAWEAVTFLRSRFRSVLDDSPWSSIPHYHSHVSEIEYDEDFDDDFDYADL

SEQ ID NO: 109197 - protein, 132 aa, Oryza sativa
  unsure (1)..(132): unsure at all Xaa locations
  Clone ID: PAT_MRT4530_13378C.1.pep
MMMMIRMILMIMIIKMKPGDIPQDAWEDVDPXDEYSYEELVALGEVVGTESKGLSLDTLASLPSKTYRAQDKQDGNMEQCVICRVEFEEGESLVALPCKHSYHSECINQWLQLNKVCPMCSAEVPTSQDTRA

SEQ ID NO: 109198 - protein, 104 aa, Oryza sativa
  Clone ID: PAT_MRT4530_13379C.1.pep
MGARPPVQSDVTGNRPVTDWSHPIDRAWVPFSHSPPATWQLGVGLGGKQRKSPRGLALMAVAHPTSSVPLSGALKAGRGYNGRCDEWARQTKRQLWARGSWGKL

SEQ ID NO: 109199 - protein, 157 aa, Oryza sativa
  unsure (1)..(157): unsure at all Xaa locations
  Clone ID: PAT_MRT4530_1337C.1.pep
HYRILKLACLQVDSRGSPDRHRLWLGGEVGQVHTKDFHXIPPTLPYFAGXDMNLKRFGYXNISPKEPKRGKVIRRSHLMTNTGGYXYSIYPEWGAGIFYDTGLISDNLIXRALHSGACVGVRWISPIGAIKFDIATPVKSLNNKRGVQFYIGLGSEL

SEQ ID NO: 109200 - protein, 107 aa, Oryza sativa
  Clone ID: PAT_MRT4530_13380C.1.pep
KKVIPYIASHFRRDKIWLRRTKPNKRNYQVVIAVDDSRSMSEGKCGKVAIEALVTVCRAMSQLEVGQFAVASFGKKGNVKVLHDFDQVFNGEAGTNMISSLSFEQDN

SEQ ID NO: 109201 - protein, 72 aa, Oryza sativa
  Clone ID: PAT_MRT4530_13381C.1.pep
QPDLVGAPSTVSAAGRHPLSSPSLSCLNQPQQLYRQGYDNVCFTCVSVVLDGILLSHRTGNGLGPIYGSKSK

SEQ ID NO: 109202 - protein, 73 aa, Oryza sativa
  unsure (1)..(73): unsure at all Xaa locations
  Clone ID: PAT_MRT4530_13382C.1.pep
ELYRKITGRERFQTMFRRLDALELVMHCWHXMLYYSRECRXPVIRLMVRSYEESMPMPVYHGCALTMPEFYDE

SEQ ID NO: 109203 - protein, 149 aa, Oryza sativa
  Clone ID: PAT_MRT4530_13383C.1.pep
MAMVVEELDEFEVLWPDTDAADDDAPPPAISPAPPVQPYETRAPTPRVKHSRPVDVPCRGARLHRWNWRYGGASMEEDGHGSVVGKVVIVPPHLLLLFGVRRPEEEEEEEMAAAPCTLPSSLGTRPCKRARDLRHLRNSVLRMTGFIEG

SEQ ID NO: 109204 - protein, 826 aa, Oryza sativa
  unsure (1)..(826): unsure at all Xaa locations
  Clone ID: PAT_MRT4530_13384C.1.pep
MPAWQAARGEEAGVVERRWWPVPAPPERAAAGSRRARARPSNPPLPRRACPSSWPFPTSPKRAAAGSRRGRAPAVEPAAAAPLPPAAVAAPASTGPSRARSAAPTLAVVSEKERRGESERVETERRGEERRGVDKVGENFEVGKRVRMQIRLLNSSTSKGDKNAKDGKDKGDKDKSEEPKDDEAGEEEPLEFNNFQDQVDYGVHQALINQSGVLVNTLTNMIKSVVDGTIAEHQVKGPTFLPEGVFPQYRNLVTGNQQPVSNIPPGQPMASASASRPEAKKSFKKVNHVYPNMYESEEDDDSEVAAAEQQIQLAIEGGKIKLDGSKKPMKVDGHPFPVKMVHTSGKAADGGSHQSSRLYSAMIINKYQRIHDKQEERXKLHVHQRLGSVHQDRFQDEHEARNQXRLKKTKQEWRVKSKVTIADEVEADKAKRLLKGKAIASSSVNMVFMLHAEYEAKQAYVDDVEEASARLILSPEQAIFEKPEGTKNQHIKPLNVIGFVNGKPMSKMMVDGGAAINLMPYTTFRKLGKNADDLIKTNMGSYSLVLERDWIHANCCIPSTMHQCLIQWQGDKIEIVPADSQLKTESPNCYFEGVVEGSNFYTKDMADDLDGKLGQGFMSTDDLEEVDIVLKGLQLLKEVEADAVEIMGDSLLVISQLAGEYDCKNDVLMVYNEKCRELMDSFRLVTLKHVPREQNVEAKDLARGASGYKPMVKDIEVEVTTIAADDWRNLEQFKIVRNMKPIIKPWPFRGWGIDMIGQINPSSSKGHKFILVATDYFTKWVEAIPLKKVDSGDAIQFVKEYIIYRFGVPETITTDQRSIFVSDKFV

SEQ ID NO: 109205 - protein, 525 aa, Oryza sativa
  Clone ID: PAT_MRT4530_13385C.1.pep
MAARPGDGRRGATGQRETRHARRRGLTAAGGGVGDDVGDDAETGGRLGRLRGGQQRLVPRSRRRREVGSSGVVRWHLIGDEPPAEQGASLASGGLVAQGRQCMDVELAGRRLVLAEDASESLAVPLAGSTTTALVVVVSLLGGVVMAFFHIPHKSSGENLVPAFGRAATVLRVVSSLGASLQRSFNALTTVDGLFRFESFHTLCSARLSPSWVYFVSCGECHALWLFLLMKSKLLADGLDNDNTSYVIWELFSRFCVQLGGDILRLGSAVVVSYAASLPAGGRAAPPPAHLSTLLPNRRRLLPPSPPPAAFPTEQRRRRRSGGGGGGGSRRWIRRWRRSWTGCGSLLPSRLPPAPDPAVMAVFLVYIENMEIMKTEPPKPQPVGPSQRQSDRAVEGLTGHYTAFSSRYKVVRSDRPLYGGRTGRAQSWGFRPQRLVLVVGGIYTHSPATRVSAASAGGFVADGEVARSSALQPPSSRVNMMFSNDSDLDLDLDFVFDLDLDCDDLRLERSVVIDFRVQRLTVRLI

SEQ ID NO: 109206 - protein, 102 aa, Oryza sativa
  Clone ID: PAT_MRT4530_13386C.1.pep
AVHFNGRLRSAPPPAHLSTLLPNRRRLLPPSPPPAAFPTEQRRRRRSGGGGGGGSRRWIRRWRRSWTGCGSLLPSRLPPAPSRGRSDRPLHCGQTGQVEWAQ

SEQ ID NO: 109207 - protein, 100 aa, Oryza sativa
  Clone ID: PAT_MRT4530_13387C.1.pep
CGHAFSMHKSEQHVLKNYSKDKGRMPRTLSICSNVVLSLHKTIYPYELFVFSPAFSAVKLCNLSHLTCLIFNCTNIEQYMNAFDQAMNALEGGPGTQFAL

SEQ ID NO: 109208 - protein, 177 aa, Oryza sativa
  unsure (1)..(177): unsure at all Xaa locations
  Clone ID: PAT_MRT4530_13388C.1.pep
PSIVGPTQPILHPTRQPSTRRHGRIGRSSSTGKSTAAASARHGRRPPRDARRLRSPRPPAPARLLAASARRGRRPAASGRRGRGPSRGAARRLRSPRPPASARRSPPPLAAAAGPRATARRIHSSRSPARRLRSPRPPAPARRGPPPPXRRSRRPPPRPPPLSPRRFAAAACILVEI

SEQ ID NO: 109209 - protein, 80 aa, Oryza sativa
  unsure (1)..(80): unsure at all Xaa locations
  Clone ID: PAT_MRT4530_13389C.1.pep
FFFFFFFFFFFFFFFXAXXDXTSPFLHNKTYXRXKILTVTXRXHPFXFXEXKKRKRKXDNXGKTXTQRTTPTTXLGXMQS

SEQ ID NO: 109210 - protein, 109 aa, Oryza sativa
  Clone ID: PAT_MRT4530_1338C.1.pep
LNYSLPPTPPKRNPPQKKPLGPPPPGWGGNPPTQPPKKAGPPDPLPWKSQRPLQKPHWGNPRKRNPSPQGAPPKKEKGPQTPGTPPPLLAPFPPPKGGGKKTPRPGKTP

SEQ ID NO: 109211 - protein, 102 aa, Oryza sativa
  unsure (1)..(102): unsure at all Xaa locations
  Clone ID: PAT_MRT4530_13390C.1.pep
SLXVTSWPPRLGFWGTWPVSLPVACSRPRSFLPFGCELAACIVCDFLAASPGVCGWSCVFGSAPAGGVVWGTVRLCFLFVHISGSGVGVGVWCLGGGRKKYF

SEQ ID NO: 109212 - protein, 191 aa, Oryza sativa
  Clone ID: PAT_MRT4530_13391C.1.pep
MNKPRGLLELMTAVDAGLVAVDDDGSARIAGHRRQSAPVVAVAVETPPTSSTDDAMSFEFSAAVSYSSASPASMVFSDGQLRAHQFPAVRSSSAASSHVASPVRSWSSSMGGSGGAKGGSSGGGSKKKRVSFNDGGAGRAAAATAANAGDQQRTRGGGLLGCMGSTCTCGSSRNEVVEPSNNANRKVVAAA

SEQ ID NO: 109213 - protein, 136 aa, Oryza sativa
  Clone ID: PAT_MRT4530_13392C.1.pep
AALQVLNFAIYHKELTEMEEREQREMEMKQQADHDAGASGGNADEHRSSGNDPMDVDVGNASNDQDVPAERIEAFEAILGQHVLANHLDQISIDEIEQTVNREAAAPYNRRQVEFILERMQDANRIMIRDGIVRII

SEQ ID NO: 109214 - protein, 453 aa, Oryza sativa
  unsure (1)..(453): unsure at all Xaa locations
  Clone ID: PAT_MRT4530_13393C.1.pep
MSSSVASPSTSPPTTPPSPLPVSVGPGNRRYAFTPSPSPSPPCPSSPAAPKLTPPPHSSSAFSVHARRLARPARPRRFDLGACCSGDPDHPPATMSGGGGGGGGGGGGSPNNTEWRFNQTLRNVQGMLKGRSFPGKVLLTRRSEPLSPPEYSPRYENDRDEYEQNEGSQEGYAPPNADRREGVLTRKRLEYVECVSQYYDIPDTERSDEEINMLRQIAVDCPRTVPDVTFFQHPQIQKSLERILYTWAIRHPASGYVQGINDLLTPFLVVFLSEHLEGNMDTWSMEKLSPQDVSNIEADCYWCLSKFLDGMQDHYTFAQPGIQRLVFRLKELVHRIDEPVSKHMEEQGLXFLQFAFRWFNCLMIREIPFHLVTRLWDTYLAEGDYLPDFLVYISASFLLTWSDKLKKLDFQEMVMFLQHLPTRNWAHHELEMVLSRAYMWHTMFKSSPSHLAS

SEQ ID NO: 109215 - protein, 99 aa, Oryza sativa
  unsure (1)..(99): unsure at all Xaa locations
  Clone ID: PAT_MRT4530_13394C.1.pep
CLLLRTCSTSRMLRDQTASASPVARAAARGRRTRRRSXRRRRQLRRRRRGRARRRRRRRRRERVPPVPRADADRQRRRRRRRRRGGRRRHAAAHGRPDL

SEQ ID NO: 109216 - protein, 120 aa, Oryza sativa
  unsure (1)..(120): unsure at all Xaa locations
  Clone ID: PAT_MRT4530_13395C.1.pep
FXXLIVSSGVMKMYXAAMDKXLTMFXTNDDAFQAXGXXDLSKLTXDEXXTLMQYHDLXQXGXXXXLKXXKXHIQTXVSXVAXKYDLCVXTKGDDXFMXIPMVXXRVVFXXLGRXXGRVIH

SEQ ID NO: 109217 - protein, 286 aa, Oryza sativa
  Clone ID: PAT_MRT4530_13396C.1.pep
RFNQTLRNVQGMLKGRSFPGKVLLTRRSEPLSPPEYSPRYENDRDEYEQNEGSQEGKGQASGNTADSMSAKKSNPPSTSSTNSLPDAQGLVSGARATDSARIAKFTNELSRPAVILDNPRVRSWSGVPPYMRPNIWRLLLGYAPPNADRREGVLTRKRLEYVECVSQYYDIPDTERSDEEINMLRQIAVDCPRTVPDVTFFQHPQIQKSLERILYTWAIRHPASGYVQGINDLLTPFLVVFLSEHLEGNMDTWSMEKLSPQDVSNIEADCYWCLSKFLDGMQDHYT

SEQ ID NO: 109218 - protein, 86 aa, Oryza sativa
  Clone ID: PAT_MRT4530_13397C.1.pep
MAGPLTDLAFGRPGEPPMAAAARAASAGSGGAVVAEGDGDGNDDRVWSSGAKAAAVESATSGITGFASAAARSEARRVSESREGSE

SEQ ID NO: 109219 - protein, 61 aa, Oryza sativa
  Clone ID: PAT_MRT4530_13398C.1.pep
RKEQDKVRTVQASKRSSRAGGGIGFIPPSGDGVASSWPSLPPHTRATAPNPRFRKLSGWDE

SEQ ID NO: 109220 - protein, 277 aa, Oryza sativa
  Clone ID: PAT_MRT4530_13399C.1.pep
MARGSRRKGWARGAVAFAAVAAAVAVGRRYGWDGEAAVAAFRGRRDALGPWAAPAYVAAHALTLALCPPYAILFEGAAALLFGFLPGVACVFSAKVLGASLSFWIGRSCWDEKLISYAILLFTSAMDWLKSNKYFHIVVKGVERDGWKFVLLARFSPLPSYIINYALSATDVGFFKDFLLPTVVGCLPMILQNVSIVSLAGAAVASTTGSEKSRIYSYLFPVLGIMSSILISWRIKQYSSALVIPEELKNSSTNGKANVDDKAVSENTNSGETRKRR

SEQ ID NO: 109221 - protein, 141 aa, Oryza sativa
  Clone ID: PAT_MRT4530_1339C.1.pep
MAECAWWGEVGVSGVSASSTAAVGRVRKHWLALRSGANLFMHSLKLDEPEKSVVKSWRKGANPLPPRCTVVVIRFRGKSRVLGEGNGVVTPLHVPASGYPMMSMDEQTSLSFALFKDVAFNASIRRGVRASDVACLPISFG

SEQ ID NO: 109222 - protein, 740 aa, Oryza sativa
  Clone ID: PAT_MRT4530_133C.1.pep
MRGPPPLPAKGATAIAGRRGRCRCRKKGAAVAARIRGPPLMPPYSRCRCRKKGLLPLQGEGGRRRCLLVAAAAAGRRGHRRFKEKGTASVGEGAASVGEEAAATPAASALLLGEGGGERGREGRGVQVDGVRSVRSEWMRLVEEPALSLSVLEPDVGVGGGSGGGGGGGEGDNGGVFFVSPAGVVEQVGELARSPVLDVPYVAIDIVDWESLDILARNDDEGRLDIVGDDKFYELLGLRAEDEQAEMARQAGGNGGQAAGGDGAEAAAAGDGVGDAAQDTTGAAIPVSDEVPGELVMPYDPDKPCMKAGTMYPNMKEFRLAVRQYAINEEFELHLIKTDPERYIGGCMVDDCPWHIVGHKQPNQKTVMVTVLTDHHTCTSSSRRRTTTPTSKWVVAKAIPILRKNPGMGPKALQTRLVEDQKCTINYDTICKGRLKALDQLYGTWEESFHMLYRWRAEGCRPYISIDSTALNGRWNGHLASATAVDGHNWMYPLSIGFIDLETEDNWEWFMSQLHAAIGDVNPLAVCTDACKGLEKAVHTVFKHTKQRECFWHLMKNFVKRFGGDVHSHMYPAARAYRKEIWQMHMKEWMRSGFNPEIKCDYITNNIVEVFNNWIKDYKALPIGDLADKYRVLVMVLWNKRRRIGEKLTGKILPAVTQQLKAMNRGLGHLSVVKADSLTAEVVDNSSSNGKHVVKAYNKYCSCEEWQHTGKPCQHALALITAQQSRDVNIEDFVNPYYSV

SEQ ID NO: 109223 - protein, 391 aa, Oryza sativa
  Clone ID: PAT_MRT4530_13400C.1.pep
MAPLRGAKRRRKAAAEKKAAMAAAAAAGGAPGAGGGDWWDGFCMRMSGTLSGIQDAQRFEFIFKMPRRTFNYICGLVRDEMMVRSSSYTFLDGKVLSLEDRVAVALIRLNSGGSLVTVGSAVGVNHSTVSLITWRFVEAMEERASHHLRWPDSSEVEKIKSMFEKIHGLPNCCGVVDTTHITMCLSSAEPNCKVWLDHEKNYSMVLQAVISPDMRFMDIVTGWPGSMKESSILHSSGLFKMCEKGARLNGSKMVVSDGSEIGEYIIGDAGYPLLPWLLTPYQEKDLSDSKLEFNKRHAAAITVAPSTLANFKDTWKFLHGEMWRPDKHRLPRIIHVCCMLHNIIICLQDATIDEAAMSNDHDANYKQQVCQLADENAVRVRDKLSEHLVSR

SEQ ID NO: 109224 - protein, 104 aa, Oryza sativa
  unsure (1)..(104): unsure at all Xaa locations
  Clone ID: PAT_MRT4530_13401C.1.pep
FMXLRXPHPSMLMRGGXRCGRRGDRSPNXHSPVLRXYPLDDLSSSLLFAWEHFSGITVALPFDVSALIAFRMIKGXHPDAFENRWGTESCAFYPRFDVILPGLS

SEQ ID NO: 109225 - protein, 62 aa, Oryza sativa
  unsure (1)..(62): unsure at all Xaa locations
  Clone ID: PAT_MRT4530_13402C.1.pep
MSCPVNGGSPAHEQKQLASSKIASFQQFIXHDFYASDXHGTSSFPAAVAHRIGTLDIRIFTH

SEQ ID NO: 109226 - protein, 70 aa, Oryza sativa
  Clone ID: PAT_MRT4530_13403C.1.pep
KKDNFQNIVLFVYLKSFQIGVSVISRRCMFMNWHRKEDVQAWKRVVNKWIQKSPTLKEIIVRRRSPNNDF

SEQ ID NO: 109227 - protein, 153 aa, Oryza sativa
  unsure (1)..(153): unsure at all Xaa locations
  Clone ID: PAT_MRT4530_13404C.1.pep
MPQATAFATLFMSYILDRKSEWGATRQAAVTKPMTVSMVAHADAYDNNLDTTAKTIASPLRVIHAMDDSNATCGKRLAXIALDNTEANRQVYGTLLVTAPDLXQDIFGAMILDETMDHATVNGKMIADIITEQKINPGIKVDKGVGSLDGSNN

SEQ ID NO: 109228 - protein, 210 aa, Oryza sativa
  Clone ID: PAT_MRT4530_13405C.1.pep
MANCFGDVVDNYKLDEMERYVGKAKRQEDRAREAMNLVNEDGKDKKAASYVQGVKDWYGNGESTLCLVYNATGATLRHVADHDWWGFIGRTPYPTEIGNGQWAAFHHVHKSGDSSGSEAAVVYRGTNADGVERDLLVAWSTPWSSFYRNKAYCAVGGVDSFQGDWEQLYDKVNNAAYTCNADSDGFKIDASTATGDSPVFTATIKIHFSQ

SEQ ID NO: 109229 - protein, 418 aa, Oryza sativa
  Clone ID: PAT_MRT4530_13406C.1.pep
MAAAQPPLPWGDLPADLLGLVLLRLPSLPDRVRLRAVCRSWRAGAARGRHPRLPPPLPWLALRDGGLVDLDGEPIRCPTPIPRHGVVGHLAVDNLAFLIHRDGGCSLLNPLSSSASAATAAITPLPWLNLAAVDGAIGQPGVFIGIGAYVNVYSKSVLSSPLDSSPDPLVAVVTSGGRHVAVAPCKRRGVVTIVSGLMAPQIPGLNPTRFSDIAFLGGNLYTLTNAEGLLVLDLGSNGVDDPPNASHRRCIADDPNQHEYYIDGSTKNKSLVLRYLVGSNGRLLMVRRWMNCRQQYYAGDMDKTRGFEVFAAVISDGHGQWVKVDSLGDQAIFLSSECSKSVTASQCADGIQQDCIYFMHRIYDNPTKECHGPCVDPLGDSGVYNMRDGTINLLRPRAVMSELRWKRQYLTWFFPSDE

SEQ ID NO: 109230 - protein, 593 aa, Oryza sativa
  Clone ID: PAT_MRT4530_13407C.1.pep
MASTDRSKKLRVLLIPFFATSHIGPFTDLAVRLVTARPDAVEPTIAVTPANVSVVRSALERHGSAATSVVSIATYPFPEVAGLPRGVENLSTAGADGWRIDVAATNEALTRPAQEALISGQSPDALITDAHFFWNAGLAEELGVPCVSFSVIGLFSGLAMRFVTAAAANDDSDSAELTLAGFPGAELRFPKSELPDFLIRQGNLDGIDPNKIPQGQRMCHGLAVNAFLGMEQPYRERFLRDGLAKRVYLVGPLSLPQPPAEANAGEASCIGWLDSKPSRSVLYVCFGTFAPVSEEQLEELALGLEASGDPFLWAVRTDGWSPPAGWQERVGDRGVLFIEKRLVTDVLRIGERVWDGPRSVRHEEAMVVPAAAVARAVARFLEPGGAGDAARLRAQELAAEAHAAVAEGGSSYRDLRRLVDDMLFFAILDNLQGFSYNARDEPDQDQEGNGVATAWAVPGGAATGEADSAWRRARSPCDGGSFGWRSIGGAARPATAKPGTAQWRQCVAWWRRCMAGGGRHGGTGGGGVTAGGSGLVVGAKEATAAPGGGRGGAVLGDDGGGVLQIRATRLDLEGGWRWWLRQLAAAAEDKAAA

SEQ ID NO: 109231 - protein, 59 aa, Oryza sativa
  Clone ID: PAT_MRT4530_13408C.1.pep
MAKLAAQLKDKFCGLIGRITSCGRAAHKDAAHRDKVKGTSTVCVRRVQAPYQLTATNYH

SEQ ID NO: 109232 - protein, 91 aa, Oryza sativa
  Clone ID: PAT_MRT4530_13409C.1.pep
ECELSATASLAPAAGAAARHGQARRAAQGQVLRPHRPHHQLWPRRPQGRRSWCKRDPFGFISAHRDKVKGTSTVCVRRVQAPYQLTATNYH

SEQ ID NO: 109233 - protein, 63 aa, Oryza sativa
  Clone ID: PAT_MRT4530_1340C.1.pep
AAIRTHNIVLAMVAVTGQTFASDMQIVFTQSVQVFRGHVSCNTNNLVSETALLCVWSLYQSLE

SEQ ID NO: 109234 - protein, 110 aa, Oryza sativa
  Clone ID: PAT_MRT4530_13410C.1.pep
FSKKIKPNQTLKKIKKLKLEQIDRRRLAPSRRPQAPRMGRAPAAAATGEPTPVDILFSFSFLSLSLSRILQHEPASPYPIFLYVIHCIIGYTYHMYQIAIQRSKKKLLLI

SEQ ID NO: 109235 - protein, 57 aa, Oryza sativa
  Clone ID: PAT_MRT4530_13411C.1.pep
MADEDCNSGNLVERDARGRGNGGLRGCTHRSWWADVSDREYTWWADVSDREYSWVTN

SEQ ID NO: 109236 - protein, 61 aa, Oryza sativa
  Clone ID: PAT_MRT4530_13412C.1.pep
ISDSSNLRTITPLNGFSTRLPYGESYFGHPTGRSCDGRLIVDCLAAVLGLPDLTAILHPNF

SEQ ID NO: 109237 - protein, 98 aa, Oryza sativa
  Clone ID: PAT_MRT4530_13413C.1.pep
MGYMPSRKLDFPALKLPPRVRILRLVRVTVLGTTTGRAHAAAQDLGPRPLHRDRPGYGADGPTASSSPAGKPEISGSPPAVRCALAGMCTHPINQRCS

SEQ ID NO: 109238 - protein, 513 aa, Oryza sativa
  Clone ID: PAT_MRT4530_13414C.1.pep
MWEQVKAPVVVPLLRLSVAACLAMSVMLFVEKVYMSVVLVGVHLFGRRPDRRYRCDPIVAAGADNDDPELADANAAFPMVLIQIPMYNEREVYKLSIGAACGLSWPSDRVIVQVLDDSTDPVIKEMVQVECKRWESKGVRIKYEIRDNRVGYKAGALREGMKHGYVRDCDYVAIFDADFQPDPDFLARTIPFLVHNPDIALVQARWKFVNANECLMTRMQEMSLDYHFKVEQEVGSSTHAFFGFNGTAGVWRISAMNEAGGWKDRTTVEDMDLAVRAGLKGWKFVYLGDLMVKSELPSTFKAFRYQQHRWSCGPANLFRKMLVEIATNKKVTLWKKIYVIYNFFLVRKIIGHIVTFVFYCLVVPATVLIPEVEIPRWGYVYLPSIVTILNSIGTPRSLHLLIFWVLFENVMSLHRTKATLIGLLETGRVNEWVVTEKLGDALKLKLPGKAFRRPRMRIGDRVNALELGFSAYLSFCGCYDIAYGKGYYSLFLFLQSITFFIIGVGYVGTIVPH

SEQ ID NO: 109239 - protein, 140 aa, Oryza sativa
  unsure (1)..(140): unsure at all Xaa locations
  Clone ID: PAT_MRT4530_13415C.1.pep
XXXFXXPRXXXXRXSLYXLXGKXXHXQXRXXPAHXXXSEXPXAKKNXPXXNQAGIXXXLXXXSXLXKXXQLYPLRXXXRXXIDLXRFRXXLXXLSIXSDFLXXVXEXXXXRXKXVPXLISCSLXXKXIIXXXHLFKKKKK

SEQ ID NO: 109240 - protein, 106 aa, Oryza sativa
  Clone ID: PAT_MRT4530_13416C.1.pep
MPPRRVAASLTWTVDVGPLRRFPEPSRRAGRRSFTTLVDLTPIAEDLDTTSSFVGYSGLGGTARVVVLRRSFEAKVTLVDEENHDIGTTPGPPAWPLTLWLSPSAG

SEQ ID NO: 109241 - protein, 73 aa, Oryza sativa
  Clone ID: PAT_MRT4530_13417C.1.pep
LFFGVLSKIAIGGCPLLCYEEKMRSKKILVLNMGEGGKESDRTGMEIACTSMGRRGCYCYPTFYPITKPPNSL

SEQ ID NO: 109242 - protein, 255 aa, Oryza sativa
  Clone ID: PAT_MRT4530_13418C.1.pep
MAGSTKLRPFLLTLLLLLSTTVASILAEYDPECDCDKPKHPKPSHPSPSPGHPKGPKNPTPRPPKGPTYPSPVTRPPPLVAPPKVPVTHPPKGPVTRPPPVTYPTPPVTTPPVVVGPPVTYPTPPVTTPPVVVGPPVTYPTPPVTYPTPPVTYPTPPTTTPCPPPPPATQRCPVDSLKIGACVDLLGGLVHVGIGDPVVNKCCPLLEGLVELEAAVCLCTTIRLKLLNINIYLPLALQLLLTCGKNPPPGYTCSI

SEQ ID NO: 109243 - protein, 103 aa, Oryza sativa
  Clone ID: PAT_MRT4530_13419C.1.pep
PAAHVMEENAMDVVASSAQERTAQLLTVDGGRASSSPSRPGDVRDQVAGTDGERVTSYLTLGPSNSGDVALVAEADATDADPTTTTALAVSQEKEEERGPVRP

SEQ ID NO: 109244 - protein, 220 aa, Oryza sativa
  Clone ID: PAT_MRT4530_1341C.1.pep
QLPPLESALVARRRRGASPVVVAEVGGPTDGDKHARADLAQRFYAGLLRKLASNAGTPLRPNQYVEVYLFSLVDEDAKSVAPGNFERHWGILRYDGQPKYSMDLAGQGRDTALVAARGVAYLPRAWCVLNPSATPDAMSRVGDNVNYACTYADCTSLGYGSTCNGMDAAGNASYAFNAYFQVQNQVEESCGFQGLAVQTQQDPSTNACNFTIQIEPSAPL

SEQ ID NO: 109245 - protein, 770 aa, Oryza sativa
  Clone ID: PAT_MRT4530_13420C.1.pep
MQQPPFLLALAVLVVVSSCVRLVSGAGDGAATYIVYLNPALKPAPYATHLHWHHAHLASLSVDPSRHLLYSYTSAAPSAFAARLLPSHVAALRGHPAVASVHEDVILPLHTTRSPLFLHLPPYDAPDADGASTDVIIGVLDTGVWPESPSFGDVGMGPVPSRWRGSCETNATDFPSSMCNRKLIGARAFFRGYGAGGGGNGSHVSLEFSSPRDHDGHGTHTASTAAGAVVADAGLLGYAEGTARGMAPGARVAAYKVCWRQGCFSSDILAGMEKAIDDGVDVLSLSLGGGAFPLSRDPIAVGALAATRRGIVVACSAGNSGPSPSSLVNTAPWVITVGAGTLDRNFPAYAELGNGETHAGMSLYSGDGLGDEKLPVVYNKGIRAGSNASKLCMEGTLDAAAVKGKVVLCDRGGNSRVEKGLVVKQAGGVGMVLANTAQSGEEVVADSHLLPAVAVGAKSGDAIRRYVESDADAEVGLTFAGTALDVRPAPVVAAFSSRGPNRQVAQLLKPDVIGPGVNILAGWTGSVGPTGLTVDERRSPFNILSGTSMSCPHISGLAAFVKAAHPDWSPSAIKSALMTTAYTVDNTGSPIVDAASNTTATPWSIGAGHVDPVKALSPGLVYDTSVDDYVAFLCSVGTSPPQVQAITAAPNVTCQRKLSSPGDLNYPSFSVVFGRRSSSSRSTTVKYRRELTNVGDGRSVYTARVTGPSDIAVAVKPARLAFKKAGDKLRYTVTFKSTTPGGPTDAAFGWLTWSNGEHDVRSPISYTWGM

SEQ ID NO: 109246 - protein, 122 aa, Oryza sativa
  Clone ID: PAT_MRT4530_13421C.1.pep
MASFTTSTSISRATCLAVQEFHFQEACSGGLTTKQGERGQHDDRGGRHGTKMADEELGPDLPIVSRQLSRNFDVEPNPSESRLHKLSNKYSWALKFLLEQRLGPFEVDAIRRPESESKTCIT

SEQ ID NO: 109247 - protein, 178 aa, Oryza sativa
  Clone ID: PAT_MRT4530_13422C.1.pep
MAQQSARANTGPTKVGSGRHGPDESRVVPCLGRGKSSCHGPGYRVAGLLANYRSGLVIPSWPRVVITWYESHSQWLLTDPIIGVTNMAIFSPAAELSSSKGSRVIIFNSFILLSPNVYFHNSPTKQLDPPLAEHAWKILHGPMAMQSLTVVVGWTSAESSRLAAIWYRRHFSPGALRS

SEQ ID NO: 109248 - protein, 173 aa, Oryza sativa
  unsure (1)..(173): unsure at all Xaa locations
  Clone ID: PAT_MRT4530_13423C.1.pep
FKNRQQGDEDTTSSDITMTTLCINKLKHQLQMDLAADLEGISGPMSTCWKAYGVYFQMVLVPCQNSYRAAGNLQNKPRISLLGEVNRVSARLITRGDVVLRLRGSVACLFRSRIELCHDSVQIDCLSLPIGRSGPNSLINXLPTHALAFSFSCARTVPSWASSSEHTLSLFYM

SEQ ID NO: 109249 - protein, 126 aa, Oryza sativa
  Clone ID: PAT_MRT4530_13424C.1.pep
DEDTTSSDITITTLYINQPKHQLQTNLAADLERISGPMSTCWKAYGVYFKMDLVVLQSILFLLVFFDSHAGISLLGEVNRVSAWLITRGDVVLRLRGSVACSFRSRIELSSESTQIDCLSILIRRS

SEQ ID NO: 109250 - protein, 69 aa, Oryza sativa
  Clone ID: PAT_MRT4530_13425C.1.pep
MATTPRLPVVLLVLAAAALAAPAMADYAHPPLDPNQISVELAQFDRVVFSIYYEQPPFDRQSCRTAPVR

SEQ ID NO: 109251 - protein, 106 aa, Oryza sativa
  unsure (1)..(106): unsure at all Xaa locations
  Clone ID: PAT_MRT4530_13426C.1.pep
HQLQTDLATDLXGISRLMSTCWKAYGVYFQMVLVPCQNSYRATGNLQNKPWISLLGEVNRVXARLITRGDVVLRLRGSVACSFRSRIELCRDSAQIXCLSIPIGRS

SEQ ID NO: 109252 - protein, 211 aa, Oryza sativa
  unsure (1)..(211): unsure at all Xaa locations
  Clone ID: PAT_MRT4530_13427C.1.pep
VKINGYEMIWFCLTIDTAIDEDTTSSDITMTTLYINQIKHQLQTDLAAVLEGISGPMSTCWKAYGVYFLMDLVPHQNSYXVAGKLQNKPRISLLGEVNRVSARLITRGDVVLXLRGSVACLFRSRIELCHDSAQLNCLSIPIGRSGXTPHQPSSSHDDHLCHRAALPSIQAVPSIAPSAQPMAPASTPLPAPSAMAPGQLVNPRLLMREQP

SEQ ID NO: 109253 - protein, 159 aa, Oryza sativa
  Clone ID: PAT_MRT4530_13428C.1.pep
LVCFVCRTNNKTNDENTTSSDITMTNLCINKPKHQLQTDLAADLERILGPMSTCWKAYGVYFHMVLVLHQNSYRAARNMQNKPRISLLGEVNRVSARLITRGDVVLRLRGLVTYSFRSRIELCRDSVQINCLSISIGRSEPNIPHTLMIPPPFHLVLLR

SEQ ID NO: 109254 - protein, 173 aa, Oryza sativa
  unsure (1)..(173): unsure at all Xaa locations
  Clone ID: PAT_MRT4530_13429C.1.pep
VGYGHYDEDTTSSDITMTTLRINQPKHXFQTDLATDLEGILGPMSTCWKAYGVYFQMVLVPRQNSYRDAGNLQNKPGISLLGEVNRVSARLITRGDVVLRLRGLVVCLFRCQIELCRDSAQIDCLSVPIGRSGPXLPHQPSTPSPANVTRSSWTAPTTAMCPPWLRTTSLSAS

SEQ ID NO: 109255 - protein, 409 aa, Oryza sativa
  Clone ID: PAT_MRT4530_1342C.1.pep
MAAAAADFAASKRAMAYALCKNLSLDPNTISSTSIEESDIATLFSHIVKSSEDEVLKWVEFSSNFVGKCGEQHVLLGNLNQDLSQKSVLLGNGFKPSVADIVVFATIQVFVSHLGENELQKYPHVLRWMDYIQNIVDFGTTVQKVNLTKSVFDPPSHPKKADKGDTDPSSKKVVSGQKNVGKSDANVDSKKAAPENKAPENKANPTPAKNNKPSGDKKKAQEKSAGKPNEGVADKAPQKTAEKDSECNVSILNIQVGLIRKAWKHPSADSLLVEEIDLGDGNVHQVVSGLAKFFSPEELVNRHVVLITNVKPGKLRDVMSAGLVLCASNQDHTVVEPLIPPEGAKPGERISFAGFDGKPEDVLNPKKKQLDKITPDLHTDGNGIATYRGVPFTTSAGPCRSSVPNASIK

SEQ ID NO: 109256 - protein, 60 aa, Oryza sativa
  Clone ID: PAT_MRT4530_13430C.1.pep
MLAHGLQAAGCSCSSAPLPSQAPAAACPAAAPFDARAASPPGAPLLTRSCKLPAHPYTML

SEQ ID NO: 109257 - protein, 151 aa, Oryza sativa
  unsure (1)..(151): unsure at all Xaa locations
  Clone ID: PAT_MRT4530_13431C.1.pep
MKECRNILTQMEKDTTSSDITMTTLCINQLKHQLQTDLAANLEGISGPMSTCWKAYGVYFHMDLVPRQNSYRAVENLQNKPRISLLGEVNRVSAWLITRGDVVLXLQGSVACLFRSWIELCRNSAQIXCLSEPFGRSGPDIPSQPLLPYSN

SEQ ID NO: 109258 - protein, 121 aa, Oryza sativa
  unsure (1)..(121): unsure at all Xaa locations
  Clone ID: PAT_MRT4530_13432C.1.pep
HQLQMDLAADLEGILGLMSTCWKAYGVYLHMVLVPRXNSYRAAGNLQNKPRISLLGEVNRVSAWLITRGDVVLQLRGSVACSFRSWIELCRDSAQINCLSIPIERSGPNSLISWYQSAVAR

SEQ ID NO: 109259 - protein, 108 aa, Oryza sativa
  Clone ID: PAT_MRT4530_13433C.1.pep
MTTVHVMVDHSAKDDKSGRDSLDATPLLGDNNGGSFLTPRLGSSSGSVATPACRLSITWCDGCDHRVARVAMLASLPPAISSPLLFFLPAASRHPPPSLLSVTHPEKR

SEQ ID NO: 109260 - protein, 181 aa, Oryza sativa
  unsure (1)..(181): unsure at all Xaa locations
  Clone ID: PAT_MRT4530_13434C.1.pep
KASPVPPPPPPAPAPXGRVPSPAAAFLTAGWHAGGLLGGSKAAEKGDYFFNMTNGQAIPPPTPTPLLSSPPTXSPLLSLPPSPSPPRQHGCSDGRRACGGGGGRRGRQRRWRAPPRLLPLPDPAEGGLGGGGSGGXAPSPPSPCRSGGEGSGSGGGGHGRQRRRCAPPPLPPRADPAEGGA

SEQ ID NO: 109261 - protein, 104 aa, Oryza sativa
  unsure (1)..(104): unsure at all Xaa locations
  Clone ID: PAT_MRT4530_13435C.1.pep
MCTNMYSPSHCKXTSRSIKLLXTHHHPLFRGFHLSXGGTWHLTXRLHRLRSPVKGXVLRSASSGNCIGYVGVLQSCITSISWIALVRLIXLPAYLSYILANLVW

SEQ ID NO: 109262 - protein, 65 aa, Oryza sativa
  Clone ID: PAT_MRT4530_13436C.1.pep
PFSIIPTILTDEKQLEVLNLCKCVLTVLMVPLISDNNVLGCHLLGRQTNIAITLCYLCYFLNIII

SEQ ID NO: 109263 - protein, 416 aa, Oryza sativa
  Clone ID: PAT_MRT4530_13437C.1.pep
MASSTSDIPEGREKLKRSGSLGSSDTAYVRADKIDLTSLDIQLEKQLTKTWGKANLKAHGPKEDWEIDLAKLEIRYVIAQGTYGTVYRGTYDGQDVAANKIFLQSLKLNIPYSMLHVFLLDKDLLSLTPWLSSQVKLLDWGEDGFATEAETAALRTSFKQEVAVWHKLSHPNVTKFVGASMGTTDLKIPTNNSNAGARTNLPARACCVVVEYLAGGTLKQYLIKNSRRKLAYKVVVQLALDLARGLSYLHSRKIVHRDVKTENMLLDTQRNLKIADFGVARVEAQNPKDMTGATGTLGYMAPEVLDGKPYNRKCDVYSFGICLWEIYCCDMPYPDLSFADVSSAVVHQNLRPDVPRCCPSAFANIMRKCWDANPDKRPDMDEVVQLLEALDTSKGGGMIPDGQSSGCLCFTKARGP

SEQ ID NO: 109264 - protein, 163 aa, Oryza sativa
  unsure (1)..(163): unsure at all Xaa locations
  Clone ID: PAT_MRT4530_13438C.1.pep
MFFTGMKKFKKHQNMIFGHIGXIGCVSGKKSLRDSHGELLXINTYIGTRGCDVFHCNQKVQKAPKHDFWTYWSVLDTFVAKNHFVIRVANFCQFMPILTHVGAMFFDRNEKVQKAPKHDFWTYWMLYWMRSWQKNHFVIRAANFSQFIPILAYIGTHGCDVFH

SEQ ID NO: 109265 - protein, 852 aa, Oryza sativa
  Clone ID: PAT_MRT4530_13439C.1.pep
MRRHPLLPLLAAVLVGAAVRAGKIATEVVVPDFVASYLLFIDTYGVFLQSGGGGAFQAVVYNPAGQQDRYYLAVVHAPSKTCVWVANRDAPITDRAAPLRLTARGISAEDPNGTVRLPVGGFLASAVSDSDYTVGGYRLDVTAADAALTWNGSLYWLLSIDVKSTRDRDGAVASMAVNGTGLYLLAADDTVLIQLPLPDAKLRIVKLGVEGKLVITSYASANATSPSPTDAGFVAPNSGCDLPLSCGALGFCAPNGNASSCTCPPLFASSHDGGCTPADGSKAMTVASCGGAGGDAAPTSYISLGNGVAYYANRFSRPDMVGSNGSSCQALCSGNCSCLGYFYDESSLSCFLVQHQIGSLVNANSRRGDMVGFIKVQSSQSPGSPSGSSSNNSTLIAILLPTIVAFVLVVVVGAVIVVSWRKQERRAGRRASRSRDVQLRRHRSPASDSAHLVYGNDDDGNDIVIPGLPTRFTHEEIEDMTNSFRIKIGAGGFGAVYKGELPDSSAVAVKKIEGVGMQGKREFCTEIAVIGNIRHVNLVRLRGFCVEGQRRLLVYEYMNRGSLDRTLFRPAAGQPLEWKERMEVAIGAARGLAYLHFGCDQRIIHCDVKPENILLADGGQVKIADFGLAKLLTPEQSGLFTTMRGTRGYLAPEWLTNTAITDRTDVYSFGMVLLELVRGRKNRSEHVSDGAGAATGDDSNSSNGTTGSSSRGARSDYFPLMALEGHEAGQYAALADPRLEGKVVAGEVERVVKVGLCCLHEDPQLRPSMAMVAGMLEGTMELWEPRVQSLGFLRLYGRGFAGPADGSGGSGGGIKQAMAGSNGDHTRSGTTTVTTMSGWPSYMSSSQLSGPR

SEQ ID NO: 109266 - protein, 115 aa, Oryza sativa
  unsure (1)..(115): unsure at all Xaa locations
  Clone ID: PAT_MRT4530_1343C.1.pep
MGAGMSSGRRTSWYGGGGGSGVCRPRGMLPLLALQVLLEYGRAGASRTPVTAALLINNALLNLRPXLLDALLPSLKLVPFNHHLIIHXLDLXTRFFLADFYHLRETHYFFNKSSV

SEQ ID NO: 109267 - protein, 153 aa, Oryza sativa
  Clone ID: PAT_MRT4530_13440C.1.pep
FFFFFLHSNIARGWPSFSFIITRRKHHSQAQPHLHLSPLHWPFHQAQWAITELKFTTHSTSSTTTHTHATAHHTHMGGFPHPVTSALWVTTAQQPTGSLNVSLSTTSLFLGTPMAVIPLHATRKNSKHIQAETGKLVNSPLPRSLLFPLFCPS

SEQ ID NO: 109268 - protein, 905 aa, Oryza sativa
  Clone ID: PAT_MRT4530_13441C.1.pep
MCSPPSMRRHPLLPLLAAVLVGAAVRAGKIATEVVVPDFVASYLLFIDTYGVFLQSGGGGAFQAVVYNPAGQQDRYYLAVVHAPSKTCVWVANRDAPITDRAAPLRLTARGISAEDPNGTVVWSTPAFASPVAALRLDESGNLALLDGRNRTLWQSFDRPTDVLVSPQRLPVGGFLASAVSDSDYTVGGYRLDVTAADAALTWNGSLYWLLSIDVKSTRDRDGAVASMAVNGTGLYLLAADDTVLIQLPLPDAKLRIVKLGVEGKLVITSYASANATSPSPTDAGFVAPNSGCDLPLSCGALGFCAPNGNASSCTCPPLFASSHDGGCTPADGSKAMTVASCGGAGGDAAPTSYISLGNGVAYYANRFSRPDMVGSNGSSCQALCSGNCSCLGYFYDESSLSCFLVQHQIGSLVNANSRRGDMVGFIKVQSSQSPGSPSGSSSNNSTLIAILLPTIVAFVLVVVVGAVIVVSWRKQERRAGRRASRSRDVQLRRHRSPASDSAHLVYGNDDDGNDIVIPGLPTRFTHEEIEDMTNSFRIKIGAGGFGAVYKGELPDSSAVAVKKIEGVGMQGKREFCTEIAVIGNIRHVNLVRLRGFCVEGQRRLLVYEYMNRGSLDRTLFRPAAGQPLEWKERMEVAIGAARGLAYLHFGCDQRIIHCDVKPENILLADGGQVKIADFGLAKLLTPEQSGLFTTMRGTRGYLAPEWLTNTAITDRTDVYSFGMVLLELVRGRKNRSEHVSDGAGAATGDDSNSSNGTTGSSSRGARSDYFPLMALEGHEAGQYAALADPRLEGKVVAGEVERVVKVGLCCLHEDPQLRPSMAMVAGMLEGTMELWEPRVQSLGFLRLYGRGFAGPADGSGGSGGGIKQAMAGSNGDHTRSGTTTVTTMSGWPSYMSSSQLSGPR

SEQ ID NO: 109269 - protein, 750 aa, Oryza sativa
  Clone ID: PAT_MRT4530_13442C.1.pep
MSASQNLHRLPEFCVIPATACSREPGLPRIVIRSNMGSDDNKRFDDFHVITNGPGSDAYSNEESINLDSYIAPSTSFCSKIYNPQLYVEKGNGTTDWCQTSGGDYPEKSSINSDITLSYIDKILMQEDIDDRGNEDTALQAMEEPFYELLGEKYPAFPQQQPLCVCDHLQNLSANTDKSNGHACNTWSVTRMTNISSSMNSNGNFQGFQFPWSLSSITRETEQFTHHSNRMVVGLKVDGLSISEKPSQDNCSLQIDAHYMRKHPLFEVHDRKSYPCIEDLDLLEGRSNKQYAIYYDEPIRDEMFDNVLLCSDHKPLDEGVSLSRAMTNNSSKSSQIGQGKTSARRKTTGKRIQKRDVVDLRTLLINCAQAVSVSNHSLASDILKIIRHHASPTGDDSQRLALCLAYCLDVRLTGTGSQIYHKFITKRRNVKDILKVHIIDFGICFGFQWPSLFEELAKIEDGPPKLRITGIELPESGFRPYARSNNIGLRLADYAKTFNIPFEYQHISSNKWEALSPEDFNIEKDEVLIVNCIYRIKDLGDETISINSARSRVLNTIRMMKPKVFVQGVLNGSYGVPFFLTRFKEVMYHYNSLFDMLDKNIPRDNETRMIIERDIYQYIMLNVIACEGPERIERPESYKKWKVRNLKAGLVQLPLNPAIVRETQDMSSDKASIRLCLVCYGNIYDSYHVSGDTREVSCDTYQVSDDFYHVSGDTREISCDTYQVLDDFYHVSGDTYEISDDTYRISGDSY

SEQ ID NO: 109270 - protein, 65 aa, Oryza sativa
  unsure (1)..(65): unsure at all Xaa locations
  Clone ID: PAT_MRT4530_13443C.1.pep
AXAARSGASLEQSFRCHRTXHLXSMDNIHLTLLLSKVMMNLQCTITXGENQIDXCRHIDTMHHSK

SEQ ID NO: 109271 - protein, 119 aa, Oryza sativa
  Clone ID: PAT_MRT4530_13444C.1.pep
MPYLGTRSELQRPREEKYAGGKWSPVSGESGRRKVIEDGASGAEQVGRRAGEAGRRVEWLRPAEPSGWRRAKPVGGWSRPAEPSGWRAGGGGARSGGLGGAARARCRCRPPHHAPMAVN

SEQ ID NO: 109272 - protein, 78 aa, Oryza sativa
  Clone ID: PAT_MRT4530_13445C.1.pep
KERKMHDCSAAVDETRKSKAGLPLEILAHVRDEVMGGMDHTNVMTKSTYTRLSRKSPLSCNAAPAQVSEFVSPYSGNN

SEQ ID NO: 109273 - protein, 302 aa, Oryza sativa
  Clone ID: PAT_MRT4530_13446C.1.pep
MARRGRTSIVREVKESLQTIDKIGESKRDAKKAGTSGIHSIKQMTNTMSDAQNFVKWCRSEHGIKSICELNERHYVSYLAHLSEKGVSQGHRVNVETSLRLLEKGFKERSKRFSDHLFTSIRFCPERRLEKPLTGSDAKNRSYTENEVQLIRENCSEEVTKAVDLMHEMGLRVKEAVNVRVEHFIPNDKGTGWCLAISNGSGITKGGRFRQLNVPQHLEKKLESWIADKPPEERIVNVSYSTKQMMNRVLENRKMGRAADYGILSERDKQLYTTAKRAMDQIHSELGHGKNRWALAMRYMGE

SEQ ID NO: 109274 - protein, 130 aa, Oryza sativa
  unsure (1)..(130): unsure at all Xaa locations
  Clone ID: PAT_MRT4530_13447C.1.pep
RALAINPEKARTEVRASRHSMGRTGVADLMDGMGLGELADPPAELKLEELSNTPAPRLDEALEISMVMHFVEAHEPTMHTLIVLDTAATGHTLSGXYLPDMLDASIAKISMLMSKSAYASSAVASDLGAA

SEQ ID NO: 109275 - protein, 413 aa, Oryza sativa
  Clone ID: PAT_MRT4530_13448C.1.pep
MATRKRLAGAALGCLSLFLLSRALLFSQDDPEPVKRPDEASSISLPPDRIAIIAAAPAPSPATAAASDGSPAPAQDEVRCDLFDGSWVYDPAGYPLYDAGECPFLSDQVTCRRNGRPDSGYEHWRWQPRRCAAALRLRGGEMLEQCRDKRVVLVGDSLNRNMWESLACILYAAAPDRSRATVDDASADHKIFQALDYNCTVEFYWSPFLVDLDDQTRVLKLDRLPATTYRRLAAADVLVFNTGHWWTHTGKFRAWDHLERNGKKVEMGAEEAFNRALRTWTRWLDRNVDSHKTMVFFRSISPEHKNKNWCYNETAPMARAEEYVEAFPRGMVSIVERNVRRARTAVGYLDITRLSELRRDAHPSVFTVRGGKLLTPEQRRQPGSYADCSHWCLPGLPDTWNLLLFASWTSLRS

SEQ ID NO: 109276 - protein, 154 aa, Oryza sativa
  Clone ID: PAT_MRT4530_13449C.1.pep
RRPRSSDQWRPCRRAARSARRRRRTGRPTSSRRSGTAWRASGCWPVRSPSSGRRKIPARRACAAQRGRGARARLPRQRGAAASGSRGEGRRQSVHTERRAPRKPEPRDSYRARKEPRTLRRAPRASANTCETVSNAQCARTGRAEDGHTRSARE

SEQ ID NO: 109277 - protein, 110 aa, Oryza sativa
  Clone ID: PAT_MRT4530_1344C.1.pep
LKEPVDVKECPIYILPVTDQRRNAVSGQPTLGTGRKTHVCVRVPCHALNGMVCYNVVCLHVFQGGHSPEAVTGPHRGERARVPLTLLDFTHTIIYPTDYRDESGKRELHE

SEQ ID NO: 109278 - protein, 44 aa, Oryza sativa
  Clone ID: PAT_MRT4530_13450C.1.pep
LQCIYKFIFGSLHTHLPTKGGLRGMRNLSVLLFLGGSECTKLIS

SEQ ID NO: 109279 - protein, 300 aa, Oryza sativa
  Clone ID: PAT_MRT4530_13451C.1.pep
MEFGGAIDDQSEMWGWQSQEYDLQKDLLAEEAADPSSCLWSEANQNAGDAWTMFDEQTPIKHCTDIDFQFCDIGDIIVKDFDEGKETLQAKRRRMLQFCSDNVEMDCAMAADGLSENLQLNLGFSEMTPGDQCLLNCDGTEELPEEWLVDCSPQESEPQCPPEDMSVHLSSPAVAMEEANLSVHKNSSSREQGNTVQKNTVQARPTPLKAGKNIIRARKVKTSVVYPFELIKPCGFHGDVTLHDINQRIHAPPPYKIKHKIDEEQLSYQTSAISGKPVVHKTKIHTEGGKGSITITRTRG

SEQ ID NO: 109280 - protein, 86 aa, Oryza sativa
  unsure (1)..(86): unsure at all Xaa locations
  Clone ID: PAT_MRT4530_13452C.1.pep
TWSSRGPPRQRPTRRSPRRRPSGRGSRARCRRGSPPSSPPGSRRRXCPPRGGRARARAPPPPSSRAAAASASSSPRPPPPPRRKLA

SEQ ID NO: 109281 - protein, 69 aa, Oryza sativa
  Clone ID: PAT_MRT4530_13453C.1.pep
LDLNSAASKVHHRSLNLYRCVIPVPKLANRPFRSSNLFDCVIPIPKLADHLFRSSNLFSCVTLALNRTV

SEQ ID NO: 109282 - protein, 77 aa, Oryza sativa
  Clone ID: PAT_MRT4530_13454C.1.pep
ELKSHLLNKYSGYLSSLWRELSKKKKKGKLPRDARQKLLHWWQLHYRWPYPSELEKAALAESTGLDAKQINNWFINQ

SEQ ID NO: 109283 - protein, 189 aa, Oryza sativa
  Clone ID: PAT_MRT4530_13455C.1.pep
HEAFPLLWPSAYIAHRMANCRSAAAHSKAFKTSPLSAPALSCSPRKPSPAVQRSSRGNLRVAAAVQEGRRVAAHAVSAVPSEAALELVEASDLSAASCVSVPSHEPVPEESLGQRLLRGYDAALRSNPVQTKALTSFVGFALGDVLAQGILGDGFDVLRCLRLSLYGLLLDGPIGQAWYQQLDSRVYPD

SEQ ID NO: 109284 - protein, 69 aa, Oryza sativa
  Clone ID: PAT_MRT4530_13456C.1.pep
KSDDVVMSRSSGVRPSFPSALLPIGPMGARPSLLPFPSGTGLGPLTLVVPKIPQSRPHASQRTHCVELT

SEQ ID NO: 109285 - protein, 268 aa, Oryza sativa
  unsure (1)..(268): unsure at all Xaa locations
  Clone ID: PAT_MRT4530_13457C.1.pep
SLLLHHGLWQQLIRNKYLGSQPLSQSYWKAGDSHFWASLMKAKXRFFRFGSFRIRDGSQIRFWKDKXLGNASLRDQYPCLYNIVRHKQSTISQIFQTNPPNFSWRRDLIGAKLAAWHNLLPRIADLVLTQEQDEFHWNLTPNGVFLVNSHYIALVHTGVPNINRRIWKIKVPLKVKVFLXYLRRGVILTKDNLAKRNWKGSKKCCFCHKDETIQHLFFQCHLSRDTIAVVSRHLDQVARDVFTQEHGWRSSLQIDMPSSVKPPLLLGV

SEQ ID NO: 109286 - protein, 50 aa, Oryza sativa
  Clone ID: PAT_MRT4530_13458C.1.pep
ITGCTHDLIKDTLILFIEILHPHSRILHRVGDWTETFFGMIASFPFCTQL

SEQ ID NO: 109287 - protein, 96 aa, Oryza sativa
  unsure (1)..(96): unsure at all Xaa locations
  Clone ID: PAT_MRT4530_13459C.1.pep
SYLTKRIHNAGAQTVDDEARPGSQTQSMAFAVAKXVHACLRALHDDADGVQCAYVAYAVTKVAVFAPKVRIGRAGTEEVLPMRHGKDVERAGLGDG

SEQ ID NO: 109288 - protein, 106 aa, Oryza sativa
  Clone ID: PAT_MRT4530_1345C.1.pep
SDGRRSLSLSLGSGRRPAMSPPREGAASGARGAEGMVGSAEEGMGGGALRRRGRRPSTSAHRPSSPSIGATQPRQRFPFPGRRARRSRRHLILLALLLLPRPVGGA

SEQ ID NO: 109289 - protein, 490 aa, Oryza sativa
  Clone ID: PAT_MRT4530_13460C.1.pep
MGKKRKLDSKSPAAARSAAARAAAAAAAAAAAAAVAEPSSQPEALAEDPAPSSQPLGLSSEGAGERMMSREAGGGEEEEVEEVEVEEEVEVDEDEDGEGEGEEEEEAAERDADSIQALLNSFPKDQLVELLSAAALSHEDVLTAVHRAADADPALRKIFVHGLGWDATAETLTEAFSAYGEIEDLRVVTDRATGKCKGYGFILFSRRSGARAALREPQKKIGNRTTACQLASVGPVPPGGMATNPAPAVAPAPAQLALPPVSEYTQRKIFVSNVGADIDPQKLLQFFSKYGEIEEGPLGLDKVTGKPKGFALFVYKTLDSAKKALQEPHKQFEGVVLHCQKAIDGPKPNKGGGLGGLYGAGTSGGRKGAGGYGAHSHSLPGAAVGGHVMPSPVSSLTSLPGVAGGPGVNPALGQALTAILASQGGGLGLNNILGVGANGSGLPNPGASAGLGSSGLPGMPGAGGYLGGYGGGGGYGSTPPGGPGRNYMGH

SEQ ID NO: 109290 - protein, 742 aa, Oryza sativa
  Clone ID: PAT_MRT4530_13461C.1.pep
MSLSKTIGFISGVNECVNLFQWARSAISSLHTRWSGTQDQKLQDEVLQLQSGLQRLKDTLPAMYDLIDRAEWRSHEDCVAKLLPNLKDAVYNADDLLDEFRWYEQKVALEGNAASQSPFLEFFDCVIQGRFNKVTDIIERLNNVSSELEKLGLREIPQRFDKTLRPETSSFPSDREIYGRDNELEKVMELLSVPKNYTGVHSKRKRGSNDASTSTSTSNQVSVPILPIVGIGGVGKTTLAQHICNHLLVKSHFDPVIWIFVSDDFDVKRLTKEAIESASGKEAKTDHLDSIQHVLRENVKNKRILIILDDVWDDALKENGQCWKKFCSPLANVCQGSMMLITTRSSKVSNALGTLEPFTVNCLQNDIFWDFFKLCAFGSDSSNNDPELECIGRSILPKLKGSPLAAKTLGRLLRMDHHTTHWKNVQKSELWELKQEETDILPALQLSYMYLPLHLKRCFSFCAVYPKDYNFEKDSLCEIWVAEGFVEPEGDIPILDTSKKYFEDLCFNALECVVESLPCDFDRLINLRRYKSQGFVYDRMGQLHLGTHWEHEVRLMKNFNQFYGDLRLSNLGALSKDLAAEIKLNRKRYIGSLTLQWCLWISQEHNEMEVFQVLHPPTSLRSLKLMYYLGESLPCWFQEQNGCNEIAGVIANNNNGCISVFSSLTYLDISDCEKLSNLNQFLQNLDIKWCPSLTFIGESEPADFTNLSHQELCIEDCPDLVSIGRGKLIAKLKKGGMAGKIG

SEQ ID NO: 109291 - protein, 68 aa, Oryza sativa
  unsure (1)..(68): unsure at all Xaa locations
  Clone ID: PAT_MRT4530_13462C.1.pep
LPGYISLCLYCTQHQLDHHLXALNPYFPTQRLTTYLSQMHPTTINHCLATGPHFTCPGQNWLRTPRPL

SEQ ID NO: 109292 - protein, 76 aa, Oryza sativa
  Clone ID: PAT_MRT4530_13463C.1.pep
MGKTDSLKCEDASGEIRSREGYHSDETVARYGRAQAWVQWREMGAWMLMKKGDRNDWLEKEARGIVLRLADHGGWA

SEQ ID NO: 109293 - protein, 138 aa, Oryza sativa
  Clone ID: PAT_MRT4530_13464C.1.pep
MWPGRGTVCDQEGSWCTATCRSPRCGCQVVEGRGLEARCPAVIVAVTIIVVVADAARSTSFTTVEDPSSRRPDPTLSSRRLAAKRRRPHAAIEERRRPRPAAAERRRPCVAGGRPGKKERKRGADMRRTADAVGTGPP

SEQ ID NO: 109294 - protein, 459 aa, Oryza sativa
  Clone ID: PAT_MRT4530_13465C.1.pep
MEIVGECIYNNPPVLVTPSKPTPKLALYLSNLDDQRLLHFPIQYIYVFTGTLDMDTLKVALSRVLVDYYPLAGRLRASNEHDGKLIIDCNSEGVLFAEGFLPGLTAGDFILGHAKPHKSWKKLLYKDEQSFVCTPPLVVQVTHLSCGGTILCTAIAHCVSDAFGAAHFLRAWARAAMSEDSELAHPAVAPCHDRRALAPRCTPRIAFAHPEYTAASGGDDASAVAEASSRLFAPPLSPVSVTFTAAHVARLKKLYAPSASPLEQCTSFEALAAHVWRAWVRALDPPASLPIKLLFTMGIRRLVKPELSGGCYCGNGFVLACAESTAGQLAASAPDAARLVQETKQRVDDDYVRSVIDLLEVRRGCLPDLAATFTISSLTRQGLEDIDFGAGTPVHFGPLTSEVYCLFLPVIGDPRGATALVSVPQAAADSFERCCHDGLDDVDVEDKNQLPNIGDGMAS

SEQ ID NO: 109295 - protein, 347 aa, Oryza sativa
  Clone ID: PAT_MRT4530_13466C.1.pep
MTAGFQLGVIGSLTLSVASSVSIVICNKALISTLGFPFATTLTSWHLMVTFCTLHVAQRMRFFEPKAIDGQTVILFGLLNGTSIGLLNLSLGFNSIGFYQMTKLAIIPFTVMLETIFLKKRFSESIKFSLLILLLGVGIASVTDLKLNLLGSVLSGLAIATTCVGQIVSYSLNTTVNHSDSISCIFSALPIHAPYRAILAAKRILLLPAFILNPLNLNEAHQHNTEEGFIVLSCLIAVSVNFSTFLVIGTTSPVTYQVLGHLKTCLVLSFGYTLLHDPFTMRNILGILVAIFGMALYSYFSVRESKKKSAGDPLPVSQMPEKEVEPLLATKDVNGDTKKANGVTHDC

SEQ ID NO: 109296 - protein, 47 aa, Oryza sativa
  unsure (1)..(47): unsure at all Xaa locations
  Clone ID: PAT_MRT4530_13467C.1.pep
PACIEGGGQGAQQAGYLPVPXECTVPVAKNFDPQARRDTGXSCLYTI

SEQ ID NO: 109297 - protein, 138 aa, Oryza sativa
  Clone ID: PAT_MRT4530_13468C.1.pep
SDETEPFCKKRAQQQDHHRRRQRPLDAAGVPEDRRRHVHGAAEEQDRPRRRRRRGGAAPPHPVHDEQQPRREDRARQDELQLLGSFHRRRPAPLAAAAADGVEGQEGHRREHRREARADEVPAASASRLVGAPWLPAH

SEQ ID NO: 109298 - protein, 126 aa, Oryza sativa
  Clone ID: PAT_MRT4530_13469C.1.pep
MEGQAAEDLAASALAARGLVTPPGDLGFDALAVVANGHVQQNANASALAAARTLLPNAPLPAAMEFNLPVLQVQSWQLQQVQERLAAYQPSQASQCSSHGQAPAGQPSQAAASQPGDQLAAWEHVS

SEQ ID NO: 109299 - protein, 718 aa, Oryza sativa
  Clone ID: PAT_MRT4530_1346C.1.pep
MTSSSTAAAAIQSASSSTLSPHAAPFALPVRPARAPLQDGDVSRSMDGSIVVHGLDNKILGDAHPSSSSATSCFRTQSFDTVLPASTCGANASQPREWPEIGSDAAYPSSICSTSVVFSYPSVMMASNHNQKNPLYPGMGSNGSRCSTVKIESPPNKISEANKISCGLTSKSSMTKDVSKSNEDAVKNAPFPQILEVGMEICSKEASPVSHTRPLHISTAGSDPCDSMADGVKTEPSECYVDSPCWRGRGTSLSHQTSVTQLINQESEAFDAGQKKSTSTVQHCEVLTASQNLDTIENKQNQSQSHVELSVSMKSGDNGKKEEEVSHNKELESAKQCAAKCTAEQKHSLELRDNSVKRSGLNFAAPDFIPSSVGKSKIVKGSCSTTGRNTSGILKAMGNLSEMLRDSCLLDENELDEHEHTLLQSVIENLQTCIDRKKKGPINDDGSNKAGLRAPHSQSAVLKSYAGDYRGSCTTNGGNGITVNKSVGPTRVLSDFGKNSLTWSQPSFNNIPRMISCEEDHSQILIYKNLWIDAERTNCELKYLLKQNRIKIGQESSMAHIGGPRNPSFQACDLGAGPSNSYGAAISYPPTLSFPKGDSTEETSRARNTDLLYTGDCIRLGDNSVPSCSASTISHPTRPNNFQGDLLTGLEETGLHHHAQPVPQLAPSRVHREPRISTMDEASGHSCFTGADGILSGNSEYGLSSDWEHVLKEEIGWS

SEQ ID NO: 109300 - protein, 153 aa, Oryza sativa
  unsure (1)..(153): unsure at all Xaa locations
  Clone ID: PAT_MRT4530_13470C.1.pep
MAPKAEKKPAEKKPAEEKAGEKAPAGREEAQGREAACRRPRGRRAARARRSAAGRRPKKSVETYQDIHPSKVLKQVHPDIGISSKAMSIMNSFINDIFEKLAGEXAKLARYNKKPTITSREIXQTSVRLVLPGELAKHAVSEGTKAVTKLTSS

SEQ ID NO: 109301 - protein, 39 aa, Oryza sativa
  Clone ID: PAT_MRT4530_13471C.1.pep
MGITGSCKIQFALPLEKREKFHPPPDCCQCRPGLGCCTA

SEQ ID NO: 109302 - protein, 76 aa, Oryza sativa
  Clone ID: PAT_MRT4530_13472C.1.pep
RALVLYIGRPLFFFLFCFFFFFFFFFLTRFFLLNQTKKNRIMGKFSLGYNELAEWTLETKNGPINLSRPFFIYGHG

SEQ ID NO: 109303 - protein, 84 aa, Oryza sativa
  unsure (1)..(84): unsure at all Xaa locations
  Clone ID: PAT_MRT4530_13473C.1.pep
LLCFRNDLHLELRFDSFFISDTLXKLRPLSLSGDPLGAQGDFQAISPPAKFPPAGMSTSASPSVAPSAEYAEVCAHRLDPFSPH

SEQ ID NO: 109304 - protein, 73 aa, Oryza sativa
  Clone ID: PAT_MRT4530_13474C.1.pep
MSARPATSVASAALDRSRPRPSVTVPRALRFVYTASVYVAGSPLHRRAAPNGATPVPVAPDATSLLDSAATTW

SEQ ID NO: 109305 - protein, 127 aa, Oryza sativa
  unsure (1)..(127): unsure at all Xaa locations
  Clone ID: PAT_MRT4530_13475C.1.pep
RSRLSSPASPPPLAPLLPDADAAGRGRRSSPAPTRPWRPLPWTPPPAPLXPGADAASCGRRRPRRLLPGAHAAVDAAARAAPPWRPRGRGSHRPRRSXPAPLLGSSPCSLSLLSQHVSERGPQRSLA

SEQ ID NO: 109306 - protein, 67 aa, Oryza sativa
  Clone ID: PAT_MRT4530_13476C.1.pep
TIMLIRDRWSIGKGYHSDNMLVAYPARVEKVMNFHALEKAPALRLTNFIDMWTQEHRLGVRAVIARR

SEQ ID NO: 109307 - protein, 150 aa, Oryza sativa
  Clone ID: PAT_MRT4530_13477C.1.pep
SGSPGLQGLLVQIHSKCVKLCLPTACAHPEGTLLPSPVCADWYPDVTISVGAVGHNVVVVATSNPCCLYILGVRSLSSFQYELYEIQHVQLHYEVSCISIPQEDWRLDNSSSSCATSGDFRKDFAANIRKFAVIGTHEPSVHIISLEPGE

SEQ ID NO: 109308 - protein, 327 aa, Oryza sativa
  Clone ID: PAT_MRT4530_13478C.1.pep
MAATTRSPSPELRKPNHRAIEFASTSGSYISPREGGKYMPRRANVIFTEAQESASSLTVGERLCAAFLPFVAIAEAVFFALTDCLADLLPPSAAASRHRRSAASSYLAAVARKWNHQQRGRVGIGCTSLTLRQLARLADESRCFSVNEVEALFELYKKISCSIIDDGLIHKEELQLALFKTPSGQNLFLDRVFDLFDEKKNGVIEFDEFIHALSVFHPLAPLEDKINFAFRLYDLRQTGFIEREEVMQMVIAILSESDMKLSEELLEAIIDKTFEDADADRDGKINQQEWKEFVLRHPNLLKNMTLPYLRDITTVFPSFVFNTAVED

SEQ ID NO: 109309 - protein, 56 aa, Oryza sativa
  Clone ID: PAT_MRT4530_13479C.1.pep
KVLAGNWFPLCEPACFLTDPTKFFGGGPFVECRGVFLGGLFYYFSGRVSWLSRLVF

SEQ ID NO: 109310 - protein, 75 aa, Oryza sativa
  unsure (1)..(75): unsure at all Xaa locations
  Clone ID: PAT_MRT4530_1347C.1.pep
FFFFFFFLIKLRXGICQSMQMCHNNSYYYYTLIPVHPPQTNLLNKTQSGVSFCPYEFFFYXHXRQTVYLCNAFVF

SEQ ID NO: 109311 - protein, 77 aa, Oryza sativa
  unsure (1)..(77): unsure at all Xaa locations
  Clone ID: PAT_MRT4530_13480C.1.pep
IWDTQPLKGGKFLPRSFGQNPLAKRPLPVDPPWAGQVKKNSPNGKVKPPPPNFXHQKGPNFQDPNDKNPQNPKTHSQ

SEQ ID NO: 109312 - protein, 150 aa, Oryza sativa
  Clone ID: PAT_MRT4530_13481C.1.pep
MAMISAKRIAQLAKKWRRMAALGRKRLTMSSTAMATEEAQGCSTAVAGKGHCAIYTADGARFEVPLAYLGTAVLGELLTMSREEYGFSGDGKITLPCDAMVMEYVLCLLGRNASAEVEKAFLSSMVMPCHYASCVTPSLGACQQVAVCSN

SEQ ID NO: 109313 - protein, 77 aa, Oryza sativa
  unsure (1)..(77): unsure at all Xaa locations
  Clone ID: PAT_MRT4530_13482C.1.pep
MDSPATPVGLSSPLHSLVLGRRRRRGRSGGDLRLDDNSGVPVVFGXNGGWDEDGDDLANPTVAFPSDDDDRSGGGSR

SEQ ID NO: 109314 - protein, 34 aa, Oryza sativa
  Clone ID: PAT_MRT4530_13483C.1.pep
RSSKSGGVEKSHSRHLGPAGCPQRDKVHHECQAG

SEQ ID NO: 109315 - protein, 52 aa, Oryza sativa
  Clone ID: PAT_MRT4530_13484C.1.pep
MGACGGYDRGAREGRVQRRRQLAKTSGLGTGDGIGGQGMDGGVDCQARRRRQ

SEQ ID NO: 109316 - protein, 91 aa, Oryza sativa
  Clone ID: PAT_MRT4530_13485C.1.pep
MPIDVVWGRGKRMWDVIVLGMMAIGPPAKGASVNIVLSRANPFLTQRMAGQLRQVRWQEDVMELAAMLGEEDAAFDLDASGTGDKGKQCHV

SEQ ID NO: 109317 - protein, 74 aa, Oryza sativa
  Clone ID: PAT_MRT4530_13486C.1.pep
SGVVALWMPIHCTFGVVVAPPGVPPGPRVWFFLPPFSPLKILRFRPPGKIFGVVGLFGGAHFFFFPPGVHCGWG

SEQ ID NO: 109318 - protein, 413 aa, Oryza sativa
  Clone ID: PAT_MRT4530_13487C.1.pep
MLYHDVTASLRAPGRHPVTKLSVLATGSEERRCQEVLASGDRYSHHEFCVIDGVLFEQAMHRTEELRVQIDCGNDDRSSLTYVYRLRLISSIPGDTIRILELASCRIELPPPDHAAPFPFPRLAVLRLERCSSPMRDLATLISAAPNLATLHIARHNFCWYPERDFDDGRFVLHCPSLTSLTLDNDITCIEGIRDAIASTFWKFLGSLRNTKSLKLNVPAMGSIPLLDNGDNIVFENLKHLEVECDPETDGWHHSKKGSAMSVATLLRCFPVIHELKLALESTSSKFMSFRSRRARGRKSLLFTEFNTSRDLFNNRRTMLDDDDESSEFEEVADLPGLTGCGFDCLQNHLKRVVLQFQMEDVNCFGVRLAKFFAETCKVLDVLQVDDGVHNFRRHINNNVDKWRDNESEKQKR

SEQ ID NO: 109319 - protein, 797 aa, Oryza sativa
  Clone ID: PAT_MRT4530_13488C.1.pep
MLSVHVFIGLLLLSLHAPPYSAAVDDTLAAGQVLAVGEKLVSRNGKFALGFFQPSAIAISKSSNYTNALGWYLAIWFNKIPVFTTVWVANRERPITVPRLNSTWLKMSGDGNLYILDHATNSIIWSTDHVVNTTTETGMNTSATLLNSGNLVIRNPSGVVSWQSFDNPTDVVLPGAKFGWNKATGLNRLGISKKSLIDPGLGSYSVELDTTGARGLILKHRNPSMEYWSSDRALIIPVLKSLFEMDPRTRGLITPAYVDNSEEEYYIYTMSDESSSVFVSLDVNGQIKMYVWSRANQSWQSIYAQPVDPCTPSATCGPFTICNGNSTQTCDCMESFSVKSLWDWELDDRTGGCIRDTPLHCVSDKNMTSSTDMFQPIGLVTLPYDPQIMQDATTQGECAQACLSDCSCTAYSYQNSRCSVWHGKLLNVNKNDGIYINADNVLHLRLAATDFQDLSKNKRKTNVELVVGASIVSFVLALIMILLMIRGNKFKCCGAPFHDNEGRGGIIAFRYTDLAHATKNFSEKLGAGGFGSVFKGVLTNMATIAVKKLDGAHQGEKQFRAEVSSIGIIQHINLVKLIGYCCEGDKRLLVYEHMLNGSLDVHLFQSHAAVLNWITMHQIAIGVARGLSYLHESCRECIIHCDIKPENILLDISYFPKLADFGMATFVGRDFSRVLTTFRGTVGFGMVLFEIISGRRNSPEVHTSGNYDATYFPVRAINKLHEGDMSSLVDPRLHGDYNLDEVVRVCKVACWCIQDDEFDRPTMREVVRVLEGLQELDMPPMPRLLATLTNFSAVASM

SEQ ID NO: 109320 - protein, 208 aa, Oryza sativa
  Clone ID: PAT_MRT4530_13489C.1.pep
MVLATSQGVKPSRAQADICMKSQQSKSGMIHTGILSYSLTITIEFCKLCGLELRAGLPLSFLEGLPPSRGRAVTAVTAETRAKFTSKNLNSKIGGFTINSYLLVGIGWSSKASGCYRLKAGRTFTNRRLCRSGAGGDDDSNAAWIGRPRRIRAPTGWSSFGGCGWLEDRPPATRLKQIEGRSSAAWSGAREWNTSSDNSSTLSSSNAG

SEQ ID NO: 109321 - protein, 86 aa, Oryza sativa
  Clone ID: PAT_MRT4530_1348C.1.pep
PKNFGQKKRAGAFKKQKGVIKFSKRPLLRGLGGTLQVFGFQLKRGWGKLIPGATKKAPWAIVGAKLKRFVKASQNFFFGGKKKILP

SEQ ID NO: 109322 - protein, 86 aa, Oryza sativa
  unsure (1)..(86): unsure at all Xaa locations
  Clone ID: PAT_MRT4530_13490C.1.pep
WPSPSLIPVSTLLPGPATTQEDELLLSMAECDLRGXLNEICETNSNLVMIGKPTGDAXEEYDDEAEDDDADHVQECDGHDFDQESG

SEQ ID NO: 109323 - protein, 534 aa, Oryza sativa
  Clone ID: PAT_MRT4530_13491C.1.pep
MSLRPSERAEVRRSRYKVAVDADEGRRRREDNMVEIRKSRREESLLKKRRDGLPAAAAAAAAASPLLAHSSALQQKLEGLPAMVQAVQSDDSAVQLEATTQFRKLLSIERSPPIEEVINTGVVPRFIAFLQREDYPQLQFEAAWALTNIASGTSDNTKVVVESGAVPIFVKLLSSPSEDVREQAVWALGNVAGDSPKCRDLVLASGGLYPLLQQLNEHAKLSMLRNATWTLSNFCRGKPQPNFEQVKPALSALQRLIHSQDEEVLTDACWALSYLSDGTNDKIQAVIESGVFPRLVELLMHPSASVLIPALRTVGNIVTGDDMQTQCVIDHQALPCLLNLLTNNHKKSIKKEACWTISNITAGNREQIQAVINANIIAPLVHLLQTAEFDIKKEAAWAISNATSGGTHDQIKYLVAQGCIKPLCDLLVCPDPRIVTVCLEGLENILKVGEAEKNLGAGDVNSYAQMIDDAEGLEKIENLQSHDNTEIYEKAVKMLESYWLEEEDDAMPSGDNAQNGFNFGNQQPNVPSGGFNFG

SEQ ID NO: 109324 - protein, 558 aa, Oryza sativa
  Clone ID: PAT_MRT4530_13492C.1.pep
MALNAPVLVLKDSLKRESGTKVHHANIQAAKAVADIIRTTLGPRSMLKMLLDASGGIVVTNDGNAILREIDIAHPAAKSMIELSRTQDEEVGDGTTSVIVLAGEMLHVAEAFIDKHYHPTVICRAYTKALEDALAVLDKIAMHVDVNDRAAMLGLVKSSIGTKFTGQFGDLIADLAIDATTTAGVDLGQGMREVDIKKYIKVEKVPGGQLEDSRVLKGVMFNKDVVAPGKMRRKIVNPRIILLDCPVEYKKGENQTNAELMKEEDWQVLLEMEEEYIKNLCAQILKFKPDLVVTEKGLSDLAIHYLSKAGVSAIRRLRKTDNNRIAKACGAVIVNRPEELQESDVGTRAGLFEVKKIGDEFFTFIVDCKDPKACTVLLRGASKDVLNEVERNLQDAMSVARNILKNPKLLPGGGATELTVSAALKQKSSSVEGVEKWPYEAAALAFEAIPRTLAQNCGLNVIRIMTQLQGKHANGENAWVGIDGRSGDIVDMKERKIWDSYSVKAQTFKTAIEAACMLLRIDDIVSGIKKKQAPGASAPKQPQIEQEGDADNEQMIPE

SEQ ID NO: 109325 - protein, 769 aa, Oryza sativa
  Clone ID: PAT_MRT4530_13493C.1.pep
MAVVAAFSIREYTASIRGAAGAEGRRLYGLGAGDLPPMEARRFRWWADELATAPPLPPWSLSPSPSPPPPPTKPSRRTLGKARAPKKRSISDLFAAAPPLALPSSDSGGGGNDNDDDEALCAIMRRAREKKRKRRLQEEEEEEAGAASASVTAAAAAETCDSEGNFTIKEALDKTNLPGGLDTPQASRRPDGVHHARTDEERSPDSKRRKKVKITNLDKNNNKKIDKKRYSESKSATNKVGKQHDLKKMLPLHSILKKYTRHTSVKMVKEKHGDPKGTEVIEVCRKSVKRVKFSEVDDVLGINKQNICKLFSDALASSSSSSTDMSSEGDKHIAAESCSSHMPETATKEASKSTDHEDSLELTSTQLSSNLFDLNEALPESTDLNYPYVSNPEDPNHEPRQHEPLDSDVQVIDEGRQNQQDLSLDSHGLQCQSVPESGLERARSSISPGTFLHGEFMEVSDTFFVGSSRKLTGELAESHGDYAFNLNLGGSQPSNEGEVPPQDCNASTGVASSSHSEMGVQQECRPAAGQTVRLMGKDLSVSTTRGEYVSGTHFYTEDHPTKLFLELPRQGRPYLSLQAQSVPNVSANSASPSQSHIRYTAPQNLSHSFPTTNALSGDRLRYDDRFSYLSGSQHHGNVLLGSPSLTSDANLPRSYGVVSAGSSVHPHNSPSFAFTHPRRMIVEEASGSRRDAACPSRNAENVAARAAIPEMQAQRTGLMKLTPGAKHILMPSDTTGDGTSMPVYSCVSFGSRRGNASATRNMGAELYKL

SEQ ID NO: 109326 - protein, 103 aa, Oryza sativa
  Clone ID: PAT_MRT4530_13494C.1.pep
YLSGMMYHCSLATCLGLVRVGGVLSLESWLGPGGLVSGSRNVSPSPWACIIASGAAWSVVSLEGHPVGFTWALSHLWWEHGGEGVQSRRCCRERVTSWLLPPI

SEQ ID NO: 109327 - protein, 133 aa, Oryza sativa
  unsure (1)..(133): unsure at all Xaa locations
  Clone ID: PAT_MRT4530_13495C.1.pep
MAGREDGAAAGAMEEGQDSKEVKCENSEDGSNTSRRCQGNDMISVQFMQKILTEILGTYFMIFAGCGAVVVNLSTGGAVMFPGICVVWGLVVTVLVYSVGHIXGTHLNPGVTVAFATXGCFPWKQVTNHFLGS

SEQ ID NO: 109328 - protein, 551 aa, Oryza sativa
  Clone ID: PAT_MRT4530_13496C.1.pep
MSLRPSERAEVRRSRYKVAVDADEGRRRREDNMVEIRKSRREESLLKKRRDGLPAAAAAAAAASPLLAHSSALQQKLEGLPAMVQAVQSDDSAVQLEATTQFRKLLSIERSPPIEEVINTGVVPRFIAFLQREDYPQLQFEAAWALTNIASGTSDNTKVVVESGAVPIFVKLLSSPSEDVREQAVWALGNVAGDSPKCRDLVLASGGLYPLLQQLNEHAKLSMLRNATWTLSNFCRGKPQPNFEQVKPALSALQRLIHSQDEEVLTDACWALSYLSDGTNDKIQAVIESGVFPRLVELLMHPSASVLIPALRTVGNIVTGDDMQTQCVIDHQALPCLLNLLTNNHKKSIKKEACWTISNITAGNREQIQAVINANIIAPLVHLLQTAEFDIKKEAAWAISNATSGGTHDQIKIFHCHYGLLTTYEMSTRYLVAQGCIKPLCDLLVCPDPRIVTVCLEGLENILKVGEAEKNLGAGDVNSYAQMIDDAEGLEKIENLQSHDNTEIYEKAVKMLESYWLEEEDDAMPSGDNAQNGFNFGNQQPNVPSGGFNFG

SEQ ID NO: 109329 - protein, 128 aa, Oryza sativa
  Clone ID: PAT_MRT4530_13497C.1.pep
SFNHLTSKPGTKLRGNYLWTLKNILLLLPRDFDHSIFFSILLPQCLLPKSSSTHSLSKLSSHTPSKLTIASATFYPFVLWSNTISLVQPYWSSIPHEQERAGLTDPTPPSLRTHPVIQHGRGRSGEHG

SEQ ID NO: 109330 - protein, 856 aa, Oryza sativa
  unsure (1)..(856): unsure at all Xaa locations
  Clone ID: PAT_MRT4530_13498C.1.pep
MAVVAGFSIREYTASMRGAAGAEGRRLYGLGAGDLPPMEARRFRWWADELAAAPPLPPRSPSPSPSPPPPPPTKPSRRTLGKARAPKKRSISDLFAAAPPLALPSSDSGGGGNDDDDDDEALCAIMRRAREKKRKRRLQEEAAGAASAPVAAAAAAAETRDSEGNFTRKEAHDKTNLPGGLDTPQASRRPDGVHHARTDEERSPDSKRRKKVKITNLDKNNNKKIDKKRYSESKRATNKVGKQHDLKKMLPLHSILKKYTKHTSVKMVKEKHGDPKGTEVIEVCRKSVKRVKFSEVNDVLGINKQNICKLFSDALASSSSSSTDMSSEGDKHIAAESCSSHMPETATKEAXSKSTDHEDSLELTSTQLSSNLFDLNEALPESTDLNYPYVSNPEEPNHEPRQHEPLDSDVQVIDEGGQNQQDLSLDSHGLQCQSVPESGLERARSSISPGTFLHGEFMEVSDTFFVGSSRKLTELAESHGDCSSGSVKDAMTKGKSPCALPNHTVQDSFQQHQRYYAFNLNLGGSQPSNEGEVPPQDCNASAGAASSSHAEMGVQQGCRPAPGQTVRLMGKDLAVSTTRGEYVSGTHSYTEDHPTKLFLELPRQGRPYLSLQAQSVPNVSANSASPSQSHIRYTAPQNLSHSFPMANALSGDRLQYDDRFSYLSGSQHHGNVLLGSPSLTSHGSAALRQNLPYVWSRYSDPSSSSTASPSAPILPTTAQHVTPSSVYHANLPRSYGVVSAGSSVHPHNSPSFTFTRPRRIVEEASGSRRDAACPSRNAENVAARAAIPEMPSSSSGGRHARRTGPMKLTPGAKHILMPSDTTGDGTSMPVYSCVSFGSKSGNASATRNMGAGLYKL

SEQ ID NO: 109331 - protein, 83 aa, Oryza sativa
  Clone ID: PAT_MRT4530_13499C.1.pep
VPLPSAFMTILQTTHSLGYKFGSPLYDEAILLCLDLEEIDAAIAVVAEMETNGIKVPDETLDKVLAAKQSGGNSALQPPPAEE

SEQ ID NO: 109332 - protein, 37 aa, Oryza sativa
  Clone ID: PAT_MRT4530_1349C.1.pep
GLERLVMSWKNLSIWYPGKQRYTLFCVCFMFDHKKIY

SEQ ID NO: 109333 - protein, 73 aa, Oryza sativa
  Clone ID: PAT_MRT4530_134C.1.pep
RIERAPRAGIRIRTRIERAAVGIGRETAGWGRRLGFRVSGGKRKGEEEETVGWIGLGLGGGFGFGSEHAKPSG

SEQ ID NO: 109334 - protein, 268 aa, Oryza sativa
  Clone ID: PAT_MRT4530_13500C.1.pep
MAGVTSKRRSSSASTSSSSGDGAAVSDRPRGVTRKRRSGGRCPRPAASLRPAAPRPSSSDARARTRHKSGICVLSGVISITNGGYNWCRKVNMLDLNRAILDSDHHTAGLRVILQKELRYSDVSQLGRIVLPKVLAQQQEQDVIGAKKAGDQQAATVPQVDEHISTLFPIFPIAQVDDYLSPMAPQVDISAFVPHADENHEIFDGILNSLPEIPVANVRYSDFFDPFDDGMDMANTLNANANQSASLHVTDDKSGHSLIPNPKSGPHM

SEQ ID NO: 109335 - protein, 82 aa, Oryza sativa
  Clone ID: PAT_MRT4530_13501C.1.pep
MVVVLAELNDLAAIDQGVAKLGPREALVLEKIPATLHDCMHRRFSALLSKSNSNRTMRSASIPDCDKTGNLQRIVPDESALS

SEQ ID NO: 109336 - protein, 64 aa, Oryza sativa
  unsure (1)..(64): unsure at all Xaa locations
  Clone ID: PAT_MRT4530_13502C.1.pep
CCWPYLSVSXDNYDLGETLTTXTXPYKTLRCALAIDTPLRGLLILPVQIKPNPASKSKKQARTR

SEQ ID NO: 109337 - protein, 99 aa, Oryza sativa
  Clone ID: PAT_MRT4530_13503C.1.pep
MARGCVMRGAGALPLASCRLPICDMGARTGDEMGRPETEEIRLGFRGTWLHGEITISTLRYVYGVIVGTTELHKHDARFNGVVLSVVGDVPVDNEVPVG

SEQ ID NO: 109338 - protein, 103 aa, Oryza sativa
  Clone ID: PAT_MRT4530_13504C.1.pep
MPKQIHEIKDFLLTARRKDARSVRIKRTKDAVKFKVRCSKYLYTLCVFDADKANKLKQSLPPGPYSVIHCLCILFLSFLLMLFLSKETSAAVSEITCFVGTNR

SEQ ID NO: 109339 - protein, 51 aa, Oryza sativa
  Clone ID: PAT_MRT4530_13505C.1.pep
VENKPVCFGLKKNRVSFGKYGCFPGESFMIERPRVFFRQIYQWGSCVGCPW

SEQ ID NO: 109340 - protein, 328 aa, Oryza sativa
  unsure (1)..(328): unsure at all Xaa locations
  Clone ID: PAT_MRT4530_13506C.1.pep
HVLGSRGVRVKCTSTAATAATTAVATVAHGGAGAATRRHGSGGAAARERQHGGTGTAARRHERGGAAARERRRGGTRAVAQWRGKRGGRVRWGGGXMEGGGVFVERGEGEGEGRRRNGDATAALGAGRQRRASCDTMAARGSERRCDGRRCGARGGRRDGWRGARRGDGDGARQXTAMRRVASERRDRRGDATRAAARGSARWNGRRGSGAGRRRGDGRAAGRRREGTGARRLEAXRRRRRDGDGAAAAAARTTGGRRGARGRGGGGARGTTIEHRAVLHPERPHQFRPPSMAAGPKSRRRSPPLPWLAPSPHLPGTGCLQPVVPPRP

SEQ ID NO: 109341 - protein, 445 aa, Oryza sativa
  Clone ID: PAT_MRT4530_13507C.1.pep
MKPGGAASSVLPAARRGGRIAAVIAPLLLFLAAALSFPSSIGRIPSLVALGRRHAPSPPPPPPPPRVAVCLVGGARRFELTGPSIARHVLAPLVAHQQEKKEGEGGAPVVDVFLHSPLDADAYKLSLLARAAPPGSRLAAVRVFRPERIAETPERARVLTASNSPNGIQGLLQYFRLVEGCLDLIRERESRGNFTYDWVVRTRVDGFWTGPLAAADAFPAGGAYVVPKGSRFGGLNDRLGAGGRHASRVALSRLSLIPRLDVAGYQELNSEAAFQAQLKVAGVKARERRLPFCVLSDRRYSFPPAPYGVPVASLGSPGPLSGAKCRPCRPACRGGECASAARLVRGWSWTEWRNGTLEMCDASVPWEQGWEALFDEVAGEEAAAVRRRVATMGADDCVAEVAALMTRAERWDAPAPAEICRAGRLRLATRSASANATVTAKPNQN

SEQ ID NO: 109342 - protein, 193 aa, Oryza sativa
  unsure (1)..(193): unsure at all Xaa locations
  Clone ID: PAT_MRT4530_13508C.1.pep
MSPHAASQLPSQSGGGSGREGEGGRLTGGGSGDDGGGDGGARRHGNGGAAARERRRGGTGTAARWYESGSAVEREEGRKGRDDGDARAASRWRRGARSGDATGGGAGLETGDVTGGVGLXDAAMVTARGDGTATRRVASERRDRRGDATRTASRGSARWNGRRGSGAGRRRGDGRAAGRRREGTGARRLKARG

SEQ ID NO: 109343 - protein, 345 aa, Oryza sativa
  unsure (1)..(345): unsure at all Xaa locations
  Clone ID: PAT_MRT4530_13509C.1.pep
HVLGSRGVRVKCTSTAATAATTAVATVAHGGAGAATRRHGSGGAAARERQHGGTGTAARRHERGGAAARERRRGGTRAVAQWRGKRGGRVRWGGGXMEGGGVFVERGEGEGEGRRRNGDATAALGAGRQRRASCDTMAARGSERRCDGRRCGARGGRRDGWRGARRGDGDGARQXTAMRRVASERRDRRGDATRAAARGSARWNGRRGSGAGRRRGDGRAAGRRREGTGARRLEAXRRRRRDGDGAAAAAARTTGGRRGARGRGGGGARGTTIEHLPWPPAPNLAAGPRLSHGWLPPLTYKWRPLLAFSRFCLLRSLPVAAPFLPASFLYLPGTGCLQPVVPPRP

SEQ ID NO: 109344 - protein, 293 aa, Oryza sativa
  Clone ID: PAT_MRT4530_1350C.1.pep
MATRLGREARGERWVQGIAAYVHGGGRLGTPDRERWRWGEVTRLRKGAEVGREYGRSRWEYDGQETLPGDGTPTPWYSTGIRTMRVPAAVTGGCGCGVDGGGGCCRGGGKLADWEEGKDDEMKSVVVKGWTRMAQVVPLHDNASAEDDDDDEEDDDEDDDDDDDEDDEEEAAPPYVMAVDDSSVDRAVITALLRRSKYRVTAVDSGKRALEILGSEPNVSMIITDYWMPEMTGYDLLKKIKESSELKQIPVVIMSSENVPTRISRCLEEGAEDFLLKPVRPADISRITSRMLQ

SEQ ID NO: 109345 - protein, 244 aa, Oryza sativa
  Clone ID: PAT_MRT4530_13510C.1.pep
ANLAADDKCSMEVAKAGGVHALVMLARSCKLEGVLEQAARALANLAAHGDNNNNNAAVGQEAGALEALVQLTSSQNEGVRQEAAGALWNLSFDDRNREGIAAAGGVEALVSLAQECLNASEGLQERAAGALWGLSVSEANSMAIGQEGGVAPLLTLAQSDVEDVHETAAGALWNLAFYSGNALCIVEEGGVPILVRLCSSSGSKMARFMSALALAYMFDGRMDEVALVGTSSEGSSKSVNVEGA

SEQ ID NO: 109346 - protein, 158 aa, Oryza sativa
  unsure (1)..(158): unsure at all Xaa locations
  Clone ID: PAT_MRT4530_13511C.1.pep
HRRNGDAXTAALGAGRRRRAGGDAMAARGSERRCDGWRGARRGDGXARGDGTATRRVASERRDRRGDATRAAARGSARWNGRRGXGAGRRRXGDGHSVGRRREGTGTRRLEARGRRRRDGDGAAAAAARATGGRRGARGRGGGGARGTTIEHLCRNEQ

SEQ ID NO: 109347 - protein, 984 aa, Oryza sativa
  Clone ID: PAT_MRT4530_13512C.1.pep
MTRRVRRRLCKDGGKGKDVAADEERELVSCSSSSRRRGGLGVAVAARGGGGGGSGSCVVDWRTLPDDTVLQLFGRLNYRDRASMAAACRTWRDLGASPCLWSALDLRAHRCDAEVASSLSSRCGSLRRLRLRGHEAAAAASGLRARGLREVVADGCRGLTDATLAVLAARHEALESLQIGPDPLERISSDALRQVAFCCSRLRRLRLSGLRDADADAIGALARYCPLLEDVAFLDCGSVDEAAIAGILSLRFLSVAGCHNLKWATASTSWAQLPSLVAVDVSRTDVSPSAISRLISHSKTLKLICTLNCKSVEEEQAHNPGAFSNSKGKLVLTITSHIFKSVVSLFPDKVVKENEVFNECNWKGKDNALGDMMSWLEWILSQTLLRIAESNPQGMDDFWLQQGADMLLSLVKSSQEDVQERAATTLATFVVIDDESANVDAARSEAVMRVGGIPMLLDLARCSRESAQSEAAKAIANLSVNAKVAKAVADEGGITILTNLARSMNRLVAEEAAGGLWNLSVGEEHKVVTPWMLNTLIAMSDVLLAAIAAAGGIKALVDLILRWPAGTDGVLERAAGALANLAADDKCSMEVAKAGGVHALVMLARSCKLEGVLEQAARALANLAAHGDNNNNNAAVGQEAGALEALVQLTSSQNEGVRQEAAGALWNLSFDDRNREGIAAAGGVEALVSLAQECLNASEGLQERAAGALWGLSVSEANRTTLEHFNLALNAGALDGLSVLDGGCMAIGQEGGVAPLLTLAQSDVEDVHETAAGALWNLAFYSGNALCIVEEGGVPILVRLCSSSGSKMARFMSALALAYMFDGRMDEVALVGTSSEGSSKSVNVEGARRMALKHIQTFVLTFSDPQVFTTASTSSASAALSQIADAVFIQEAGHLRCSGAEIARFVAMLRNPASILRACAAFALLQFTIPGGRHAVHHAGLLQKAGAARVLRAAAAATTASIEAKVFARIVLRNLEHHQTGTST

SEQ ID NO: 109348 - protein, 177 aa, Oryza sativa
  unsure (1)..(177): unsure at all Xaa locations
  Clone ID: PAT_MRT4530_13513C.1.pep
GDATAALRAGRRRRAGGDAMAARGSERRCDGRRCGARDGRRDGWSGARRGDGXGDATRAAARGSARWNGRRGSGAGRRRGDGRAAGRRREGTXRGRRRRDGDGAAAAAARAMGRRRGARGRGGGGARRTTIEHLCRNEQVLHHPSPLPPSHRVSHTSGGPVLSYSATLWNCASATSS

SEQ ID NO: 109349 - protein, 133 aa, Oryza sativa
  unsure (1)..(133): unsure at all Xaa locations
  Clone ID: PAT_MRT4530_13514C.1.pep
GDATAALGAGRRRRAGGDAMAARGSERRCDGRRCGARDGRRDGWRGARCGDGDGARRWDGDAAGXRRGDGRAAGRRREGTGARRHKARGRRRRDGDGAAAAAARATGGRRGARGREGGGARGTTIEHLCRNEQ

SEQ ID NO: 109350 - protein, 226 aa, Oryza sativa
  unsure (1)..(226): unsure at all Xaa locations
  Clone ID: PAT_MRT4530_13515C.1.pep
TAVRWHERGGAAARERRRGGTRAAAQWRGKRGGRVRLGGGXMEGGGVFVERGEGEGEGRRRNGDATAALRAGRRRCAGCDTMVARGSERRCDGRRCGARGGRRDGWRGARRGDGDGARRXTATQRVASERRDRRGDATRAAARGSARWNGRRGSGAGRRRGDGRAAGRRREGTGARRLEAXRRRRRDGDGAAAAAARTTGGRRGARGRAGGGARGTTIEHLCRNEQ

SEQ ID NO: 109351 - protein, 784 aa, Oryza sativa
  Clone ID: PAT_MRT4530_13516C.1.pep
MAVGTESGSGGVAESAPSTPMSAMTTTPISARSVRWESDMPDIEEGGGGLERPLLRRRGTNTTSQMAIVGANVCPIESLDYELVENEVYKQDWRSRGKLQIFHYQILKWVLALLVGLIVGLIGFFNNIAVENIAGFKLLLTTNLMLQNRYKAAFLWFISCNAMLAAAAAALCAYFGPAAAGSGIPEVKAYLNGVDAPSILAPSTLFVKIVGSIFGVSAGFVLGKEGPMVHTGACVASFLGQGGSRKYGFTWNWLRYFKNDLDRRDLITCGAAAGVTAAFRAPVGGVLFALEEATSWWRSALLWRTFSTTAVAAMVLRSLIEYCRSGNCGLFGKGGLIMFDVSSQVTSYTTMDLAAVVLLAIVGGLLGALFNFLLNRILRVYSYINEKGAPYKIILTVVISLVTSCCSFGLPWLTACTPCPPELAASGHCPTIGRSGNFKNFRCPPGQYNAMASLFLNTNDDAIRNLFSGGTESEFGVPMLLAFFTAVYSLGLVTYGVAVPSGLFIPVILSGASFGRLLGKLLGVLTGLDTGLFALLGAASFLGGTMRMTVSVCVILLELTNDLLLLPLIMLVLLVSKTVADCFNKGVYEQMVRMKGLPYLEAHAEPCMRSLVAGDVVSAPLIAFSSVESVGTVVDTLRRTGHNGFPVIEDAPFAPEPELCGLVLRSHLLVLLRAKTFTADRVKTGAAEVFRKLAPFDFAKPGSGKGLTVDDLDLTEEEMAMYVDLHPIANRSPYTVVENMSLAKAAVLFRQLGLRHMCVVPRTPGVIELTNLAESYMLFRHFCI

SEQ ID NO: 109352 - protein, 165 aa, Oryza sativa
  Clone ID: PAT_MRT4530_13517C.1.pep
MATRRRRSGRDNGDARAATRWRRGARSGDATGGGAGLETGDATGGVGLDAAMVTARGDGTATRRVASERRDRRGDKTRAAARGSVRWNGRRGSGAGRRRGDGRAAGRRREGTGARRLEARGRRRHDGDSAAAAAARATGGRRGARGRGGGGARGTTIEHLCRNEH

SEQ ID NO: 109353 - protein, 323 aa, Oryza sativa
  Clone ID: PAT_MRT4530_13518C.1.pep
MAMATIPEVPASALLPTMPRIGMGTAAFPFTSSEETTAALLRAIELGYRHFDTARLYATEGCVSEAVAEAVRRGLVASRADVFVTSKLWCSDLHAGRVVPAARETLRNLGMDYVDLLLVHWPATVAPGSYDFPFPKEEMAPAFDMEGVWRGMEECHRLGLARAIGVSNFSAKKLEQLLSFAVVRPAANQVEMNPMWQQRTLREVCRREGVQLCGYSPLGAKGTPWGSAAVMDSGVLHDIAQTKGKTLAQICLRWMYEQGDVLLVKTYNEKRMKENLDIFDWELTEEERDKISQLPQLRGLPGMQFICDNGPYKCVEDLWDGVD

SEQ ID NO: 109354 - protein, 103 aa, Oryza sativa
  Clone ID: PAT_MRT4530_13519C.1.pep
ECSGPSEEFIVSKYQPHNIYRCDNPTIMPHVQQKDHSTRTLIMPLPEPMVGMMKRVHIPKIIMHATYVLIGLVPVLSPYAARYMHFDQLARARFCSSRDSSLS

SEQ ID NO: 109355 - protein, 107 aa, Oryza sativa
  Clone ID: PAT_MRT4530_1351C.1.pep
KKQAKPTAEDGRATGDGKTGGEKGHNRARKEGWRYELRLLDSWAALSATRLEDKRRFWERARSGTASPTRVACALAPLASIWAVGFTSSGGLVSGPDSAIVMRQSSS

SEQ ID NO: 109356 - protein, 97 aa, Oryza sativa
  unsure (1)..(97): unsure at all Xaa locations
  Clone ID: PAT_MRT4530_13520C.1.pep
CECECDAEQGQAMDALRGVRPNVYXMIDANKQLMMAKDASGHCMXAVERQYDKDSILYHLRIPGACFTHPVITLGALTEPQVQDKDAIVRPVISGAK

SEQ ID NO: 109357 - protein, 48 aa, Oryza sativa
  unsure (1)..(48): unsure at all Xaa locations
  Clone ID: PAT_MRT4530_13521C.1.pep
RPPHVFSAHFVLRKNFPVGHPSRNCSKPSTLNPEVLXRSACRKKVVTC

SEQ ID NO: 109358 - protein, 55 aa, Oryza sativa
  Clone ID: PAT_MRT4530_13522C.1.pep
GSTDSVRNHQFGLRRTELILCLVNALTGTGDSACTGFADHCFIKLTQCYLQKPNG

SEQ ID NO: 109359 - protein, 621 aa, Oryza sativa
  Clone ID: PAT_MRT4530_13523C.1.pep
MALRRAASLLLRPRLRAPVPIPTPKTPNPLLLPPRRHFSQLPPPPVPASAAAAAAAVAEEAEEAFEAAKGTKDLLAAFSRLEAVMPPSDKRLALACIKLGQHLEASGAADPSRVLALALRSLGILEATPNSATSTTASHSDAVSLAMALHLAGSASFDLSRFHDALSFLTRSLRLVSPLLPSSSSAAAASGDDDAQGFDVRPVAHAVRLQLANVKTALGRREEALADMRACLDLKESILPPGSRELGAAYRDLAEAYSTVLDFKEALPLCEKALELHQSTLGKNSVEVAHDRRLLGVIYTGLEQHEQALQQNEMSQKVMKSWGVAGDELLHAEIDAANIKIALGKCDEAVTVLRNVSKQVEKDSEIRALVFISMAKALANQEKAGDTKRCLEIACDILEKKELAAPDKVAEAYVEVSSLYEMVNEFDKAISLLKRSLGMLERIPQAQHMEGNVAARIGWLLLLTGKVSEAVPYLEDAVERMKDSFGPKHYGVGYVYNNLGAAYMEIGRPQSAAQMFALAKEVMDVSLGPHHSDTIEACQSLANAYNAMGSYALAMEFQKRVVDSWRNHGPSARDELKEAIRLYEQIKIKALSCLSPENSAIALPEPLEKEVDSDSTRVAQQ

SEQ ID NO: 109360 - protein, 90 aa, Oryza sativa
  Clone ID: PAT_MRT4530_13524C.1.pep
MSLTRRPRDFPPCLTRPCRASPPPTMSELHEQRQRPTHAARIGGEGQQPGAAFIDAEANGSKYQQQKLGDVPSSQPHHLNIYYKICFGEE

SEQ ID NO: 109361 - protein, 38 aa, Oryza sativa
  Clone ID: PAT_MRT4530_13525C.1.pep
SPKSVFRFYLLLKIKIVVSNLKFKKDQCAHLIGYIAKI

SEQ ID NO: 109362 - protein, 222 aa, Oryza sativa
  Clone ID: PAT_MRT4530_13526C.1.pep
PEFPPRPTRPVCSNKLDKYYNLGAFKVGAGTNESLLYEIINGLRAAGPDAGSSSAAAANFTNATKSVVELLTERVNQLSIKTDNDLDFLLDENHNLTEMDTHTAESHLEDKSHRQNEECCSYTSSNRESWGRCSSLGAASDGSSLGERPEIPSHKHKSMTLRALATPLRRIRRKPLAIPKERKNRSLWKRLKQERQEMGESLTQRFRLCLQGQAQHKRTKSS

SEQ ID NO: 109363 - protein, 102 aa, Oryza sativa
  Clone ID: PAT_MRT4530_13527C.1.pep
MHFFNRNSFWFNLDEFAALKIEKDTFSPHKLSYCRTYAHRAAHINNRFPYDAGRANDQVLGEGQQLTRLQRHNCCLYVAQEAQTTPLTYAFYCLLRLLYPKY

SEQ ID NO: 109364 - protein, 38 aa, Oryza sativa
  Clone ID: PAT_MRT4530_13528C.1.pep
KPIYFFLQSPFGGGPPGRVKRKNPKKANPGGGFRLEKN

SEQ ID NO: 109365 - protein, 111 aa, Oryza sativa
  Clone ID: PAT_MRT4530_13529C.1.pep
MTANVLKLMKVPAATKVGAGGTGTEAGAGCSWIGGRRRLARRKDTRLAVEAGTVRRGWPCGGTRRLAGGWCRCSGGLSSENLVLVSLRPRRTTTAVLSPLLSLETLSRHTS

SEQ ID NO: 109366 - protein, 64 aa, Oryza sativa
  Clone ID: PAT_MRT4530_1352C.1.pep
MAPGSGAPKEAKGSGAVRRLRNCSRAPEPNKASGAIYCSGTVQGFRGWSKAPDEARASRALGIR

SEQ ID NO: 109367 - protein, 159 aa, Oryza sativa
  unsure (1)..(159): unsure at all Xaa locations
  Clone ID: PAT_MRT4530_13530C.1.pep
PRVQPRVRPRVRDQVTQANGLISPLDLLISKGRVLRLGFFFSTDYIQSFLLTIWYHNXISDSERTYVXFANLDITITTHSFVALAISNSSNLXLADSTNHTLCTTNATGTGEHGSYAALVDSMYXDLQQPTGTTIWQMWDHPXTDTLQMGMRFLVSYEA

SEQ ID NO: 109368 - protein, 144 aa, Oryza sativa
  Clone ID: PAT_MRT4530_13531C.1.pep
MAQLYVVNLQGCEAMRSTAAACVRGPAERPPPLAACTHSHSPAPPGLPLARAGHRLARAPLAGAARLAARPRRPPAACPRSSALADARPSPAPAAAWPDVRPCWPRLGPPLTARSRRPPPASTWPGARPRRLRLSPPLGLAEGG

SEQ ID NO: 109369 - protein, 372 aa, Oryza sativa
  Clone ID: PAT_MRT4530_13532C.1.pep
MADSGKKRDGSANGAEKKASPTPKPPSSSTSGFSKNVPLLVFVLLLGLLYRQLQPPVPKICGTPGGPPVTGPRLQLKDGRHLAYHEYGVPKDQAKHKIIFVHGFDSCRYDALQVSPELAEELGVYMVSFDRPGYGESDPHPGRTEDSIAFDIEGLADGLQLGPKFYLIGYSMGGEIMWSCLKNIPHRLAGVSILGPVGNYWWSGYPSNVSTEAWYVQLPQDQWAVRVAHHAPWLAYWWNTQKLFPASSVISFNPAILSREDLTVIPKFAYRTYAGQVRQQGEHESLHRDMLVGFGKWGWSPLEMENPFPAGEAAVHLWHGAEDLIVPVQLSRHIAQRLPWVRYHELPTAGHLFPITEGMPDLIVRSMLLTDE

SEQ ID NO: 109370 - protein, 1395 aa, Oryza sativa
  unsure (1)..(1395): unsure at all Xaa locations
  Clone ID: PAT_MRT4530_13533C.1.pep
MPQQPQGTPQQRPWADLIADVMKEQFGLRPKDAGNLYRQPYPEWFERVPLPNRFKAPEFSKFSGQDSTSTYEHISRFLAQCGEASAVDALRRHDEPVHEYIQRFREMRNKCYSLSLTDAQLADLAFQGMIAPIREKFSSEDFESLSHLTQKVTLHEQRFAEARKNSRKVNHVCPYMYGSDDEDDDSEIAAAEWVRSKKIIPCQWVKNSRKEERYDFDITKADKIFDLLLRKKQIQLPTGHTIPSAEELGKKRYCKWHNSGSHTTNDCKVFRQQIQAAIEGGKIKFDDSKRPMKVDGNPXPVNMVHTAGRTTDRGRARGFQRRYEKXQEKHYEEDDDGFXLIGVASSLDFAGMNEDDENRKTQWCPSGIFTENQKRRVQRLRSREHFQEVEQEINHRLKKTKPKQEWRVKNQVPVAEEATADEAKRLAKGKSVVAASVIMVFTLPAESGIKQEDIDEVEEESAKLIFSPEQAVFEKPEGTENRHLKPLYINGYVNGKPMSKVMVDGGAAVNLMPYTTFRKLGRNAEDLIKTNMVLKDFGGNPSETKGVLNVELTVGNKTIPTMFFVIDGKGSYSLLLGRDWIHANCCIHSTMHQGLIQWQGDKIEIVLADSQLKMENPSYYFEGIVEGSDVYNKDTVDDLDDKQGQGFMSADDWEEIDIGPGDRPRPTFISKNLSAEFRTKLIELLREFIDCFAWEYYEMPGLSRSIVEHRLPIKPGVRPHQQPPRRCKADMLEPVKAEIKQLYDAGFIRPCRYAEWVSSIVPHIRKTIFMAEEDIHKTAFRCPGAIGLFEWVVMTFGLKSAGATYQRAMNYIYHDLIGWLVEVHIDDVVVKSKEIEDHIADLRKVFERTRKYGLKMNPTKCAFGVSAGQFLRFLVHERGIEVTQRSVNAIKKIQPPENKTELQEMIGKINFVRRFISNLSGRLEPITPLLRLKANQQFTWGAEQQKALDNIKEYLNSPLVLIPPQKGIPFRLYLSAGEKSIGLVLIQELEAKERVIFYISRRLLDAEIRYSPVEKLCLCLYFSCTRLRHYLLSNECTVICKADVVKYMLLAPILKGRVGKWIFSLTEFDLRYESPKAIKGQAIADFIVEHRDDSIGSVEIVPWTLFFDGSVCTHGCGIGLVIISPRRTCFEFAYTIKPYATNNQAEYEAVLKGLQLLKEVEADAIEIMGDSLLVIIQLAREYECKNDTLMVCNEKCQELMKEFRLVTLKHVSREQNIEANDLAQGASGYKPMIKDVKVEVAAITADDWRYDVHQYLLNPSQSASRKLRYKALKYTLLDDELYYRTIDGVLLKCLSADQAKVAIGEVHEGICGTHQSAHKMKWLLQRARYFWPTMLEDCFRYYKGCQDCQKFGAIQRAPASAMNPMSRPEFLSKIPNAYMRVKSTSRNQPRHTITN

SEQ ID NO: 109371 - protein, 80 aa, Oryza sativa
  Clone ID: PAT_MRT4530_13534C.1.pep
GCVPFHQAPGFSRTFMRSAWLTQFLAHEKGPLHVSPFFFWGETVLSMLINWGGGKKNILGWYKIHPPCVFLGNCFPPPWF

SEQ ID NO: 109372 - protein, 183 aa, Oryza sativa
  Clone ID: PAT_MRT4530_13535C.1.pep
GACFEFAYTIKPYATNNQAEYEAVLKGLQLLKEVEADTIEIMGDSLLVISQLAGEYECKNDTLMVYNEKCHHLMKEFRLVTLKHVSREQNIEANDLAQGASGYKLMIKDVKVEIAAMTADDWRGWGIDMIGMINPPSSKGHKFILVATDYFTKWVEAIPLKKVDSGDTTQFVQEHIIYRFGIP

SEQ ID NO: 109373 - protein, 1430 aa, Oryza sativa
  Clone ID: PAT_MRT4530_13536C.1.pep
MQQQSQGAAQQRPWADVIADVMREQFKLKPKDTGSLYRQPYPEWFERVPLPNRFKVIDFSKFSGQDNALRVRLFRLSLAGSAFTWFSALPCGSSNSWADLEKQFHSYFYSGVHEMKLSDLTAIKQRHDEPVHEYIQRFKEMRNKCFSLSLTDAQLADLAFQGMIAPIKEKFSSEDFESLSHLTQKVTLHEQRFAKARRNSRKVNHVCSYMCGSNDEDDDDPEIAAAEWVRSKKVIPGQWVKNSGKEERYDFDITKADKIFDLLLQEKQIQLPTGHTIEDCPECGGVTRGSSRSYIKGNRLKHARVPPHQRLGPVNQDHDPDDDEDRKIQWYHASIFTKNQKRRVQRLINRERFQEVEQEINHRLKKTKPKQEWRVKKQATVADDVAADEAKRKLGRNVEDLIKTNMVLKGFGGNPSETKGVLNVELTVGSKTSYYVFCHRWEGFLQFVAWKCLIQWQGDKIEIAPADSRWKMENPSYYFEGVVEGSNVYSKDTVDDLDDKQGQGFMSADDLEEIDIGPGDRPRPTFISKNLPIEFRTKLIELLKEFRDCFAWEYYEMPGLSRSIVEHWLPLKPGKNGKVKVCIDFRDLNKATPKDEYPMPVADQLVDAASGHKILSFMDGNAGYNQIFMAAEDIHKTAFRCPGAISLFEWVVITFGLKSTGATYQRVMNYIYHDLIGWLVEVYFDDVVVKSKEIEDHIADLRNVFERTRKYGLKMNPTKCAFGVSAGQFLGFLVHERGIEITQRSINAIKKIKPPEDKTELQEMIGKINFVRRFISNLSRRLEPFTPLLRLKADQQFTWVAEQQKALDSIKEYLSSPPVLIPPHKGIPFRLYLSAGDKSIGSVLIQELEGKERVVFYLSRRLLDAETRYSPVEKSVCTHGCGIGLVIISPRGACFEFAYTITPYATNNQAGYEAVLKGLQLLQEVEADTIEIMGDSLLVISQLAGEYECKNDMLLVYNEKCQELMKKFRLVTLKHVSREQNIEANDLAQGSSGYKPMIKDVQIEVAAIIADDWRYAVYRYLWDPSQSASRKLRYKALKYTLLDDELYYRTIDGVLLNCLSIDQAKVAISEVHEGICGTHQSAHKMKWLLRCAGYFWPTMLEDCFRYYKGCQDCQKFGAIQRAPASAMNPTIKPWPFRGWGIDMIGMINPPSSKGHKFILVATDYFTKWVEAIPLKKVDSGDAIQFVQEHIIYRFGIPQTITTDQGSIFVSDEFVQFADSMGIKLLNSSPYYAQANGQAEAYNKSLIKLIKRKISDYPRQWHTRLAEALWSYRMACHGSIQFSPYKLVYGHEAVFPWEVRISSRRTELQNDLTADEYYNLMADEREDLVQSRLRALAKVTKDQERVARHYNKKVVPKDFSEGELVWKLILPIGTRDSKFGKCSPNWEGPFQIHKVVSKGAYMLQGLDGEVYGRALNGKYLKKYYPSVWVNE

SEQ ID NO: 109374 - protein, 192 aa, Oryza sativa
  Clone ID: PAT_MRT4530_13537C.1.pep
MATFWGKNLFEGKNVSWRERKFSLKRGEIPPSARPASRPPDPGGESWAAWEPNALVGLHPCRPAFSAQPLGFYIDDLFPKASMSPSRWLWVRKGRGLDPELGFPASSSDIHRFGDSAREIWRVEEKKRDHRSYAKVVMDRRPLQPHVDQELYKRRMMDLDAEKRTIASENGPLSAARIRQLPAKIRFHWRPM

SEQ ID NO: 109375 - protein, 683 aa, Oryza sativa
  unsure (1)..(683): unsure at all Xaa locations
  Clone ID: PAT_MRT4530_13538C.1.pep
EGNIVAVDPEKLTPDQKXKDFEAMMQQAREQFFRSFTQTRKGTFVQKYKVKVVPDEPETSISKEGEEKRVLDGSAQENQGDGSQGVHAVQGDGAHEPQGGNLNRNGQPINPRLLMREQPQHSGQTTPLRQQVVQPVQPTPPGQQTIQPIPQQALMNQSAGQSAGHALNQVIPEHLVHHIQPDGTAMPRIMPEHLVQSIQPSYQNCQGGNMNYQYQPFSPQVQYQQGGLTQPQFASQYNQFEPTQQQSQEAAQQRPWADVIADVMKEQFGLKPRDTGKLYRQPYPEWFEKTPLPNRFKIPDFSKFSGQDGVSTYEHISRFLAQCGEASAVDALRVRLFRLSLSGSAFTWFSSLPYGSVNSWADLEKQFHSYFYSGVHEMKLSDLTAIKQRHDEPVHEYIQRIREMRNKCFSLSLTDAQLADLAFQGMIPPIREKFSSEDFDSLSHLVQKVTLHEQRFAEARRSSKRVNHVCPYMYGSDDDDDDSEIAAAEWVFRQQIQVAIEGGKIKFDDSKKPMKVDGMRLPSIEDCHGCSDITESSSRSYNRGNWLKQARVPVHQRLGPVNQNDYLKKDENAKTQWCPSGIFTKNQKRRVQRLRSRERFQEVEQEIGHRLRKAKPRKEWRVKNQVLGADDIAADEAKRLAKGKSIVTAPINMVFTLPAEFGIDQADVDELEEESAKLVLSPE

SEQ ID NO: 109376 - protein, 184 aa, Oryza sativa
  unsure (1)..(184): unsure at all Xaa locations
  Clone ID: PAT_MRT4530_13539C.1.pep
RLQQQQAYGDGGGLVEEKGDRIQDCGKVEEKGGGIHDCEXENVGEIQDCREVEKGGVICGNSSMVHSHHGGIWPPSRRCGQXAXGKWFDHKSGHFLEEGNNVIYTQDGFDLDEYEFWSDLDDEGDDLIVDCFNDFVPXKMVHYGVVLVGKGGNEIGELMSCDVALGMGQANSTVTKVSSSSDAS

SEQ ID NO: 109377 - protein, 195 aa, Oryza sativa
  Clone ID: PAT_MRT4530_13540C.1.pep
MEGVDRIGWNLGLGFLRKERPPVHGDSGGSGGSNSNDGKWKGKEKVVPEYGKNRHGMPVGFYFVPKDLELLAILMCKLVRGKVPGALNNVFKHIRILNSTPPSSMTYIETMEDGYIYFFSKRQFATKARNKRRPMRVADGGTWKASGGSKKVGGIDVSQKFTMVFYERRFEGDRNPVKTNWGMHEFTKIIPGTKN

SEQ ID NO: 109378 - protein, 671 aa, Oryza sativa
  Clone ID: PAT_MRT4530_13541C.1.pep
MDRYQRVERPRPESAIEENEIRITAQGLIRNYVSYATSLLQLLIHLETQFDVSDVEILRFCVIQRDRRIKEIVLKAMGQAISKSVAVAEIIKKRVPGLYQDTNISSVSITDVWEPIEEGLVPLEMTRHVSMISITLSPRDLDKNSPGYQTPVYVEQPRQQPRLQQAPPPPQRQVRQPPPDYEEEGGVDVEGVGVEEVMVVMVDMETIKVGTTKVVGTMITKVGMVAMIIREDMVAMIIKGDMVVVDMATTKADMETTKKMVDITEDGVACAGGAIGITVAGTNEAEVAVFLVEGDMAAAGGEEWVAVVDEETEDPSSEQMGEENPWATGGLQAKQTAIPTARAGRARVAIPSSTSPRRRRAGGAGGAGAGAGAAEMDRYPRAERPRPESAIEENEIRITAQGLIRNYVSYATSLLQDRRIKEIVLKAMGQAISKSVAVAEIIKKRVPGLYQDTNISSVSITDVWEPIEEGLVPLEMTRHVSMISITLSPRDLDKNSPGYQTPVYVEQPRQQPRLQQAPPPPQRQVRQPPPDYEDSYVRGRGRGRGRGRGRGWGRGGYGGYGGYGNNQGGYNQGGGYYDNQGGYGGYDNQGGYGGYDNQGGYGGGGYGYNQGRYGNYQENGGYNRGRGGMRGRGNWNYRGGYERGRGGGFPGGRGYGGRGRGRMGGRGGRGN

SEQ ID NO: 109379 - protein, 134 aa, Oryza sativa
  unsure (1)..(134): unsure at all Xaa locations
  Clone ID: PAT_MRT4530_13542C.1.pep
MDDKPPASPSSSSPDFVKEKIQQLGLSEVNESNIVTITPDKLTSDQTKDFEAMMQQARNQFLSSFMQTRKGTVVQKYKMXSQGNQGDNSQGVQGVQGDGTQGVQGEGPNQDDNTAQLPFNNFQDQVDYAVHHAL

SEQ ID NO: 109380 - protein, 85 aa, Oryza sativa
  Clone ID: PAT_MRT4530_13543C.1.pep
ILSPFSSTPPHSWNSVLGTNSASRRHFANPPPSSPPQATHLPKRAATQPSTPLGFPPLVPIVFSPPPPLGFSSPAPRGFPPPPLD

SEQ ID NO: 109381 - protein, 1102 aa, Oryza sativa
  unsure (1)..(1102): unsure at all Xaa locations
  Clone ID: PAT_MRT4530_13544C.1.pep
MESKAEIDSRIEDMFGQKSAAKTYGILEFVRDKSRVRWADLEKQFHSYFYSGIHEMKLSDLTSIKQKHDEPVHEYIQRFREMRNKYDSLSLIAAQLADLAFQGMIAPIREKFSSEDFESLSHLTQKVALHEQSGYDFDITKADKIFDLLLREKQIATVPASAIQLPSXAEELGQENGECKWHNXSGSHTTNDCKGFRQQIQAAIEGGKIKFDDSKRPXRLMAILFLLIWGSMTSSRRSIMKKMTMALILIGVVSSLDSVGMAAKRLAKGKGVVTALVNMVFTLPTEFGMKQADADEVEEESAKLILSPEQAVFEKPEGTENRHLKPLYINGYVNGKPMSKMMVDGGAVVNLMPYATFRKLGRNAEDLIKTNMVLKDFGGNPSETKGGLNVELTVGNKTIPTTFFVIDGKGSYSLLLGRDWIHANCCIPSAMHQCLIKWQGDKIEINLSAEFRTKLIEQLKEFRDCFAWEYYEMPGLSRSIVEHRLPIKPGVRPHQQPPRRCKADMLEPVKAEIKRLYDAGFIRPCRYAEWVSSIVPIIKKNGKFLGFLVHERGIEVTQRSVNAIKKIQPPENKTELQEMIGKINFVRRFISNLSGRLRHYLLSNECTIICKADVVKYMLSAPILKGRVGKWIFSLTEFDLLYESPKAIKGQAIADFIVGHRDDSFGSVEIVPWTLFFDGSVCTHGCGIGLVIISPRGVCFEFAYTIKPYATNNQAEYEAVLKGLQLLKEVEADAIEILVDSLLVISQLSGEYECKNDTLMVYNEKCQELMKEFRLVTLKHAKVAIGKVHEGICAPASAMNPIIKPWPFRGWGIDMIGMINPPSSKGHEFILVATDYFTKWVEAIPLKKVDSGDAIQFVQEHIIYRFGILQTITTDQGSIFVSDEFVQFADSTGIKLLNSSPYYIQANGQAGASNKSLIKLIKRKISDYPRQWHIRLAEALWSYRMACHGSIQVPPYKLVYGHEVVLPWEVRIVSRRMELQNDLTADEYYNLMADEREDLVQSRLRALAKLTKDKERVARHYNKKVVPNDFSEGELVWKLILPIGTQDSKFGKWSPNWEGPFQIYKVVSKGAYMLQGLDRQVYGRALNGKYLKKYYPSVWVNA

SEQ ID NO: 109382 - protein, 623 aa, Oryza sativa
  unsure (1)..(623): unsure at all Xaa locations
  Clone ID: PAT_MRT4530_13545C.1.pep
QQQAIQQTPTXQLVVHQSSNRSCKQAAFQADSATPPSSKLLQRIHKTPLRQQIVKPIKHQGSISASAGFATPGGQPVQQFVNQVVPEHLFHHVQRDGTVMPQVVPEHLFEPMQQQPQGAAQQRPWADVIADVMREQFGLKPKETGSLYRQPYPEWFETVPLPNQFKVPDFSKFSRQDDVSTYEHISRFLAQCAHDEPVHEYIQRFREMRNKCFSLSLTDAQLADLAFQGMIALIREKFSSEDFDSLSHLIQKDDNEDDSEIAAAEWVRSKKVIPCQWVKSSGKEEKYDFDITKADKIFDLLLREKQIQLPAGNTIPSAEELGKKRYCKWHNFGSHSTNDCKVFRHQIQVAIEGGKIKFDDSKKPMKVDGNPFPVNMVHTAGQTADRTRARGFQVNSAKIINKYQRKYDKQQEKHYEEYDDGFDPHWGCEFFRFCWNEGMRLPSIENCPGCSDIVESSSRSYNRGNRLRQTRVFVHQRLGPVNQEHGQEDGVVRKNQWCPSGIFTKNQKRRVQRLRNRERLQEVEQEINHRLRKAKPRQEWRVKNQVPLADDVAADEAKRLAKGKSVVTAPINMVFTLPAEFGIDQVDVDEVEEESAKLVLSPEPAIVRETLRGQIIRIFNHWL

SEQ ID NO: 109383 - protein, 74 aa, Oryza sativa
  unsure (1)..(74): unsure at all Xaa locations
  Clone ID: PAT_MRT4530_13546C.1.pep
YFNIKTLVESDILSNLFYSVVFKQSLASITQYSSLYRHFSLSTRASILAKANAIKIRIITNLRPYLIQLRXIIX

SEQ ID NO: 109384 - protein, 730 aa, Oryza sativa
  Clone ID: PAT_MRT4530_13547C.1.pep
MTGGPHPSGMIAPIREKFSSEDFESLSHLTQKVTLHEQRFAEAKTNSRKVNHVCPYMYGSDDEDDDSEIAAAEWVWSKKVIPCQWVKNLGKEERYDFDITKADKIFELLLREKQIQLHAGHTIPSAEELGKKRVASSLDFVGMKFGIKQADIDEVEEESAKLILSPEQAVFQKPEGTENRHLKPLYINGYVNGKPMSKMMVDGGATVTLMPYTTFRKLGRNAEDLIKTNMVLKDFGGNPLETKGVLNVELTVGNKTIPTTFFVINGKGSYSLLLGRDWIHDNCCIPSTMHQCLIQWQGDKIEIVPADSQLKMENPSYYFEGVVEGSDVYNKDTVDDLDDKQGQGFMSADDLEEIDIGPGDRPRLTFISKNLSAEFRIKLIALLKEFRDCFAWEYCEMPGLSRSIVEHRLPIKPGVRPHQQPPRRCKADMLEPVKAEIKRLYDAVPVIKKNGKVRVCIDFRDLNKATPKDEYPMPIKDHIADLRNVFERTRKYGLKMNPTKCAFGVLAGQFLGFLVHERGIEVIQRSVNAIKKIQPTENKTELQEMIGKINFVRMFIFNLSRRLRRYLLSNECTVICKADVVKYMLSAPILKGRVGKWIFSLTEFDLRYESPKAIKGQAIADFIVEHRDDSIGSVKVVPWILFFDVSVYTHGCVIGLVIISPRGACFEFAYTIKPYATNHQTEYEAVLKGLQLLKEVEADAIEIMGYSFKVYIGGDRLFHQVGRGDSFKEG

SEQ ID NO: 109385 - protein, 173 aa, Oryza sativa
  Clone ID: PAT_MRT4530_13548C.1.pep
MENPSYYFEGVVEGSSVYPKDTANGQAEASNKSLIKLIKRKISDYPRQWHTRLAEALWSYRMACHGSIQVPPYKLVYGHEAVLPWEVRIGSRRTELQNDLTADEYYNLMADEREDLVQSRLRALAKVTKDKERVARHYNKKVVPKDFSEEELVWKLILPIGTRDSKFGKWSPN

SEQ ID NO: 109386 - protein, 63 aa, Oryza sativa
  Clone ID: PAT_MRT4530_13549C.1.pep
SKTPGFNSAIISTHPNHPFLGGFYWGPNKGGDPPAGKVRLFLNLNCPTFNRSKNNWGPTCNPR

SEQ ID NO: 109387 - protein, 119 aa, Oryza sativa
  Clone ID: PAT_MRT4530_1354C.1.pep
IFLAGDGAEKQGMAAAGAGRLRERRQRRRQREERQLRDEPLHLRRVLRRRGTHHDGKHRRSRGRRRRRGGEGRRAPGGGVAAHVADELTVDGDGRHHLAHLCCCQGQGGTEKFRNDKRK

SEQ ID NO: 109388 - protein, 60 aa, Oryza sativa
  unsure (1)..(60): unsure at all Xaa locations
  Clone ID: PAT_MRT4530_13550C.1.pep
MELPVADPGPVRAEGLLLQCPYCDSEAMHKLAQFLLPGLAXLSMCCTTGDLFXKPSVVAV

SEQ ID NO: 109389 - protein, 173 aa, Oryza sativa
  Clone ID: PAT_MRT4530_13551C.1.pep
PCSPTTSTTPLLVLLRKRWRRHASTNTRRPWVHAAPSRTRDAVPRIASAPRGEPATVANSLRSLAGRPAAVRLSATPPVRHSDEAATPPLLACRCASPVAAVSAPTLPLLARINLCSNSRYPSRRYRLASHRPPIPGAREVVACSTEGSSSAPVPPSAFALRFRLSPAVLLHK

SEQ ID NO: 109390 - protein, 166 aa, Oryza sativa
  Clone ID: PAT_MRT4530_13552C.1.pep
MVSDHSPTGITDGKVGSDCEGLKQARMGKMSEGEDEEGRLSLPSSSRHCLLLSPLELVWRDSRAGGCEGLPHEFMLSPIAALSLAARYAAIERSVRPLPPTAPSSHYYAAGDDPILLDVDGNGNAAFMAVLGPTHPSILSPVPSALPPMASSPSRLFSPLDQASVS

SEQ ID NO: 109391 - protein, 215 aa, Oryza sativa
  Clone ID: PAT_MRT4530_13553C.1.pep
MGNCQAAEVATVVIQHPGGGRTERAYWAMSAGAVMAANPGHYVAAVITSPPAAGASSATPAAAPVKHLKLLRPDDTLLLGRVYRLVSFEEVLREFASKRHVKLSRATIKAKDDVEEETKPAKPRRRRGSGGIAPEEEYSSRSLAKVMRQSDEPEPVARASPSAAPKPESDIDDHADGEAAEPDCDLEALLPPHGVVFGRRVARQWRPALQSIAEG

SEQ ID NO: 109392 - protein, 130 aa, Oryza sativa
  unsure (1)..(130): unsure at all Xaa locations
  Clone ID: PAT_MRT4530_13554C.1.pep
PARLSRVRGRAGYRCFVGGLAWATDDRYLEAVFSTFGEILECKIINDXETGRSRELGFVTLSSEQAMRDAIEGMGCATGRVSASSISASVDNIVSAQPRGATPIPAGEQEASLQRPNHLRGAIPKIGSSS

SEQ ID NO: 109393 - protein, 644 aa, Oryza sativa
  Clone ID: PAT_MRT4530_13555C.1.pep
EFLHTHTTRSLSSSSSSAVIPAENGQQAWTYLEDMQNSIDLVLTEVVMPGVSGISLLSRIMNHNICKNIPVIMMSSNDAMGTVFKCLSKGAVDFLVKPIRKNELKNLWQHVWRRCHSSSGSGSESGIQTQKCAKSKSGDESNNNNGSNDDDDDDGVIMGLNARDGSDNGSGTQAQSSWTKRAVEIDSPQAMSPDQLADPPDSTCAQVIHLKSDICSNRWLPCTSNKNSKKQKETNDDFKGKDLEIGSPRNLNTAYQSSPNERSIKPTDRRNEYPLQNNSKEAAMENLEESSVRAADLIGSMAKNMDAQQAARAANAPNCSSKVPEGKDKNRDNIMPSLELSLKRYHTPVASNQGGTGFMGSCSLHDNSSEAMKTDSAYNMKSNSDAAPIKQGSNGSSNNNDMGSTTKNVVTKPSTNKERVMSPSAVKANGHTSAFHPAQHWTSPANTTGKEKTDEVANNAAKRAQPGEVQSNLVQHPRPILHYVHFDVSRENGGSGAPQCGSSNVFDPPVEGHAANYGVNGSNSGSNNGSNGQNGSTTAVNAERPNMEIANGTINKSGPGGGNGSGSGSGNDMYLKRFTQREHRVAAVIKFRQKRKERNFGKKVRYQSRKRLAEQRPRVRGQFVRQAVQDQQQQGGGREAAADR

SEQ ID NO: 109394 - protein, 76 aa, Oryza sativa
  Clone ID: PAT_MRT4530_13556C.1.pep
VIKFYPRVRPRVRPFSGAVPEQKEAGRAAAKGPRTVRAASCARPTTAGWWARSGSGQMTYLPTYAMALDSKQLINS

SEQ ID NO: 109395 - protein, 179 aa, Oryza sativa
  Clone ID: PAT_MRT4530_13557C.1.pep
MENLEESSVRAADLIGSMAKNMDAQQAARAANAPNCSSKVPEGKDKNRDNIMPSLELSLKRSRSTGDDANAIQEEQRNVLRRSDLSAFTRYHTPVASNQGGTGFMGSCSLHDNISEAMKTDSAYNMKSNSDAAPIKQGSNGSSNNNDMGSTTKNVVTKPSTDPERVMSPSAVRLMTHIS

SEQ ID NO: 109396 - protein, 213 aa, Oryza sativa
  Clone ID: PAT_MRT4530_13558C.1.pep
MAAQVHACMRWRRDENVGAPLDGARTPSLSLPSHVSAVRRTGEQVAVRCHVRTKGLVMLPRRNTPPRHRERRPRSHDAALAGVAMPNASPTVFGGVVIFLTPWRRRSTGHPRLAGGDFHLTASSSARVIILLTRAVVESGHTILHLVEICWVNPEKAISVPPSQSMLRIIRTAGNVVKLPSLPSSWCRGVFKPCCSGPPIVIGTGRRRLSGRS

SEQ ID NO: 109397 - protein, 418 aa, Oryza sativa
  Clone ID: PAT_MRT4530_13559C.1.pep
MWSPGSRGLKKLPMWAPAAVHGLVGLAIGFTAARGTVNDMAPATTATENTWRRRQRRQARSGEHRQRLRDRDERESVAGQWSLNDETCSEFGGGAAMMARRRHRWLDERQGVVDKVDDMASRLTAALHRDGMSGDRRNDDGLPATSSGIAWAAISIAWRWQFGDVQDRPDSLLLPVPMTIGGPEQHGLKTPRHHDDGNDGSLTTFPAVLMILNMLWLGGTEMAFSGLTQQISTRWRMVWPDSTTARVRRMMTRADEDAVRWKSPPAKRGWPVLRRRHGVRKMTTPPKTVGEAFGMATPARAASWLRGRRSRCRGGVFRRAMVLLLAMVDGGQVRVPLPDTGVMDADADVACTAPAKCAARLLLRRSHTDGWTCGEWKWTSSWMPEGSMAMLWCSMVCDECAGSPNPHCESLGATAAER

SEQ ID NO: 109398 - protein, 42 aa, Oryza sativa
  Clone ID: PAT_MRT4530_1355C.1.pep
LNPLIAGHFLENNIMVIDSLNLGKQHVLNDTSRPTNVWLTRK

SEQ ID NO: 109399 - protein, 56 aa, Oryza sativa
  Clone ID: PAT_MRT4530_13560C.1.pep
VKFNIRGLKHHDVTNQIHILTNPRRKHFSKTSSIDNFHNILQYVHMQCNNISRTRG

SEQ ID NO: 109400 - protein, 63 aa, Oryza sativa
  unsure (1)..(63): unsure at all Xaa locations
  Clone ID: PAT_MRT4530_13561C.1.pep
MTTMRASDALLLVAAAVLAVVRAEDQYHFLDWKETYGTRTIIDEAKKVMLINXMFPRTTINCR

SEQ ID NO: 109401 - protein, 97 aa, Oryza sativa
  unsure (1)..(97): unsure at all Xaa locations
  Clone ID: PAT_MRT4530_13562C.1.pep
NRGCFXRAPPXVPLPPHLHGRRPPHPPRRRQXVPRRXNAAGVRRQRAAVVVVVVVXPXGHXDRCHCGHCGRRGLGCRCPPSLPPRDSCGGKPTAXIG

SEQ ID NO: 109402 - protein, 121 aa, Oryza sativa
  Clone ID: PAT_MRT4530_13563C.1.pep
MPACGSDGQAQLYPMANGVQGAGGGRRQRSRVTEMRHRCSKGLGRPVPRNHPAGPSRCRASALRNRAGTAWPSPVPRERAGSVCLSRGTDAVYPTLRDRSSLRSRTSNLRLPVAPASGVAC

SEQ ID NO: 109403 - protein, 34 aa, Oryza sativa
  unsure (1)..(34): unsure at all Xaa locations
  Clone ID: PAT_MRT4530_13564C.1.pep
MESGKLNXKTVLPLDYESPPAGRAGCVLGLFRFS

SEQ ID NO: 109404 - protein, 130 aa, Oryza sativa
  unsure (1)..(130): unsure at all Xaa locations
  Clone ID: PAT_MRT4530_13565C.1.pep
SVLGQRYRPYQLQAIVLIQQHVLNPYNEFCIGNIMNIVXSPYLQQDTVKLRNNQVCTQLALVEHQSNYHDINIDNAISHQIQLQQYGDLXFDRNLAHSQPMMAYNVPSRYGIYPRYYGAHRTITTLGRVW

SEQ ID NO: 109405 - protein, 130 aa, Oryza sativa
  Clone ID: PAT_MRT4530_13566C.1.pep
PRARATGARARAAPQPHPHLTGSRVPTRAPTSPGTRPAPQCQRKQKQQQAEGAAGTSASNCHLPAHTQQAGPAGVRAAVPAAVAAMGLRRAGGGGGSGGIWGKAILREKGERERESARWPVRVASCRIPA

SEQ ID NO: 109406 - protein, 223 aa, Oryza sativa
  unsure (1)..(223): unsure at all Xaa locations
  Clone ID: PAT_MRT4530_13567C.1.pep
HRPRRARKKISPKKKLLPFRKKNCLPFSFARVLRNANHAPGPSAPPPHARPPEPLTLPRRRLGSACGRRLPPEPPPTPPXPPPMRPPLPAAASYATTPPPSSHLSSARSAPPWSPXTNIPPCPPPPPPPPTPHPGILFLSQASPTPSLNPNLFLSSPHAPPRMPLPXTSSIGCAVAQPTPPPDRWDPLAAPPAPSPGTTDRPPPSAAQLPDRREPPAARPALS

SEQ ID NO: 109407 - protein, 87 aa, Oryza sativa
  Clone ID: PAT_MRT4530_13568C.1.pep
PRGDYPTKRTMQKYYKLGGPGKPHTWNRKKNYYQTTSLQKKGKGWTRAKKRRQHPGEKKRGGQKRGSFCKWAQGTGRKKKALNNFFF

SEQ ID NO: 109408 - protein, 738 aa, Oryza sativa
  unsure (1)..(738): unsure at all Xaa locations
  Clone ID: PAT_MRT4530_13569C.1.pep
MAEAEAGRKEKKEVVRLERESVIPIMKPKLIMKLAYLIEQQSDREEFLKLCKRIEYTIRAWYHLQFDDMMELFALFDPVHGAQKLQQQNFSTEEVDTLEQNFLTYFFQVMQKSNFNILSDDEVELAHSGQYLLNLPIKVDEAKLDNKLLSKYFKEHHHDNLPEFSDKLYVIFRRGIGLDRTSNFFFMEKVDMIIARAWRWFLEKTRLQKLFSRKKSVRPKTDSKKNDDLVGEEEDKELYVERIRLETMNLSLRNLIGKVTIQEPTFEEVIVLYRRKSPKGQNDRSIHVKHFKNIPMADMELVLPEKKNPSLTPMDWVQFIVSVVIGLVTLVSSLEMPKADFWVVVAVLSALAGYCAKIYLSFQQNMATYQNLITQSMYDKQLDSGKGTLLHLCDDVIQQEVKEIIISYYILMENGKATIEDLDLQCEELIQEEFGLQCNFEVMDAVQKLERLGIITRDSIGRICCLSLKRANEIIGATTEELDLLYYAMFNACSKYKCSSSYQLSKKRAAELSVWSEMMSSSSSLVSAISASPSATAKARLRHDDAATATGAAAAAAVAARQLKTEHGGCCCCRSRGRAVVARAGPGPLTEIEPDLNEDPIDKWRTNGVSPDDFEYGIRRAFGRMSLSGTKKLNLLRASKHXISWLFPPAIILGMAFNVPGEYLYIGAAVFVVVFCVIEMDKPDKPHNFEPEIYMMERSARDKLIADYNTMDIWDFNEKYGELWDFTVDRRDEIVKSS

SEQ ID NO: 109409 - protein, 964 aa, Oryza sativa
  Clone ID: PAT_MRT4530_1356C.1.pep
MAKAKVATGEEEHGGVQVKSSHGGEGGNNKAAAAPEKRLNRFVHVVAMTERVGNALGTLAFTWATVVLLGGYPTVLRPDDDFWFATVIVFLEAARMFSRENRLDYQLFFSTRGAFRRLGWNGLLTVMVYFSTVLVILKNYYFLRGGSVLVPLIVVMAMLVAIGQMLSPRALKLLSNPLRHAISLWSPLLSIILLGPCIPQPVYDVENQEVILKHSRTRWTLYIVLFLFVLLPTISRLRFPCIVKLVDSVVSRKQLAWRQVILNFCMFAAIVMLVFTFNGFYGRLIMVVFQVYAFLVVSLGNFQIPVAVVRVLLALQRLVPQNYIADGVSAEQDAVQNLKPSLNIFYCMVIGQGILYIVACMLEVFSFIPKRSLIIRGGFRGQLGVKYANLYYAYAFEKCMGGSVLAPKKINLITFAMDSLNSDSTKKKLYGVQMLHSFLKKEHLRTKMIPKLTSSTKTVASLFNMLGWTSDGDADVRLFAAKVTAELAGSLRVVAIPGAIQIVASLLDTDHQLKIRDHFLFIDSQEAREEDLPIKHVGMDEQKSTVLKYWKQMVINCLTPVDEPFNIDELNLHMARCWKRITKFWSIPDEEPSTDQDFLPVQGLLILERLANFDTGNCMEISRATGLISKMIDFTSYRNYITSINEEHQIMLAGLSLRVLRTLASTKGKFGVTLRQQILEHSFVLNNLAEILNDSVGGRELRELAAEIIKNLAMDRNASEDIGHCPVIISGLMRAFLSQVSSHLLRKITGQALAMLAMESANNCLLMLREPGFVFIEELTAMIRYDKYKYTAVSLLGSMCEHAWSELSNSDLKELSYTLQEVLKGIMDAEGAELEVLIGFSSHICKIIPDDFAQELEHSQIKKKFVKRLVSALNAHMRPSADCPGIRRVIVQHAINLMEFDSRYANDFHKCLSMVENTSTRLENYRLFSGDVGLMEHRTTLSTLVARAKELMGREWVQGISTAT

SEQ ID NO: 109410 - protein, 41 aa, Oryza sativa
  Clone ID: PAT_MRT4530_13570C.1.pep
MWATGKIINVYMGRMHSHIVECHLANYGHVVECLLANYDFD

SEQ ID NO: 109411 - protein, 75 aa, Oryza sativa
  Clone ID: PAT_MRT4530_13571C.1.pep
PKQNLQFNNKSPLNFCHGQVDNDAQFQAPVTAWWYVFGNRFQTLVAKTLVTTIIKDIGIFSKATTPSLGLFHSEY

SEQ ID NO: 109412 - protein, 116 aa, Oryza sativa
  Clone ID: PAT_MRT4530_13572C.1.pep
ENNPAICFADVDKTKEVDPAESQEKIASLQLTFDIVCDISRSTKNSLITKQELFHNILANNLEIEETGEIEEQLHILEDLSPDWISKKVIPGGDILYSIKEIADQKSVRARLVEVI

SEQ ID NO: 109413 - protein, 57 aa, Oryza sativa
  Clone ID: PAT_MRT4530_13573C.1.pep
ASEQRYAGTEDNLFTQTESFSGGILVIHETDNGEIFDGWENGNKEAVLTPLEGYNLL

SEQ ID NO: 109414 - protein, 353 aa, Oryza sativa
  unsure (1)..(353): unsure at all Xaa locations
  Clone ID: PAT_MRT4530_13574C.1.pep
LGDTSRILKLACLQVDSRGSPYDLLATYREELLRSVLGKVFELDTKECNGDVCFRRFFVALKPCIDGFXEGCRPYIAMDSTHLTGRSRGQLASAVAIDGHNRLFPVAYGVIETESKESWTWFHGPLFAQNMWAAAKSFTNEKFTYHIGKIEEKCLEALSWLDDNHPYIWSRSKFSNECKVDYINNNLSECFNSWVSRTKDRRIVDMYDAIRXMIITKFVARNNFAGKMEGRIIPAITKSLNAQSKNIKDHEVLICGAGTAEVTVGTIRHAVHLEQQTCSCRVWQVTRMPRSHALAFIAKLSTDVHMDDFVDDCFSVEKFKKAYARTFNPMTSKDRWAHPVRGPHRPGRSDRHG

SEQ ID NO: 109415 - protein, 85 aa, Oryza sativa
  Clone ID: PAT_MRT4530_13575C.1.pep
MLGSRYASEIPTLGGEWYRITVFVLKTRNPRFCQHDSKHRLASRSRPLPRKLWSVTSFRGLSVLPTLESDLGMWFNSIQRGQPVR

SEQ ID NO: 109416 - protein, 105 aa, Oryza sativa
  unsure (1)..(105): unsure at all Xaa locations
  Clone ID: PAT_MRT4530_13576C.1.pep
KAWRGGKKPRLSPPSGFPAKTKTTPPPARPPPPPSRGVGGPPLYPXKNPVFFLALNPKGPGGPPFXVPPRFPGFGGPPLXPGGPPGSFFGSPGGPVWGPNFNLSF

SEQ ID NO: 109417 - protein, 156 aa, Oryza sativa
  unsure (1)..(156): unsure at all Xaa locations
  Clone ID: PAT_MRT4530_13577C.1.pep
RPGAFSRHHKTLGGAGAAPATAGGPHRQPDKTERXSDPNEXXKTTDXAEKXGKRQEKNRPSSREXSKXXXXXQKHGYXGEXXXXXDHRTGKTXXEQNGRXNKXXXXSPRXXXXXKENEXRTARXXPXRQXGXKXPTXXXGXXDHEEXRRKNXGGKG

SEQ ID NO: 109418 - protein, 319 aa, Oryza sativa
  unsure (1)..(319): unsure at all Xaa locations
  Clone ID: PAT_MRT4530_13578C.1.pep
RSAAPIAVEWKPLLIEVPSQVIDGFNCVGGGGDATATATLSEQSKELEMLGKEKDVVISIPAPVYAPRSVSVSAAYEQEGAYIPYSVSLSMPVSPSGFHFSQFGMAAAKAKAVHRDDARVASAETRFDDAHPPAVGRVXAHSPRLLMKQTWFHSQPILHLSKNDETTRRCDSTRDXARFDQFKTFSGRLERQFSTLCGRPAQEQMTNGEGAPEPNIAEEETEQVPGADRYFDTLEGPELETMRATETTVLPKDEKWPFLLRXPYLLKVVFYFEAVRREFYHPIRADFFAPWIACLFLVQGVPRAVTKVHHGVWYALMTP

SEQ ID NO: 109419 - protein, 686 aa, Oryza sativa
  Clone ID: PAT_MRT4530_13579C.1.pep
MARIAIRECPPVLRPNWRVIWYCGFVNGMEFGNDVRIRMDGGVYGESEQSSGEAALPRLLIEVPSQVIDGFDCVGGGGDATATATLSEQSKELEMLGEEKDVVISIPAPVYAPRSVSVSAAYEHEGAQIPYSVSLSMPASPSGFHFSQFGMAAAKAKAVHRDEARVAPAETRFDDAHPPAVGRVQAHSPRLLLNQTRFHSQPILHLSKNDETTRRCDSTRDKRFDQFKTFSGRLERQLSTLRGRPAQEHMTNGEGAPEPNIAEEETEQVPGADRYFDALEGPELETLRATETTVLPKDEKWPFLLRFPISAFGMCLGVSSQAMLWKTLASAPPTSFLHVSPVVNHVLWWISLALMGFVSFIYLLKVVFYFEAVRREFYHPIRANFFFAPWIACLFLVQGVPRPVTEVHHGVWYALMAPIFCLELKIYGQWMSGGQRRLSKVANPSNHLSIVGNFVGALLGAKMGLREGPIFYFAVGLAHYMVLFVTLYQRLPTNVTLPKELHPVFFLFVAAPSVASMAWAKILGEFDYGARIAYFIALFLYMSLAVRINFFRGFRFSLAWWAYTFPMTGAAIATITYATEVTNVLTRALSIGLSGIATVTVAGLLVTTMFHAFVLKDLFPNDVSIAITRKKPKFSKILAHFRSSSSDMKEYVLSISKPPSSDSDSSVSSKATTVTDPSVTRVKAEP

SEQ ID NO: 109420 - protein, 128 aa, Oryza sativa
  unsure (1)..(128): unsure at all Xaa locations
  Clone ID: PAT_MRT4530_1357C.1.pep
RGLSTPRCGGANFLRTTGAGPTCAVGGPTRRTWLLVLRLAALIRLWALGARLPGPTGFPADPGLAAGDITGYLXEXHGSYGPGARLWLGPSQLLDSGKDSREIKEMLTKAEDKXPLTGKTYNQACGKT

SEQ ID NO: 109421 - protein, 104 aa, Oryza sativa
  Clone ID: PAT_MRT4530_13580C.1.pep
LVTESNDLLKVVFYFEAVRREFYHPIRADFFAPWIACLFLVQGVPRAVTKVHHGVWYALMTPWRRRRHHGRGSVGATTGGGGNDEVGVGRGMPPASTGFSRRLH

SEQ ID NO: 109422 - protein, 790 aa, Oryza sativa
  Clone ID: PAT_MRT4530_13581C.1.pep
MAGEYWTLRVFKHDRGPNTDILEKKIERNNICYSNLIRLLETEGYEASDELFFTSSDTYYCGTLTKIEGETHVKDMIMENDKSKMADLHLFKAIQRTPFSPLKIDNVEVIAGSSQQEDNIDYNPELIGVADDQHSISSGDTDHEQEKVDYVEKLNEMKRQREDPMTHCEGDTDIDDLYTPEDADVDLGVADIDDMSCELSDPPSEDGGLSTLECETDEENKPPPGKRRRGKGIQVQRIYFDESNMMDTSQLCKGMCFTDAGQFRKALKSYHIVKGRDYKYTRNKADRIKVKCSQDKVKCDFFIRASQVGSEKTFMVREMIAPHTCPSHRNCTRVDSTWLSERYEDDFWSDPNWKVEAFMARCLRETGTYISKSKAYRARRKATEKVLGNKEKQYKRIRDYLQTLIDTNPGTTAVVTTINRDVLGLAPRFSGLFICFSAQKEGFINGCRPFISIDGCFVKLTNGAQVLAASARDENNNMFPIAFAVVGKEDTDNWTWFLEMLKCAIGSGEEHGGWTFMSDRQKGLMNAIPIVFPDSEHRYCKMHLLQNMGNKGWRGEKYKGFVDAAIYATTVWDYDKAMEDLKKLNLKAWEWLIAIGKEHFSRHAFSPKAKSDLVVNNLSEVFNKYILDARDKPIVTMVEHIRRKVMAGHTPEDYVADYFRKDAYMRTYTAVIYPVPDEHRWTKTDSPYIDPPKFDKHVGRPKKSRRRGPDEGPRVQGPARKTTSTCSNCRRDGHTCSNIKARKRGVASSSHENSNEAPSLGMIGGRGSARGRPSARGRGRGRLNTWFSTQ

SEQ ID NO: 109423 - protein, 302 aa, Oryza sativa
  Clone ID: PAT_MRT4530_13582C.1.pep
MPCSAVVGEMDASARGRGYALLSRRLPRPRAVFHRYAATERGGRRRVTGRSDGVSWAERPVSGRTGGGGEGGEEERRRVVGGAAGRTAGEKLRQWPEGRGALTGGRRGAARGPSLLRPQLRQWPAAARSAPPVGFARRRPLSSTGLLRPPSLLRVPAGFARRRPLHSSYRLRAPPSSSTTPPPPRMKALNKAGLEASVWAYGSSGMVIWWPSPYIVASGVLLMASFFEWLFPPLQCLAVAAVVAGAPPMASAEMSSLMGMLPAKAVLATTGDVVSVRDVRVGDVVAVRAGEIVPVDGVVVDG

SEQ ID NO: 109424 - protein, 135 aa, Oryza sativa
  unsure (1)..(135): unsure at all Xaa locations
  Clone ID: PAT_MRT4530_13583C.1.pep
VGEDFIWHTMEVLCAYRMRSRIXKESKFGMIGYVKFVSCTRRFPMGIRTSSMSLVRGFRLPTSCINREGASDRWHRGQTGGATVVRPVAATGAGRQSRRFDRSIYIGQIDVLQVVRPALLLWSDRDPSNLRFEHE

SEQ ID NO: 109425 - protein, 61 aa, Oryza sativa
  Clone ID: PAT_MRT4530_13584C.1.pep
MVASAPLVVGGRTTAAVLARGGGPGDSGGIISRPELATLNAEGLRIHCGCPTEEHKLANKD

SEQ ID NO: 109426 - protein, 1004 aa, Oryza sativa
  Clone ID: PAT_MRT4530_13585C.1.pep
MAGKDEAEGLEARLLLLPPEAAAEEPTRCGGGDGGGGGRKRKKTYLDVLGVCCSAEVALVERLLAPLDGVRVVSVVVASRTVVVEHDPAAAPESAIVKALNKAGLEASVRAYGSSGVVSRWPSPYIVASGVLLTASFFEWLFPPLQCLAVAAVVAGAPPMVRRGFAAASRLSLDINVLMLIAVAGALCLGDYTEAGAIVFLFTTAEWLETLACTKASAGMSSLMGMLPVKAVIATTGEVVSVRDVRVGDVVAVRAGEIVPVDGVVVDGQSEVDERSLTGESFPVPKQPHSEVWAGTMNFDGYIAVRTTALAENSTVAKMERLVEAAQNSRSKTQRLIDSCAKYYTPAVVVVAAGVALIPALLGADGLEQWWKLALVMLVSACPCALVLSTPVASFCAMLRAARMGIFIKGGDVLESLGEIRAVAFDKTGTITRGEFSIDSFHLVGDHKVEMDHLLYWIASIESKSSHPMAAALVEYAQSKSIQPNPENVGDFRIYPGEGIYGEIHGKHIYIGNRRTLARASSPQSTQEMGEMIKGVSIGYVICDGELAGVFSLSDDCRTGAAEAIRELGSLGIKSVMLTGDSSAAATHAQGQLGGVMEELHSELLPEDKVRLVSGLKARFGPTMMVGDGMNDAAALAAADVGVSMGISGSAAAMETSHATLMSSDVLRVPEAVRLGRCARRTIAVNVAGSVAVKAAVLALAAAWRPVLWAAVLADVGTCLLVVLNSMTLLREEWKGGAKEDGACRATARSLVMRSQLAADSQAPNAADAGAAGREQTNGCRCCPKPGMSPEHSVVIDIRADGERQEERPAEAAVVAKCCGGGAGEGIRCGASKKPTATVVVAKCCGGGGGGEGTRCAASKKPATAAVVAKCCGGGAGEGTGCGASKRPPPAAVVAKCCGGGGEGTRCAASKKPATAAVVAKCCGGDGGEGTGCGASKRSPPAEGSCSGGEGGTNGVGRCCTSVKRPTCCDMGAAEVSDSSPETAKDCRNGRCCAKTMNSGEVKG

SEQ ID NO: 109427 - protein, 332 aa, Oryza sativa
  Clone ID: PAT_MRT4530_13586C.1.pep
MARPPVLSVALPSDTGRVLSIQSHTVQVFSLGLLWVCYSGCDNVCGKMKDGYVGNKSAVFPLQLLGFDVDPINSVQFSNHTGYPTFRGQVLNGSQLWDLIEGLAENDLLHYTHLLTGYIGSVSFLTTVLQVVDKLRSVNPDLVYVCDPVLGDEGKLYVPQDLISVYQQKVVPVATMLTPNQFEVELLTGLRITCEEDGLKACNALHSAGPRKVVITSALIEDKLLLIGSHKKAKEQPPEQFKIEIPKIPAYFTGTGDLTTALLLGWSNKYPDNLERAAELAVSSLQALLRRTVEDYKRAGVDPSTSSLEIRLIQSQDEIRRPQITCKAVKYS

SEQ ID NO: 109428 - protein, 247 aa, Oryza sativa
  unsure (1)..(247): unsure at all Xaa locations
  Clone ID: PAT_MRT4530_13587C.1.pep
MVLHNSKPKSTRLNKFAQNKGDKRQGIFTEVRKLAGFLIPVEASPTLPLHHEATTRPFRQGKXPLESKSPTLCSTGQTAIEWHVRPDYSVTARKLDVTGQSLSPLNLAGQTAVKWPVRPSXRLGLTGCGSGGFVSPPKTRPVQXTSRAGQTSLTTPVRPANSPGQTDLRSTVRPQVTFQHNQPLVKRRYLLTRISEFGVLGLYGKLIQRAIXPMNNPSKKHNFSQGEMAHTPKDTPPDITTXGYPNL

SEQ ID NO: 109429 - protein, 172 aa, Oryza sativa
  unsure (1)..(172): unsure at all Xaa locations
  Clone ID: PAT_MRT4530_13588C.1.pep
MRQINETRDKEFFTEIQKLASFLIPVEASPTPPLNHEATARPLRQGVGKKTSRYRATIEPTQPGRSDRSVVGGQIVHGSVRPPSARSDRLWFXRLCIVTKNQTSATDQPGQTGLRPTVRPQVTFQLNRPLVKRRYLLTRVSEFGVLGLYGKLIQRAIQPMKKPSKKYNLSQG

SEQ ID NO: 109430 - protein, 80 aa, Oryza sativa
  Clone ID: PAT_MRT4530_13589C.1.pep
VHRLMGTARVDAGTDAVTGVTSKDVVIDAQSGGLAARLYLPGGVPRCEKLPVVVYFHGGGFVVHSAFSRVHSRFLNALVA

SEQ ID NO: 109431 - protein, 122 aa, Oryza sativa
  Clone ID: PAT_MRT4530_1358C.1.pep
GFDKTGPYRGKFQIECVTDLRKNLRERGSELVVRIGKPEEVLADLAGKTGAKTLFAHQEVTHEELQSERKVCAALKDAGVQAKFFWGSTLYHIDDLPFKLEAMPSNYAGFREQVKELNVRKT

SEQ ID NO: 109432 - protein, 60 aa, Oryza sativa
  Clone ID: PAT_MRT4530_13590C.1.pep
RTSSDTCGTSPIATATEEVAAAAAASYKTPTTLSTDLIQETNEALKAPKPKEAPKAKEGE

SEQ ID NO: 109433 - protein, 477 aa, Oryza sativa
  Clone ID: PAT_MRT4530_13591C.1.pep
MPKAAASLASLLPQLWHRPVQPPPFLHRALSSSSPLLRRHRAALHSPAAPLSAAAVSTSAATVEAPATAAYPVYGRLLPCPLQDDPPRIEHLVAREDEVAVDFISRSLTLPPLYVADLIKFGAVYYALVAPQPPPHAAPEHVRIFREVTEPSVLCRRKSIKGKTVREAQKTFRVTDPNQRLEAGTYLRVHVHPKRFPRCYEIDWKSRVIAVTDNYVVLDKPAATSVGGATDNIEESCVVFTSRALGLETPLMTTHQIDNCSEGCVVLSKTKEFCSVFHGMIREKQVNKRYLALTTAPVSTGIITHYMRPINRAPRLVSEDHIKGWHVCQMEILDCKKVPWPSSLIRKVHKVDNCGWPQQEAAYECKINLLTGKTHQIRAQLAAIGTPIVGDSAYMTAAMAAIVNPSINPFGRWGQNYDSEDEKAAAVEAWISCHGKEPKSVIGLQASEISWDYEGEHHSYKAGVPWWRQDAVESDLI

SEQ ID NO: 109434 - protein, 165 aa, Oryza sativa
  unsure (1)..(165): unsure at all Xaa locations
  Clone ID: PAT_MRT4530_13592C.1.pep
SPLRRAQLHRSTTKPPHAPFVNVWARKLAITWQSLSPLNLVGLTAVXWPVRPSTARSDRRRLSLTGCGSGGSVSPQKTRPVQQISGAGQTGLRPTVRPQVTFQLNRLLVKRRYLLTRVSEFGVLGLYGKILQRAIQPMNNPSKKHNFSXGERAHTPKDTLPDITT

SEQ ID NO: 109435 - protein, 342 aa, Oryza sativa
  unsure (1)..(342): unsure at all Xaa locations
  Clone ID: PAT_MRT4530_13593C.1.pep
MKWSYIMHQTTPREFVKSYRFKHKNCKATDLALDSLQNTNYRFYRRLQLRATKYKMVSGQLYCSGVLQPLLRCISFVEGEEMAKEIHQGLCGAHQAARTVASKVFRQGVYWPTVLKVCVEXIKKCESCQRHGRSQTAVLVATNYFTKWAEAMPFKNITCTEVIDFILKHIVHRFDIPXTLATDQRASFMSKEMRSFAESYDINLLSSSPCYAQADGXAESSNKTLLKLVKKNIEEHSKKWHEMLSKALWAHRISKHDDAKVTTFELVYGQEAVLPVEVNLGSLRYIKQDNLSVEDYKTLMGGNLEDVIDKRLKTLKEMETLPGQRFQRAINGKYLKKYFLSI

SEQ ID NO: 109436 - protein, 242 aa, Oryza sativa
  unsure (1)..(242): unsure at all Xaa locations
  Clone ID: PAT_MRT4530_13594C.1.pep
MVLHNSKPKSTSLNKFAQNKGDKRQGIFTEVRKLAGFLIPVEASPXHRSTTKPSHAPFPLESKFPTLCSTGQTAIEWPVRPDYFIMARKLTVTGQSLSPLNLAGLTAVKWPVRPSTARSDRHRLGLTGCGSGSSVSPPKTRPVQQTSRAGQTGLTTLVRPANSPGQTDLRPTVRPQVTFQHNQPLVKRRYLLTRVSEFGVLGLYGKLIQRAIQPMNNPSKKHNFSQGERAHTPKNTPPDITT

SEQ ID NO: 109437 - protein, 101 aa, Oryza sativa
  Clone ID: PAT_MRT4530_13595C.1.pep
LGFPARDDEIRRFGGGARRIWRVPEKMCDHHTFAQVVMERCPPNRLDWQANKRRATEQGGGDWGARGGGDWGACGAREEEELRQQLLTQNPRANQGAQCKP

SEQ ID NO: 109438 - protein, 227 aa, Oryza sativa
  Clone ID: PAT_MRT4530_13596C.1.pep
MAGRRGTEGARPGKKGGRGGDGADRWRSSDVSVAAAAAGDEEATALRSQEHGTKGIDKGRGTAIVRPVRPDYFVTSRYRAIIEPTQPGQSDHSVVASQTVHGSVRPLPARSDRLRLWRLCIATKNQTSTTDQWASQTGLTTPVRPANRPGQTGLRPTIRPQVTFQLNQPLVKQRYLLTRVSEFGILGLYGKLIQRAIQTMNNPSKKHNFSLGERAHTPKDTPPDITT

SEQ ID NO: 109439 - protein, 486 aa, Oryza sativa
  Clone ID: PAT_MRT4530_13597C.1.pep
MDTRLPLLLLLAGVVAAAAPLLATAQLSADFYSSTCPNVEKVVSTVIERKFKEDPTTSALLLRLLFHDCFANGCDASILIDPLSNQSAEKEAGPNISVKGYDIIDEIKTELEKECPQVVSCADIVALSTRDSVRLAGGPNYDVPTGRRDSLVSNREEGDSLPGPDIAVPKLMAQFSEKGFSADEMVVLLAGGHSIGKAKCFFIEVDAAPIDPTYRSNITAFCDGKDGDKGAVPLDPITPDVVDPNYFELVMDKKMPLTIDRLMGMDARTKPIVESMGKKTDQFDATFGKAMTKLSGMKVITGKDGEIRKSCSEFNNPVNTDDGPSVIRISSLNPEEMMGSFAPATGKSPSAASESRKVAPGGAMEERMAAGEAKTDASGGAMAERLAAGEAKTAAAASEDENQAAAGGAAGDEAAAEEEGTKSNKKKAERVTAEVPADEAAPAAKKPRAMGGQSFSMAGAGAGGEPAKKSTAMKSQSFSMAGQPQQ

SEQ ID NO: 109440 - protein, 711 aa, Oryza sativa
  Clone ID: PAT_MRT4530_13598C.1.pep
MEQPAAAQPSSSAASGAGAGAAGPVLGKVAGQEGASTSAAAAVAARRGEGDCRGEEEVPLRVRLGRAARRRAGPCTPSPSWKLEGEEVEVAAGELAPVHPAVAPARRSSASASASARQLGASLWEIHDVMREGRGGGSRRRRSGRPLASAGGELHQNTSGFYTLFLGIGKKNSGGFGRHIADSSTNHQKLNQARNCTAQPFSPGSYRSSVGDSSINQAISPARSLDIKGRFRGADYNLKTSTELLKVLNRIWSLEEQHTADMSAINGLKLELQHAQEHIQELKCERRGYRHDVASLVRQLSEDKLVRKNKDKEKIAADIHSLQDELEDERRLRRHSEDLHRKFGKELSEIKSAFVKAVKDLEKEKKTKNLLEDLCDQFAMGIRDYEEEVRALKQRHVNYEYQFDKSVLHVSEAWLDERMQMQNTDVKEDSLKKSTITERLRSEIEAFLLAKRSVSFKNNDNYMHDSRPNARLRRQSLESVHFNGATSAPQLAEDDDDDSVASDLHCFELNMHGSSIQMHDHTGPRRSYTGNMDAPKRRTEYSHSVVGESSHMSDVQIYSQCNKARSSSSRPWHATRTQEIDSQASARTVPADEQNEIPCPHISQGYHNGTTSKNNLGAHADCLGQESLDHYSRASLFCDGTTSGDLCNPHSPSRQLDYPSASLGHDIGECSTGLLVGMKENTLKAKLLQARLEGRHARLKASGGSVTSRRK

SEQ ID NO: 109441 - protein, 184 aa, Oryza sativa
  unsure (1)..(184): unsure at all Xaa locations
  Clone ID: PAT_MRT4530_13599C.1.pep
INETRDKEFFTEVRKLAGFLIPVEASPTPPLNHEATARPLRQGVGKSFSRYRAIIEPTQLGRSYRSVVAGQTVHGSVRPPSARSDRLRLWRLCIATKNQTSAIDXPGQTGLMPMVRPQVTFQLNRPLVKRRYLLTRVSEFGVLVLYGKLIQRAIQPMKKPCKKHNLSQGXRAHTPKDXPPDIPT

SEQ ID NO: 109442 - protein, 107 aa, Oryza sativa
  unsure (1)..(107): unsure at all Xaa locations
  Clone ID: PAT_MRT4530_1359C.1.pep
LCKKENKERSIHAITRSRIHKHVPGDEDRAPCTAQKEDHNPVRIKPPEEDPAEENAETARADNKXTRENPWPAGXGNTCTGQSKKATRXTGKKHRKTYKIYMFKVLK

SEQ ID NO: 109443 - protein, 174 aa, Oryza sativa
  Clone ID: PAT_MRT4530_135C.1.pep
FAVPPARRARGGGGGGGIGLVSVTMVAPSFTTHSFAMNQRLLLLDAVKTAALARASTYQTSVVMPATAALAPPGYYMVFVVNGHIPSEGIWPCWGGIGNAVRVRASPVGRLRCVTCALAGDGSAWATGSEAAVAIITRSAFTVVRSSAFISTVARSTFAVARPPSPPLRLLLRR

SEQ ID NO: 109444 - protein, 134 aa, Oryza sativa
  Clone ID: PAT_MRT4530_13600C.1.pep
MAEREGTPASHPVSAVAPPPLAALSPSLRLLPLLLLLKSCAFCACRKGYGVRCSMLDGRRLLIQTNAREIAPRSPRRPRSSAPPASWLPPARHSCLFCDFGCHAAAKAPSCSPVATRGEETGMRRGGEGRGIRG

SEQ ID NO: 109445 - protein, 518 aa, Oryza sativa
  Clone ID: PAT_MRT4530_13601C.1.pep
YNQFFMAEEDIHKTAFRCLGAIVLFEWVVMTFGLKSAGATFQRAMNYIYHDLIGWLIEVYIDDVVVKSEEIEDHIADLMKVFERTRKYGLKMNPTKCAFGVSAGQLLGFLSHERGIEITQRSVNAIKKIQPTQNKTELQEMIGKINFVRRFISNLSGRLRHYLLSNECTVICKTDVVKYMLSAPILKGRVGKWIFSLTEFNLRYESPKAVKGQAIANFIVDHRDDLIGSVEIVPWTLFFDGSVCTRGCGIGLVIISPRGACFEFAYTIKSYATNNQAEYEAVLKGLQLLKEVEANAIEIMGDSLLVISQLGGEYECKNGTLMVYNEKCLELMKEFRLVTLKHVSREQNTEANSLAQGASGYKPMIKDVKVEVAALIANDWRYYKGCQDCQKFGAIHWAPASAMNPIIKHWPFRGWGIDMIGMINPPSSKGHKFILVATDYFTKWVEAIPLKKVDSRDAIQFVQEHIVYRFGIPQTITTDQGSIFVSDEFVQFADSMGIKLLNSSPYYAQANGQAEASN

SEQ ID NO: 109446 - protein, 254 aa, Oryza sativa
  unsure (1)..(254): unsure at all Xaa locations
  Clone ID: PAT_MRT4530_13602C.1.pep
MVLHNSKPKSTSLNKFAQNKGDKRQGIFTEIQKLAGFLIPVETTPXHHSTTKPPHAPFVKGNXPLESKSPTLCSAGQTTIEWPVRPDYFVTDRKLAVTGQSLSPLNLAGLTAVKQPVRPSTARSDRHWLGLTGCGSGGXSVSPPKTRPVQQTSRAGQTGLTTPVRPANSPGQTDLRPTVRPQVTFQHNQPLVKRRYLLTRISEFGVLGLYGKLIQRDIQPMNNPSKKHKFSQGEMAHTQKDTPPDITTXGYPNL

SEQ ID NO: 109447 - protein, 839 aa, Oryza sativa
  unsure (1)..(839): unsure at all Xaa locations
  Clone ID: PAT_MRT4530_13603C.1.pep
IVAEEGDEREDHIADLRMVFERTRKYGLKMNPTKCAFGVSAGQFLGFLVHERGXEITQMSINAIKKIQRPENKTELQEMIGKINFVRRFICNLSGRLEPFTPLLRLKAYQKFTWGAEXQKALDSIKEYLSSAPVLIPPQNGITFRLYLSAGEKSIGSVLIQELEGKERVVFYLSRRLLDAETRYSPVEKLCLCLCFSCTRLRHYLLSNECTVICKADVVKYILSAPILKGRIGKWIFSLTEFDLRYELPKAVKGQAIADFIVDHRDDSIGLVEIVPWTLFFDGSVCTHGCGIGLVIISPRGACFMFAYTIKPYATNNQVEYEAVLKGLQLLKEVEADAIEIMGVSLLVISQLAGEYECKNDTLIVYNEKCRELMKEFRLVTLKHVSREQNIEANDLAQGASGYKPMIKDVKVEVAALTADDWRYDVPHYLXNPSQSASRKLRYRALKHTLLDDELYYRTIDGVLLKCLSADQAKVAIGEVHEGICGTHQMAHKMKCLLRRAGYFXPTMLEDCFKYYKGCQDCQKFGAIQRAPASAMNPIIKLWPFRGXGIDMIGMINPPSSKGHKIILVATDYFTKWLEAIPLKKADSGDAIQFVQEHIIYRLGIPQTITTDQSSIFVSDEFVQFADSMGIKLLNSSTYFAXANGQTEASNKSLIKLIKRNISDYPRQWHTRLAEALWSYRMAFHRSIQVPPYKLVYGHEVVLPWEVRIGSRRTELQNDLIADEYYNLMDDEREDLVXSRLRALAKVTXDKERVARHYNKKVVPKSFSEGELVWKLILSIGTRDNKFGKWSLNWEGPFKIYQVLSKGAYVLQELDGEVYGRSLNGKYLKKYYPSVWVNA

SEQ ID NO: 109448 - protein, 244 aa, Oryza sativa
  unsure (1)..(244): unsure at all Xaa locations
  Clone ID: PAT_MRT4530_13604C.1.pep
WFCTIQNLNQLVSINLHKIKETRDKEFFTEVRKLAGFLIPVEASPTLPLNHEAIARPLSVGTEIPNSVLCRSDRHCEAGQTGLLFNGXKTSRYRAIIEPTQPGRSDRSIVAGQTVHGSVRPPSAWSDRLRLXRXCIATKNQTSGAGQTGLTTXVRPANSPGQTGLRPTVRPHVTFQLNRPLVKRRSLLTRVSEFGVLGLYGKLIQRAIQPIKKPSKKHNLRQGXRAHTPKDXPPDIPTRGYPNL

SEQ ID NO: 109449 - protein, 323 aa, Oryza sativa
  Clone ID: PAT_MRT4530_13605C.1.pep
VCVRWWLLRGVGFVRAVEDACGVGIPFVVSVPRPVLDENFNAHSAWNSIREFLGVTTMLEDCFKYYKGCQDCQKFGAIQRAQASAMNPIIKPWPFRGWGIDMIGMINPPSSKGHKFILVATDYFTKWVEAIPLKKVDSGDAIQFVQEHIIYRFGIPQAITTDQGSIFVSDEFVQFAESMSIKLLNSSPYYAQANGQAEASNKSLIKLIKRKIFDYPRQWHTRLAEALWSYRMACRGLIQVPPYKLVYGHEAVLPWEVRIGSRRTELQNDLTADEYYNLIADEREDLVQSRLRALAKVTKDKERVAQHYNKKGVPKTFSDGELV

SEQ ID NO: 109450 - protein, 295 aa, Oryza sativa
  Clone ID: PAT_MRT4530_13606C.1.pep
MDSRRGRWLAGGVRGGWISRRSLGFPSEAAGFKLVHLFGSTKLQQPCKEEDHKRLERVLLRMHSVVEEADGCHITNQGMLLQLKGLTEGFYLGYYMLDNIKFQPPEEESIKDEVVVIGRTEDVPKFGTTQPIRVKRLSEEDDWYYFKALAFGIMDPDEHPKLASLAMQLCHARGPGWNAENLIIRKRGGQVAQKHLSSSGVHPDYLFERNTPVDFSRIAFVDGQVQGFLVYDVRVASPAEEAILQNPAFILEDSSTSLLPNIPTCNASKYYFLVLFAWLYFFLIAGKNNRQQTRR

SEQ ID NO: 109451 - protein, 81 aa, Oryza sativa
  Clone ID: PAT_MRT4530_13607C.1.pep
LVLNRLLPAHNPFSPVCLPPPLSPLSHGASRSLTHQTKVYIWLRASSPLQQPAQLGEIDRAAAGRRVHAGIEAERARARAS

SEQ ID NO: 109452 - protein, 181 aa, Oryza sativa
  Clone ID: PAT_MRT4530_13608C.1.pep
MAMPLGVVIFLGGIVDTRHRVRTRDEWIFFSLALFLGKPFSMGAHVGSRRPTRGGVNRRDEGFFTEVRKLAGFLIPVEASPTPPLNHEATARPICQGVGKRQASSTISSERSPGNTSTSRLGGGNLQQAIIEPTQPGRSDRSVVVGQTVHGSVRPPSARSDQLRLWRLCIATKNQTSATDQ

SEQ ID NO: 109453 - protein, 375 aa, Oryza sativa
  Clone ID: PAT_MRT4530_13609C.1.pep
FLVAIQSRQSRNRSDRADGGLTEPWMSSLWAGSRLAYPLTKGACGGFVVERSVVVSFMQRPARSYHHVACHDGFKEFDDDLGFTLCNDYYSPPPNLAARRPAKTMDCDLSSTMKPCEGEELARRRSSSAPPARFARSSTPRRQGAVLLVGLHAPVVAIEGQRRLHKSACSPQICGTYGHIVTISLAGIVIGGSLMPVRPNPTCLGGNEVRGDGEGLMILPLLAFADYHCLLNIVVADNILMGLTSADQIYNANAPSPCSAVTRRLAGLTGCPPARPRCRLGLCRRPGSATARRLAGRPDLGGGSTARPVARRSGLGAGSAARGRRRRWEGRGEGRKGMGRKGERPGEEARRRRRRRRRGLGVRGGKEEKIRRERR

SEQ ID NO: 109454 - protein, 48 aa, Oryza sativa
  Clone ID: PAT_MRT4530_1360C.1.pep
MGCRWSGRARWHWRRAAVMVTGTAGASRSGWCYCAGSGGDGIEEDNMA

SEQ ID NO: 109455 - protein, 126 aa, Oryza sativa
  unsure (1)..(126): unsure at all Xaa locations
  Clone ID: PAT_MRT4530_13610C.1.pep
KKYWGLEGTSNSXDQAKDTDRTVRERIYLQSLPAAEAAARAKESAQDIINLKPIIEKKQWHDVRDDLRLRGYYLCYDLKIVINSKPKDQKKGLKDLTGKLLATMDXLDHAVKNMSPEQAETYYTAT

SEQ ID NO: 109456 - protein, 129 aa, Oryza sativa
  Clone ID: PAT_MRT4530_13611C.1.pep
CRRKPPRTPTPSGRTAPRTAPAPPARRPPWRPAASPWRRTPRRRRCRRRRRPPPWPAPTCPRRGCRGGGSAATRRTRSPRACPPPPPPCTPSPASRRRLRSRRARRPRRLLPPPRRDGETRAAPSVPLH

SEQ ID NO: 109457 - protein, 176 aa, Oryza sativa
  unsure (1)..(176): unsure at all Xaa locations
  Clone ID: PAT_MRT4530_13612C.1.pep
RSGXLVPXDIIFGLLTKRLEEGYNKGETGFILDGIPRTHMQAEILDEIVDIDLVLNFKCADNCFMKRRFGGDICPHCGQLFDFSKTASSDRNPSLGSCTWPSQVQHAAVLGLEDSRMEKMRAYAEQTKLLEDYYRKQRKLMELKTSARPGETWQGLVAALHLQHLDASPTPHKLTM

SEQ ID NO: 109458 - protein, 59 aa, Oryza sativa
  Clone ID: PAT_MRT4530_13613C.1.pep
TIKALSPHAARTRARGPYSARPLFFFCFFFFFFFFFFFFFFFFFFFLAPQPKEKNLSSP

SEQ ID NO: 109459 - protein, 106 aa, Oryza sativa
  unsure (1)..(106): unsure at all Xaa locations
  Clone ID: PAT_MRT4530_13614C.1.pep
SPYNLFLRQQYGISATPFFHSAPFQLRITPVWRQLALVAQQSRYQDICVVPPIAPQLQLQQFGVVYFDRNVAQAPSLLSLTVPSRFGIYPRSSGLPXTITTLGGVL

SEQ ID NO: 109460 - protein, 235 aa, Oryza sativa
  unsure (1)..(235): unsure at all Xaa locations
  Clone ID: PAT_MRT4530_13615C.1.pep
MRNKCYSLSLTDSQLADLTFQGLIAPIKGKFSAQDLESLSNLAQKVTLHEQRFAEAKKNFTKINHVYPYMYGSDDEDDDSEVETAEWVRSKKVIPCQWVRSSGKEETFDFDITKADRIFHLLLREKQIQLLAGHVIPSAEELGKRGYCKRHNSGSHSTNDGKVFRQQIQEGIEGGKIKFDDSKKPMKVDGNAFPVNMVHTSGRTTDGGKXRSFQMNSAWIINKYQRKCHAWKFTN

SEQ ID NO: 109461 - protein, 173 aa, Oryza sativa
  Clone ID: PAT_MRT4530_13616C.1.pep
MDSHVGKLFDSVGSIFRGSDTLPWCDRDIIAGCENEVAEAANEEQKNESLMRLSWALVHSRQPEDVNRGIGMLQASLDRSTSPLQTREKLYLLAVGHYRTGDYTRSRQLLERCLEIQPDWRQALTLQRLVEDKTRRDGMIGMAIVTGAFGLVGLVAGGIIAAASSSSSSSRKK

SEQ ID NO: 109462 - protein, 113 aa, Oryza sativa
  unsure (1)..(113): unsure at all Xaa locations
  Clone ID: PAT_MRT4530_13617C.1.pep
CVRPTARRRSTDFSSRSHLCPAWKLTGLASKKINPVVVHGRLYRSSEFHAQXLLQCRALKHETDNGEEASSLPRPTVQAEGGDSREVYGGEYQRAVEKAREIFFSIFVDVSVA

SEQ ID NO: 109463 - protein, 383 aa, Oryza sativa
  unsure (1)..(383): unsure at all Xaa locations
  Clone ID: PAT_MRT4530_13618C.1.pep
MGYVGQHGVATLRRYKYSGVDHSLVAKYILQPFWSRFVNLFPLWFPPNMITLTGFMFLLTSAFLGFFYSPHLDTAPPRWVHLAHGMLLFLYQTFDAVDGKQARRTNSSSPLGELFDHGCDALACAFEALAFGSTAMCGKATFWYWFIAAVPFYCATWEHFFTNTLILPIVNGPTEGLMLIYLCHFFTFFTGAEWWAQDFRKSIPLLNWVPLVPEVPVYGIALFLMIAFAVIPTIGSNIHNVYKVVEARKGSMLLALAMLFPFGLLLAGVLVWSYLSPSDIMRNQPHLLVIGTGFAFGFLVGRMILAHLCDEPKGMSLAYFPFAIANALTARLDDGXPLVDEQLVLLMYCLFTVALYMHFATSVIHEITNALGIHCFRITRKKA

SEQ ID NO: 109464 - protein, 41 aa, Oryza sativa
  Clone ID: PAT_MRT4530_13619C.1.pep
KGPRRHGLYPLPSTSSTKQAFAVAPSLERWHSRFGHLSAAC

SEQ ID NO: 109465 - protein, 85 aa, Oryza sativa
  Clone ID: PAT_MRT4530_1361C.1.pep
TSVLPHSSLLPLDLNIIPVCFLLQLTFSGAIIEVCMRKLVFYPEIVGFLEEDKDDFPYVEARYVYGSPPKLIMLDDKGDQKETIR

SEQ ID NO: 109466 - protein, 155 aa, Oryza sativa
  unsure (1)..(155): unsure at all Xaa locations
  Clone ID: PAT_MRT4530_13620C.1.pep
ASFHEATARPLRQGVGKKTSRYRAIIEPTQPGRSDRSVVAGQTVHGSVRPPSARSDQLRLWRLCIATKNQTSATDQPGQTGLRPTVRPQVTFQLNRPLVKXRYLLTRVSEFGVLRLYGKLIQRAIQTMKNPSNKHNLSQGXRAHTPKDXPPDIPT

SEQ ID NO: 109467 - protein, 183 aa, Oryza sativa
  Clone ID: PAT_MRT4530_13621C.1.pep
MATREHCLACFEALDAHLNNRKALALEEIQELSAHTPESGLTSPKALDDLSLQHLAVPDASASSSSSSTSLGASTPATSTSSLPIPPSSAPLFVTWNTMDDGEPMLRGCIGTFESQDLSEGIPEYALISALHDSRFSPVRNSELPTLQVAVTLLTDFEEVDDIFDWEIGVHGIRLSFTTAAVA

SEQ ID NO: 109468 - protein, 138 aa, Oryza sativa
  unsure (1)..(138): unsure at all Xaa locations
  Clone ID: PAT_MRT4530_13622C.1.pep
KTSCYRAIIEPTQPGRSDRSVVAGQTVHRSVRPSSARSDRLRLWRLCIATENQTSATDHPGQTDLRPTVRPHFTFQXNQPLVKRRYLLTRISXFDVLVLYGKLIQRAIQPMNNPSKKHNFSQGERAHTPKDTPPDKTI

SEQ ID NO: 109469 - protein, 209 aa, Oryza sativa
  unsure (1)..(209): unsure at all Xaa locations
  Clone ID: PAT_MRT4530_13623C.1.pep
KTIRIAVTARAQLHRSTTKPPHAPFVKGNXPLEPKSPTLCSAGQTTVVRPVRPDYFXAVTGQSLSPLNLAGLTAVXWLVRPSTARSDRRRLGLTGCGSGGSVSPPKTRPVQQTSGAGHTGLTTPAGQTGLRPTVRPQVTFQLNRPLVKRRYLLTRVSEFGVLGLYGKLIQRAIQPMKNPSKKHNLSQGXMAHTPKDXPPDIPTRCHSLL

SEQ ID NO: 109470 - protein, 225 aa, Oryza sativa
  unsure (1)..(225): unsure at all Xaa locations
  Clone ID: PAT_MRT4530_13624C.1.pep
MARSTLSVKGGGGHTRQPSQHHIHKSLDAPPLCLPMLSSLPWLAGETFPSIARAVLADAFLAAVAHRQDAQSRASTCDGEVRAMACARGGVEGGGAPVRAARPAVTAAPTAQPPQLPSAPPLLRRQVAVAVGDDGAMEFCLEVVNSKPLTNXRRASSTISSERSPGNTVHGSVRPPSARSDRLRLWRLCLATKNQTSATDQPGQTSLRPTVRPQVTFQLNRPLVK

SEQ ID NO: 109471 - protein, 88 aa, Oryza sativa
  unsure (1)..(88): unsure at all Xaa locations
  Clone ID: PAT_MRT4530_13625C.1.pep
AEXXXEEXDRXXXXXGRRXGNSXXXGGXXXXXXEXGKXGXXGXXCGXGXFXASXAAGAARSXXAXGHVLACLXXXGESRRDXSXGGGL

SEQ ID NO: 109472 - protein, 67 aa, Oryza sativa
  Clone ID: PAT_MRT4530_13626C.1.pep
MDSFLSADRSNILVLMTLTSTASFSSGQDVEGRVPRRMSGMRYTGTGTAPPATNLRHIHPNHVPPEH

SEQ ID NO: 109473 - protein, 657 aa, Oryza sativa
  unsure (1)..(657): unsure at all Xaa locations
  Clone ID: PAT_MRT4530_13627C.1.pep
MATRRRSFPLVPLLLFLLAAAAYGRLISDGSPASASATSLLSNPVSAVIRLTTSNSASASSPPAAAPEEKCEQSYGFLPCTTTVLGNLFLVLAYGFLMYKAATFLSAGSELLLEIMGPGLVGGLLLPIPRALPDALLVPRRRIARSRTGASXCTTTVLGNLFRLVAYCFLMYKAATFLSAGSELLLEIMGPGLVGGLLLPILGALPDALLVLVSGLSGSRETAQSQVLIGMGLLAGSTVFLLTLLWGTCVVVGKCDIGPNGVAVDLQNNKGFSLTGTGISTDVQTSYAARIMGISVIPFIIAQFPKMLKTHHGQRLAVLLALIVSFSLVLAYCLYQVFQPWIQKRKLAYAKHKHVISGILRHAQMEALGRLLNEDGTPNEDVIKKLFHKIDMDESQTLSRAELHALIIGINFEEVDFDKNDAVDKIMDDFDTSGNDIVEEAEFVSGMKRWLNEAKRSVPTSGAYSNKFITDYHARTRQEHDLLVDRSDETVESVENPGWCITKAVGLLLLGSAIAAAFADPLVDAVHNFSNASHIPSFFISFIALPLATNSSEAVSAIIFASRKKLRTSSLTFSEVYGGVTMNNTLCLGVFLALIYIRNLTWDFSSEVLIILLVCVIMGLFTSFRTTFPLWTCLVAYMLYPLSLVVVYILDFVFGWS

SEQ ID NO: 109474 - protein, 253 aa, Oryza sativa
  unsure (1)..(253): unsure at all Xaa locations
  Clone ID: PAT_MRT4530_13628C.1.pep
MVLHNSKPKSTSLNKFAQNKGDKRQGIFTEVRKLAGFLIPVEASPXHRSTTKPPHGPFVKGNXPLESKSPTLCSASQTAIEWTVRPDYFVTARKLVVTGQSLSPLNLAGLIAVKRPVRPSTAGSDRHRLGLTGCGSGGSVSPPKTRPVQQTSRTSQTGLTTPVRPANSPGQTDLRPTVRPLVTFQHNXPLVRRRYLLTRISEFGVLXLYGKLIQRAIQPMNNPSKKHNFSQGEMAHTPKDTPPDITTXGYPNL

SEQ ID NO: 109475 - protein, 953 aa, Oryza sativa
  Clone ID: PAT_MRT4530_13629C.1.pep
MKISELSPEYREPPSHAGLIADLSKAVSDVESFAASATAPEKLAADLRRILTSLASAASSSSFTESLSVQIWRLGTRLWNAVVDRANSAALAGGPAALAVEAEIRQAAPELLLLAGIPNGVPSAAAKVASFFHRSGLAWLDLGRVDLASACFEKATPLVSAAATEDRGVLLELNLARARAASDAGDQALAVALLSRSKPLAAASPEGAKSLAQGYLSIGEATLAAKHSNPAVEASTLFTEALDLCEKAASPSSSSPRTPPYGGATPKTPNLEGLKRRCLRFLALERLQAQDYEGVLRCIRVSRASMGLEEEHPSIGVMAMRAWIGSGNMAEADKELERLMANALATENLCVSAAEAYLAAAGPEAARKVLIALAARCRAGGAAAAVRVVKQVIDGGGGGIGRARAIAELVSDERVVALFDGPGNTHERGTMHALLWNCGTEHFRAKNYDTSADLIERSMLYVSRDEESRSRRADCFRVLSICHIALQHLDRALEFVNEAYKVEPNIKCAFLKVKINLQKGEEDEAFKQMKTMVGCVDFNPEFLTLTAHEAMSCKSFGVAVASLSYLLGLYSAERPMPMPEVAVLRNLIELLSREPGTEAEILKYSRRAKQRMADLGVESFFGSGIVGGRELNWFADLSWNMGLRASKEKKYNFGAEFFELAAEFFSSRNAECDENRSKVCKALIMAVTIMLNAEELNNSPLSDSDIKKGVEMLSRAGKLLPLISPSVPVASDQLEANNFLYLHTFNSYQLMGRMGTPAHPQQLQLIKNFASSKACTPANLLTLGVTASKGALPNMLAAEFSLKACITTALASQSPNYRVISCALRKLACLAGLQDLNGSKSDAAYDVFQQAYQIVVGLKEGEYPVEEGQWLVATAWNMSCLPLRLHQAKVARKWMKMGLDLARHLEGMKERIASMQTTFENFERVSGDEPDECSQEEAPKASISGSMSQPVLV

SEQ ID NO: 109476 - protein, 123 aa, Oryza sativa
  Clone ID: PAT_MRT4530_1362C.1.pep
MAAGFGGEKTTSAAAYASHRNCRRDERKPSAPPTLPTPARWEETTATPRTPPFATDFAGDSRRLRHRFRRRFTPPPPRISSEIHAASATDFARDSRHLRLSHSPPLSLSLSLSDFNPHDGKEQ

SEQ ID NO: 109477 - protein, 190 aa, Oryza sativa
  unsure (1)..(190): unsure at all Xaa locations
  Clone ID: PAT_MRT4530_13630C.1.pep
PLEPKSPTLCSVGQTAVVRPVRPDYFVTARKLAVTGKSLSPLNLAGLTAVXWPVRSSTARSDRRRLGLTGCGSGGSVSPPKTRPVQQTSGAGQTGLTTPVRPANRPGQTGLRPTVRPXVTCQLNRPLVKRRYLLTRVSEFGVLGLYGKLIQRAIQPMKNPSKKHNLSQGXRAHTPKDXPPDIPTRCHSLL

SEQ ID NO: 109478 - protein, 253 aa, Oryza sativa
  unsure (1)..(253): unsure at all Xaa locations
  Clone ID: PAT_MRT4530_13631C.1.pep
MVLHNSKPKSTSLNKFAQNKGDKRQGIFTEVRKLAGFLIPVEASPXHRSTTKPSHAPFVKGGKPLEPKSPTLCSADQTAVVRPVRPDYFVTARKLAVTGQSLSPLNLVGLTAVXRPVRPSTARSDRHRLGLTGCGSGGSVSPPXTRPVQQTIEAGQTGLITPVRPANRPGQTVLRPTVRPQVTFQHNQPLVKRRYFLTRVSEFGVLGLYGKLIQRAIQPMNNPSKKHNFSQGKRAHTPKDTPPDITTXGYPNL

SEQ ID NO: 109479 - protein, 262 aa, Oryza sativa
  unsure (1)..(262): unsure at all Xaa locations
  Clone ID: PAT_MRT4530_13632C.1.pep
VTASKGAMNPLLAKLATLMGDEYKKLKGVRKEIVFLNSELSTMNALLEELADRDXDWRNHIREMVSDIEDCIDDFMHRAVSDHKGAKPSFLHKTXSPSQHTEGNQIQEIKARVLEANKRRIRYXADNCVPTSVVPIDPRLSALYTETSSLVGIHDPKANLIKWLMGDEQERNVVSVVGLGGLGKTTLVKEVYRDIGGKFDCKAFVSVSQRPDMTALLISIILQIGRQKSSHSCSMKDLIDSLRESLQHKRYLALTAKAGTSL

SEQ ID NO: 109480 - protein, 39 aa, Oryza sativa
  Clone ID: PAT_MRT4530_13633C.1.pep
SVLEMNNPDLHTNNTKSLVMTRGHDGINTTGNIAGRRRL

SEQ ID NO: 109481 - protein, 186 aa, Oryza sativa
  unsure (1)..(186): unsure at all Xaa locations
  Clone ID: PAT_MRT4530_13634C.1.pep
MQQINETRDKEFFTEVRKLSGFLIPVEASPTPPLNHEATARPLRQGVGKKTSRYRAIIEPSQPGRSDRSVVAGQTVHGSVRPPSARSDRLRLWRLCITTKNQTSATDQPGQTVLRPTVRPQVTFQLNRPLVKRRYLLTRVSEFGVLGLYGKLIQRAIQPMKNPSKKHNLSQGXRAHTPKDIHRTYP

SEQ ID NO: 109482 - protein, 241 aa, Oryza sativa
  unsure (1)..(241): unsure at all Xaa locations
  Clone ID: PAT_MRT4530_13635C.1.pep
MAGAPRGLVLLGVCAVLMGVAVGGXAASVXVGTAKCADCTRKNMKAEGAFKNLQVARTXKSPRGEVREQGLPGKPASHRTLFSVPLRRPTFTGSELHRSSCHHGPNNEPMALAQVAIQDAWPTRRRGHLSSPIAGKTHYPXAALCASATDLRSPSRRRSIDHFXHKKPVPPKPEPXPEPRKPXKPEPEHXPILDQIHKKEKHFFDXTFHEKPVPPKPEPKPEPKPEPKPQPAPEYHNPSPW

SEQ ID NO: 109483 - protein, 33 aa, Oryza sativa
  Clone ID: PAT_MRT4530_13636C.1.pep
PVTSLRSHARVLLAATASTTTTSLQHRAHQIQD

SEQ ID NO: 109484 - protein, 104 aa, Oryza sativa
  Clone ID: PAT_MRT4530_13637C.1.pep
SEQIEVREDLTYVEKPMKILDSMERRTRNRVIRFCKVQWSNHAEEEATWEREDEIQTAGFAPANLAGAIDGGRTSRPVSFLPRPPSPPSPRWHRARGVALSLLH

SEQ ID NO: 109485 - protein, 79 aa, Oryza sativa
  Clone ID: PAT_MRT4530_13638C.1.pep
TINIFTKLGVNDQHVTVWVKKITHPQAKKKKRRKHEAKSTMCRRDCLVRVGSGVEGAVGRGHFVGASIFPSGEQRGKPC

SEQ ID NO: 109486 - protein, 63 aa, Oryza sativa
  Clone ID: PAT_MRT4530_13639C.1.pep
MGALGVGGGGGRSESSRWHTNVGGVVSKGGDRRDQRPRPVEEEAEAAMARLAKSSHVEAWEAI

SEQ ID NO: 109487 - protein, 65 aa, Oryza sativa
  Clone ID: PAT_MRT4530_1363C.1.pep
VTSILFTRGGYRKPNQINLFYLGNKYVNVFFYLTLYIGLVDQYARRGGCLTPAARLIIVVSVMDY

SEQ ID NO: 109488 - protein, 145 aa, Oryza sativa
  Clone ID: PAT_MRT4530_13640C.1.pep
LLVLFFFFFLFFFFFFFFFFLYHERGNYKKRAQRTKGRGGEQRRQGQPNQQTGTPTQKMGRAGPRQGRGPQRETPSSRQGNKPRTRPPPWPPRGPQPPTKLKPTEPYGSPTPGPQGRKRTGNPRTRGPAQKGQRAPAPPGKQSPQ

SEQ ID NO: 109489 - protein, 69 aa, Oryza sativa
  Clone ID: PAT_MRT4530_13641C.1.pep
MSATTAAVPFWRAAGMTYIGYSNVCAALVRRCLKEPHKSEAASREKVHFAISKWADGKQEKPTVRTDDE

SEQ ID NO: 109490 - protein, 56 aa, Oryza sativa
  unsure (1)..(56): unsure at all Xaa locations
  Clone ID: PAT_MRT4530_13642C.1.pep
TMTIQPKVLFVKSHLQSYDVCTHHFSLLLATSSRKGTFVKEYFXTVXTTIRQSKPP

SEQ ID NO: 109491 - protein, 66 aa, Oryza sativa
  Clone ID: PAT_MRT4530_13643C.1.pep
PVLARFRGGSLWGFPVCQTAWPYLFWPRGAILFGFPANPCRRSPFFAFRLGPFRKVALGVHLTPPF

SEQ ID NO: 109492 - protein, 69 aa, Oryza sativa
  Clone ID: PAT_MRT4530_13644C.1.pep
ELPACRREPHHYSRGGSSFLLKGFMMRKLAAKAYSFKGRLPTNPDLTRTDCNYDLYINSKLISDLHLKI

SEQ ID NO: 109493 - protein, 66 aa, Oryza sativa
  Clone ID: PAT_MRT4530_13645C.1.pep
HPQRPTALPRSHLPPSPCPHWDTTTRIQKQNHVISSQPPPRNFLRLHRRLLPLPRGASLHHCRIGS

SEQ ID NO: 109494 - protein, 69 aa, Oryza sativa
  Clone ID: PAT_MRT4530_13646C.1.pep
QYYLFCSHDYCFFKKNKTKLQYRILLPAFQVIRLSKALHSVPPWRAALTSPHRLCDVVEERGCGPSFLR

SEQ ID NO: 109495 - protein, 121 aa, Oryza sativa
  Clone ID: PAT_MRT4530_13647C.1.pep
MRLHPSRQPQRISAWLAMPTPSRARGAIRLKPRWAPWRQCCLAELPHHLVPPQPPKLPSMCLARWRGGWGPSRWLPPSRLPTATVSPMAVVDRRPPTIAAERASEHAMEAVANPEQKLPGV

SEQ ID NO: 109496 - protein, 362 aa, Oryza sativa
  Clone ID: PAT_MRT4530_13648C.1.pep
MELGLSLGEAMADAGRELVLGLGMGRREEAAEAGRRDHEVRRELEFGSMSSRCGGSSPEPTVRLTLLPMVPGLGLPWPPPPPPSSESRHLEASTRGFDVNRPPSSGGGGGGGGAEEEQDDVAGAALSSSPNNSAGSFPMDDFSGHGLGGNDAAPGGGGGDRSCSRASDEDDGGSARKKLRLSKEQSAFLEESFKEHSTLNPKQKLALAKQLNLRPRQVEVWFQNRRARTKLKQTEVDCEYLKRCCETLTEENRRLQKELAELRALKTVHPFYMHLPATTLSMCPSCERVASNSAPATASSAATSSTAAPPAAPSSGGIAATSSSAAAAAAPDHRPSSFAALFSSPRGFPLSVAPQAQPPTSS

SEQ ID NO: 109497 - protein, 239 aa, Oryza sativa
  Clone ID: PAT_MRT4530_13649C.1.pep
MVSLSAAVAPAAGVVPPPQKAQAFAVAEAHAPTIPRRHLLLASAASTLPAAAAAASASAAAAPSFAEIPGSGGVKALDLREGPGEVPADGDQVAIHYYGRLAAKQGWRFDSTYDHKDETGDPMPFVFTVGAGNILDAPCDFFYGIVNLVNVSLLSVIPPVIPGIEAAVKSMRVGGLRRVIIPPSQGYQNTSQEPIPPNFFDRQRLFTTIFNPTRLANGEGSTLGTLIFDIELISIRQHS

SEQ ID NO: 109498 - protein, 63 aa, Oryza sativa
  Clone ID: PAT_MRT4530_1364C.1.pep
LGKDHKVIKGRKKPELPPNQPINGRHQDSSILFGGPWRSWGSRTFPCLSESCPREQVNNLYPD

SEQ ID NO: 109499 - protein, 397 aa, Oryza sativa
  Clone ID: PAT_MRT4530_13650C.1.pep
MELGLSLGEAMADAGRELVLGLGMGRREEAAEAGRRDHEVRRELEFGSMSSRCGGSSPEPTVRLTLLPMVPGLGLPWPPPPPPSSESRHLEASTRGFDVNRPPSSGGGGGGGGAEEEQDDVAGAALSSSPNNSAGSFPMDDFSGHGLGGNDAAPGGGGGDRSCSRASDEDDGGSARKKLRLSKEQSAFLEESFKEHSTLNPVSFSSSHRSNTMASSSSSSSSRSPNVASRLRCVASRTEAALAKQLNLRPRQVEVWFQNRRARTKLKQTEVDCEYLKRCCETLTEENRRLQKELAELRALKTVHPFYMHLPATTLSMCPSCERVASNSAPATASSAATSSTAAPPAAPSSGGIAATSSSAAAAAAPDHRPSSFAALFSSPRGFPLSVAPQAQPPTSS

SEQ ID NO: 109500 - protein, 69 aa, Oryza sativa
  Clone ID: PAT_MRT4530_13651C.1.pep
RARPFFLFFFFFFFFFFEKENDVHSVKYHTFHWGEALSLNPFFEGLGRTLLGLEQPGNFCWQSPQETEL

SEQ ID NO: 109501 - protein, 92 aa, Oryza sativa
  Clone ID: PAT_MRT4530_13652C.1.pep
RVRRTRGGTEEERERKCETLKGETLYLEVSRRERSALRSEMASAVLEMLKNLWESQVTDEENRAFNYRILKAVGLFAGSIAVMHNFGELMNI

SEQ ID NO: 109502 - protein, 709 aa, Oryza sativa
  Clone ID: PAT_MRT4530_13653C.1.pep
MSEEGGGDLDVMSDLKQQGMVQRRVIQDVRNSLYYSSAMSMVLETNGGGDMVAEAEMNNGGGGAPSSVLDELLWENRMEQAVEQLMQEQESGVLALSLSARKAMVADRLASVAEHPRTPRPELLRAVAGLCRLGEARRANHLLLGYYRRSVLRGVDELRQKQKQRNNNIIIIKELVRTVLSTIVEASRSVVSSEAAEARRWAREEMDGLGVAFRELVHMAAADGKLSLLLEAARCALSYGPLLLLLDEELAEYLRELLARCMEEALAMYAAHLRQVLRLLVLPVPDNDDDDDDEGASSSMLLGRFLLSGVLRTSTTKHNCWCLLTTSGRKLVTLMQEVADDVSPLLELDLALGSTLLHLLADLLRDYMLMQLGATAAADDMMMVSLLINCTTLLSLFPLIARRIFTTTSSQQPADFHHATNNKGELHLHGLIVSIKEAAAQVWTCFCHHFIRHTIMSTTLHHKTHSSSSIRHGANMPSSAFQVLFLRVRQLNSLYGAILTGEDGTMKKLLQELMEAIILFYLSDEDLHDSWIIRQASHAVPIQDTLLLQIQLDVHFLLQVAQFGGFSSDDFRDNALDSLRKAQAKVVPLSSFLEQQQHEEWAADAARHAMQVLMMGSQADEENSTDSVQKDELAADDGDEMQPDAWVGACTCSDGKSSDEFVSIEDDQLAIHSENEAGAAAAAQQVTIEEATSAQAKEEKNSSCSLQDR

SEQ ID NO: 109503 - protein, 43 aa, Oryza sativa
  Clone ID: PAT_MRT4530_13654C.1.pep
MVVQLMTDMIVEEAQAAEKPEFEVDLGLKSHKDQLIHVSDADQ

SEQ ID NO: 109504 - protein, 114 aa, Oryza sativa
  Clone ID: PAT_MRT4530_13655C.1.pep
RWCCLGVATIVSQTSGTAQAWHGPTNTPSHAVPAHGLHFVCWAWPVDPSCRAGPTCRWGGARHGLVARQGRHGPDPRRAGPCLGRAKISCHGPGRRASSLMAIYSGDGRMARRG

SEQ ID NO: 109505 - protein, 901 aa, Oryza sativa
  Clone ID: PAT_MRT4530_13656C.1.pep
MSRQARKEAAAAAQDMLKLDAAQMRKPAASQSRKGAAAPMRKAQGGARAASMVPEQSSSGLAARVPEHRSSRYGAASPPPSSFTDGSCFFNGSAGGFFGNAGQSPSDQNQSEDDYSTPISARDNTYVNVDSGDETPRTEKRIFWTQEEDVRMMSSWLLNSTDSTVGADRKNEQYWTDVEATYNETTPSHRRRNAKQIKDRFHKARMIYTSGYNDQMWIEKAHVFYIKDNEKLNLGPFVLMEVWNTVKTEAKWITYNNGLKAARKRIATKGLGKEKEGEDSSPLYVDELDEQPRPMGQKRAKKLQYAQSKEVDHIDLEELDKFSKLQNEQNANRLKVLEIQQKLSSEKIEQTKISHLAAKEQMEAAKVQREARKLEVEARMYETYNRLLVVDTSLMSDEEKVLEKIACYVTVRGEKAMQLLEIGLKASGASGGEHPGGDDEGSGGEFFASGGDGGDEDTVLEEIDPAEVYTLEDFLAEDEIMESFRRKIGDKLKAKIEGSSSGPPRRRQRQSGPRRYIPRPREKGHEDLVANYFSANPIYTDEQFRRRFRMNKPLFLRIVNALSNWDQFFTQRVDATGRDSHSPLQKCTAAIRMLGYGTPADALDEVLKIAASTSLECLGKFAVGIIECFGSEYLRPPTSDELEKILQENEARGFPGMIGSIDCMHWQWKNCPKGWAGMFINGFKGKPTMILEAVASRDLRIWHAFFGNAGSQNDIQVLNKSPLFIHAIKGEAPRVSYTVNGTQYDTGYYLADGIYPEWAAFVKTIRKPQTEKHKLYAQRQEGARKDVECAFGVLQSRFDIVNRPARLWKRNDVVNIMQACVILHNMIVEDEKDLVKIPLDLNENPSATIVLPPEVQTNDNPNPCFVDVLNRNSAIRAASTHRQLKNDLVEHIWQRYGPRGG

SEQ ID NO: 109506 - protein, 468 aa, Oryza sativa
  Clone ID: PAT_MRT4530_13657C.1.pep
MSSLRMVVQQYPGQPALPAMFIWLRNGDIAVAKIRIIRTWDAKSGWGEQQQCQQLQLMGQLAVGTKTSGTSDPSSVDNEPDQTFSVRKARGGKKRATQEIVKHRQSERLAAKEAGAFQTVAVKLNQVVAQHKLLDFDSATTPEALKDLAVTCGLDDHDVLQLNMVLAEEESRVLTPAEFRLRHLIQNKFTTLQIQKAAYCKQRGKIRKIKFGIEAHDASNHRKTFLRSIKVQGVEVADHVSKASVMHDYYQSILGVSSNSHWDFDLSDLYQDLSWGQDQLITQFTQAEILTAIWQMDRNSAPGPNGFGPGFYQAAWASISGTRKLPTAVIKLDFAKAFDSVTWSSLPAILQVRLLSYAERLILINAVLDTIPVYAMSALRLPKGVIEDLNKKRRAFLWAGEDTVSGARCLVAWDSVCMPKSVGGLGVKNIDKQNTALLVSVYSLDRKKRENCVYAPTFNLNCDFTLNF

SEQ ID NO: 109507 - protein, 634 aa, Oryza sativa
  Clone ID: PAT_MRT4530_13658C.1.pep
MSTAAAAAAAAAVQPVLPSSSASTGGQQHGVLTADRVAGLLTGCATLRRTGELHAAAVRAGVDGDRAVGFRLQRAYAASDRLDLTVTLLRLTPDPTTVFYTSAIHAHSSRGLHLAALALLSEMLGRGLIPTSHTLSSSLPACHGLALGRALHAYAFKLALAGDSYVATALLGMYARGGDADAARALFDEMPDPHVVPVTAMLTCYAKMGALDDARELFDGMPSKDFICWNAMIDGYTQHGRPNEALRLFRWMLRSGVDPDEVAIILALSAVAQLGTAESGRWLHSYVKNSRRVQLNARVGTALIDMYCKCGSLEDAVSVFNSIGDKDIVVWNAMINGYAMHGDSRKALEMFSQLRSQGLWPTDITFIGLLNACSHSGLVDEGHQFFQSMEEEYAIVPKIEHYGCMVDLLGRAGLIEEAFHLVQSMTIAPDTVMWVSLLAACRLHKNMALGQQIADYLVAGGLANSGMYILLSNIYAAVGNWEEVARVRSMMKASGIQKEPGCSAIEVGRKVYEFVAGDMSHPRTDEIYAMLEKMNGIVKEQGHVPQTELVLHDLDEVTKEKALAVHSEKLAVAFGLISTAPGETIKIVKNLRACADCHAVLKLISKITGRKIVFRDRNRFHHFVDGSCTCGDYW

SEQ ID NO: 109508 - protein, 202 aa, Oryza sativa
  Clone ID: PAT_MRT4530_13659C.1.pep
MAETVFTPSLEGMKHVKSESSVILTKPFLDVCKQILPVLDKFGAAMALVKSDIGGNITRLENKYSSDPSKYEQLYSMVQEEVQNKTAKGSSSCTNGLLWLTRAMDFLVELFRNLLEHQDWTMSQACTDSYTKTLKKWHGWLASSSFTVAMKLAPNREKFMEVISGTGDIKADIEKFCTTFYPFLKENHDFLASVGLDDLKAS

SEQ ID NO: 109509 - protein, 135 aa, Oryza sativa
  unsure (1)..(135): unsure at all Xaa locations
  Clone ID: PAT_MRT4530_1365C.1.pep
TLAVTTRAALAHPTGAALPIDLDILLPRPEPPPAAADAPPDPGAAARPPHXPHVPSPSAPPDPEAPLARCRRARPPLAAADTPQPRSPADAAAPPASGRAPLPPHLLERAAQMNGNLRTLLSLGTCTSFYCSEHC

SEQ ID NO: 109510 - protein, 52 aa, Oryza sativa
  Clone ID: PAT_MRT4530_13660C.1.pep
PYSSQVVVAVCLLVCSPKKFDPPLAPVNLFDRFNVCGCARAVAVRSMDQSLD

SEQ ID NO: 109511 - protein, 77 aa, Oryza sativa
  Clone ID: PAT_MRT4530_13661C.1.pep
CRMKPKKYNYPIFSSSFRLVFQMEFWDTFLCFLFRNLSNYPIFTSSFRLVFQMESWDTFLCFLFRNLSNYPFSAHPL

SEQ ID NO: 109512 - protein, 174 aa, Oryza sativa
  Clone ID: PAT_MRT4530_13662C.1.pep
MECGGGGREQQMQIVCVRGGGGGGGGGGGEEDGSSEWDQSSSRSALSLFKEKEEEIERKKLEVREKVFSMLGRVEEETKRLAFIRQELEVMSDPTRREVETIRKRIDKVNRQLKPLGKNCLKKEKEYKACLEAYNEKSNEKATLVNRLMELVGESEQLRMKKLEELNKTVESLY

SEQ ID NO: 109513 - protein, 155 aa, Oryza sativa
  unsure (1)..(155): unsure at all Xaa locations
  Clone ID: PAT_MRT4530_13663C.1.pep
DAWIQVPWEGFSDASDADLIAEHEIWPXLSHFAXNEAFNCSHGDLYKWKLLWPMLADPFGVEWSGYEGEESSFKLADAMSGKEAVWAEIVXENDLMDTELEEITHWWFVDAVFGVRSEHLDSMNKSKEHGFLGFRNTVNSFNTWIEKMKVFKIVP

SEQ ID NO: 109514 - protein, 502 aa, Oryza sativa
  unsure (1)..(502): unsure at all Xaa locations
  Clone ID: PAT_MRT4530_13664C.1.pep
WAPRRRRSRRRPSGGRGEEEEAGRGPRGRGRGATPPTTXDSGESAAAVVPCSICLDAVVAGGGDRSTARLQCGHEFHLAPFGSLLQCNIIFCLLISRVMDDTICITVCMNFIISIFKSILGAFSLDCIGSAFNAKGVMQCPNCRQIERGNWLYANGSRPSQDVSNDDWGHDEDFYDANQPETSRSVFLPFRFQWCPIGRLAQLPSVFDEGESAPPVTFHDFMGQNFTSEHLPVSAPGATPPGPYIAYFQPLQSSASSSSSHVTERTMDGTTYHDHWNPLPGPSDGRPLATVHPIDFHHNHWTHLPNSYSQPNSNNGVAEQMAIPVVPMRVGGLDSDSQQRGSLPSVYGNGSGSRSRIPSVPPMAPQFMRPHGNINEQYQQNSSSLYAAPQRRTAVQAVQDSMNFTLFPQAPTGPNSMETEDAGGNQFYAWERDRFAPYPLMPVDSEANWWGSTPQSHGVTDHSAAPGRRLFGQWIGAGRSPPPPPPPPADNSSYRQMHIPRM

SEQ ID NO: 109515 - protein, 62 aa, Oryza sativa
  Clone ID: PAT_MRT4530_13665C.1.pep
RSGFPGRPTRPEIFWLALLPLLFAIATSVCNSITMILFRFKNFSLNFQLFYHIKCLGTCIEH

SEQ ID NO: 109516 - protein, 435 aa, Oryza sativa
  Clone ID: PAT_MRT4530_13666C.1.pep
MAAARMKLLRNRREAQVHQMRRDIAALLRDRQEDTARIRVEHVIREQNIMAANEIIDLFCELIVTRLPIIAKQKECPADLKEGICSLIFAAPRCSELPELGRIRDLFEKKYGKDFVSAAVDLRPDACVNNLLIEKLSVKKPSGQTKLKILKEIAKEHQIDWDMTETEQELLKPSEELIQGPNTFVEATNFPVKTTMSAAHAVQINPSNYSSGYADEYDDERTMQFKDAASAARAAAESANRAASAAKAAADLVNKKTHSSDEVEDRRTSFHESSHSSKRQSMSNSSRSSRKEDIVAFDESNPQGRRTSRTGSSIESNHVEDKEDTEQVELSARRMRKRNIRSTRKVHSEIKFDDSEGLNSETEDESDTEIQSIERPAPRSEPYPGSRHSEDEEKENHELPDLPKANLSSRVHPNMPLDYETLTARFEALKSGKLP

SEQ ID NO: 109517 - protein, 145 aa, Oryza sativa
  unsure (1)..(145): unsure at all Xaa locations
  Clone ID: PAT_MRT4530_13667C.1.pep
KSLAPPRCYYFVXLVALKRCWTMDILCIRGLPHPSQCVLCAQHDASIDRILDTCPKSRQLWWLILRTIDHPKCSPMNKGSLHGWLCDNRKKXAKSKHQGFDTIAAPTSWSIWKERNNHVFNQXTEKLEEVGKAMAKETVIWQLQR

SEQ ID NO: 109518 - protein, 151 aa, Oryza sativa
  Clone ID: PAT_MRT4530_13668C.1.pep
MTMVFRWYGDRRYQGICEIEVGSSRRHLIEHIASAKRRTVDLRRASSGAAVHSHAPAGFVACHCTSASRELRRAPASFVAQLHVHEPGAPPHFSGLAPSSSIPRVTTRLRARSSTACHQALARASPHVREQRAAAPVHVLSSFGPRAATRL

SEQ ID NO: 109519 - protein, 49 aa, Oryza sativa
  Clone ID: PAT_MRT4530_13669C.1.pep
LAVINVSRDVPPGKKFGLVFPLFLKNYMAPLFLIFVWARAPNMKINWLL

SEQ ID NO: 109520 - protein, 255 aa, Oryza sativa
  Clone ID: PAT_MRT4530_1366C.1.pep
FPVANATAAALARVSAMFNAPLARAVVFGIHIDGHLVVEGLLIAAILFQLSRKSYKPPKKPLTEREADELCDEWQPEPLCPPIKEGARIEAPTLESAAGPHTIVDGKEVVNFASANYLGLIGNEKIIDSCVGSVEKYGVGSCGPRSFYGTIDVHLDCESKIANFLGTQDSILYSYGISTIFSVIPAFCKKGDIIVADEGVHWAVQNGLQLSRSTVVYFKHNDMASLASILEKLTHGNKHTEKIRRYIVVEAIYQN

SEQ ID NO: 109521 - protein, 85 aa, Oryza sativa
  unsure (1)..(85): unsure at all Xaa locations
  Clone ID: PAT_MRT4530_13670C.1.pep
SVWLVLLALPLPRTGAXSPCGACKFLRRRCVPECVFAPYFSSEQGAARFAAIHKVFGAXNASKLLSHLPVADRCXAVXTITYEGP

SEQ ID NO: 109522 - protein, 58 aa, Oryza sativa
  Clone ID: PAT_MRT4530_13671C.1.pep
TRDNKFGKWSPNWEGQFHIHKVVSKGAYMLQGLDGEFYGRALNGKYFKKYYSSVWVNA

SEQ ID NO: 109523 - protein, 145 aa, Oryza sativa
  Clone ID: PAT_MRT4530_13672C.1.pep
MAEEDINKMMSSDGEISSMAERAASLLRELRQLIEDGCAAAKPLAEMVEYCAKHAAGDEAEGKEEEVLDDGESSDDEEETDMLRLEASSMDVENMLSVAAQRTAELIKDKDKPPEPEPSPEPSPENDPFHGFHSLHSFTEHCYTD

SEQ ID NO: 109524 - protein, 126 aa, Oryza sativa
  Clone ID: PAT_MRT4530_13673C.1.pep
IGPEPHLDNLETPNLESEERINEYELSENIDNYYISNSNIECIGLQAFTPNWYRDIKSKKDIEKIVQRLEDIQIIGEIPMKYWEKNAIECKINIINTEYIIKTSPIEANPKHIEEFKMHIEELLPL

SEQ ID NO: 109525 - protein, 624 aa, Oryza sativa
  Clone ID: PAT_MRT4530_13674C.1.pep
MEVSIGKPDDGQSLLANVEASDDHAAFDAMATSSRRPPSLRPLRHPNVTSLAPLPPLHRCVPRQTEVIFPPLDSPDSSELKKVMSISLPATPTGFAAPVAGASDSSGIDLRRQAMASNMTQRLQQRSPTSQSNNGRRLTDETTAFQSPPPTPGGGRSSMSRDKRYDSFKTWSGRLERQISHLAGIGPDIPSPAGQVVDAAMDSHHHSHTVSTPEVGRFFAALEGPELDQLRSEEELVLPVDRTWPFLLRFPVSAFGICLGMGSQAILWKRIAESPPTTRYLHVAADVNLVLWWLSVALTCAVSAVYACKVVFFFEAVRREYLHPVRVNFFFAPLIACLFLAIGVPRSVAPSTAALPAWLWYALMAPMLCLELKIYGQWMSSGQRRLSMVANPSNHLSVVGNFVGALLGASMGIREGAVFFFAVGVAHYVVLFVTLYQRLPTNEALPRELHPVFFLFVATPSVASVAWAAIAGEFALGARLAYFVAMFLYASLAARAVSLFGGVRFSLAWWAYTFPMTSAAAATIRYAAEVEDTRLARALCVALAAAATLTVGCLFATTVVHAVVLRSLFPNDVAIAITDHRKVKPKPKPKTTMEVHYKMDGNGDIEGGAPAMTPSPCMPMATAA

SEQ ID NO: 109526 - protein, 1000 aa, Oryza sativa
  unsure (1)..(1000): unsure at all Xaa locations
  Clone ID: PAT_MRT4530_13675C.1.pep
MEGVLVSAATGVMNSVLAKLTAFLGEEYKHAKGVRDDLVFLRSELSTMNIVLQKLADVDQLDELSRDWRDRVRDLAYDIEDCIDLSVHRLRGSAGESGLAAKVARMAKKIGAFRQIASQIQKLKARVVEVSERRNRYTLHGLVPTSSDASSSTKVDVRLCALWTETKHLVGIDGPRDDIISXVDGAHGVRMVSIVGCAGLGKTTLAKQVYDKIKGEFECKAFVSVSQKPNIKELILNISNQVGNKSTNMSDDVANLVDNLREYLKQKSIIILTTRVKEVAMSSSSSHGGFVYPMKHLDGAHSKRLFYKRIFDCEEQCPPEFEQASKEILERCDGIPLAIISISSFLADRQSLYHWNEVKKIISSPIPGNKDLETMQSVLALSYYNLPHDLRSCLLYLSAFPEDCEIGKTRLVSRWIAEGFINARPGENLYEAGLRYFNVLINQSLIQPWNEHYGEVLSCRVHDVILNFIVSKSVEENFMTLLDPSGPVPLQHSNCCKVRRMSLQGSYCQEKFASSMKSIKPHVRSLACSMDCTGLHPLSEFKVARVLDLEGCESLTNNHLANIEKLAYLRYLSISGTGVSVLPANIGRLQHLETLDILDTQVKELPPSIVLLQQLVRLSVNSDVMFPAEGVSKMQALEQLTGLLPFNQPVSFLKELGELTKLRVLAVSWIPDHVRDSDEAHAEHEKSYEKIFISSLNALDRHSLQYLDLSLYYSYSDIAAKRFLFDSWFPSLKNLRRLSIVNGFKTTTIPSWIRLAAKLEKLELSKAYVTQDDLEMLGDLKALEYLALPFSDTQGSWLTISNHGFRCLKFAFLCNVLFMHDSMPNLKDLHIGIRLNVVGENDSFXAPPQHPLQFLTVKRNVLLNLSXASEEILKRCDGIPLAIISISSFLADHESEFASRMMPIKLHVRSLICSVDYTGFHPLSEFKVARVLDLDGCQSLTNNHLANIEKLVNVDIIGNPPSTPRDVASELEEKILNVAKTHPNRPTLTTRTLDRDILVD

SEQ ID NO: 109527 - protein, 173 aa, Oryza sativa
  Clone ID: PAT_MRT4530_13676C.1.pep
ENIVISGCSFPSRPPPPHPGRGRRTTPPSRPRPARAHPHRGASAFVPTCDGHLHPHASPSLSSSVAILARAPPPLLAGVATVGRNLLSIECCSGSSSQAASRSSPPSTAVGSMSYPPSVAIKCNPSSPPSIRRSTPSRRRLHSVSLPSSTPSARSVAASPRQAQCSIAQSVST

SEQ ID NO: 109528 - protein, 74 aa, Oryza sativa
  Clone ID: PAT_MRT4530_13677C.1.pep
AIAACVRPQNLSTLPFSIPTHIPPISSISPYYTIIQATLVWSLFFFFYKFWVFPHHHHKRGVAQPSKGRGVQEL

SEQ ID NO: 109529 - protein, 171 aa, Oryza sativa
  Clone ID: PAT_MRT4530_13678C.1.pep
RHSHHYAATHLHHSNLLPNPAAPKPDLTLTRPERERGAVKVWRRRGKEGGGDCLLPRFQGSERSDPPARNQTPDRQLVNISGTTASGVEKMVAAAHIPFVRAAKSASEEIGVAGFSGPGLLASKCNGLTGERGGRRGLEEGEAATCLRGERRAPVVGGGEAATCLRRGGRG

SEQ ID NO: 109530 - protein, 69 aa, Oryza sativa
  Clone ID: PAT_MRT4530_13679C.1.pep
GAGPTSPWTHHRNRSFPGGLSGGVETHIGGVDRSTASVLNGAVGCPASAVGCPMTSERPVPVLAGPAHQ

SEQ ID NO: 109531 - protein, 467 aa, Oryza sativa
  Clone ID: PAT_MRT4530_1367C.1.pep
MEMVLPVANATAAALARVSAMFNAPLARAVVFGIHIDGHLVVEGLLIAAILFQLSRKSYKPPKKPLTEREVDELCDEWQPEPLCPPIKEGARIEAPTLESAAGPHTIVDGKEVVNFASANYLGLIGNEKILGRNLAILLFSDVHLDCETKIAKFLGTQDSILYSYGISTIFSVIPAFCKKGDIIVADEGVHWAVQNGLQLSRSTVVYFKHNDMASLASTLEKLTHGNKRTEKIRRYIVVEAIYQNSGQIAPLDEIVRLKEKYRFRVILEESHSFGVLGKSGRGLAEHYGVPIEKIDIITAGMGNALATDGGFCTGSIRVVDHQRLSSSGYVFSASLPPYLASAAISAVDHLEENPSVLANLRSNITLLHKELSDVQGLEIASNILSPIVFLKLKTSTGSAVADLELLEVISEKVLKEDSVFIAATKRSSLDKCRLPVGIRLFVSAGHTESDILKVSESLKRVAASVL

SEQ ID NO: 109532 - protein, 154 aa, Oryza sativa
  unsure (1)..(154): unsure at all Xaa locations
  Clone ID: PAT_MRT4530_13680C.1.pep
PXKXGAXGXGXSFQXXAXLFXMGINPIXMRAPQXEKXXXRKNRXKXXGRGYPXXXXXXXXRXXXLXPLLXXSXXFVSXXXXGPAXXXXXXXXXXPXXSLAXLLXLXSXXPXXGGXXXPXSPXXIXFXSLXSXXXXFXXXXFFFFFFFXXXPXXP

SEQ ID NO: 109533 - protein, 136 aa, Oryza sativa
  unsure (1)..(136): unsure at all Xaa locations
  Clone ID: PAT_MRT4530_13681C.1.pep
GRRREKRERCATASAAGEEGAAQALRRNPPPPPSSCALVAEDGESGGRGTHGGGRQGRRSWSPXCATAAARSVPSSRGTRRRRRAARRVPALAPRGSSXRVPAHRDAGRSWQRPRAGAGAGRRAHGVPAGAALGEL

SEQ ID NO: 109534 - protein, 386 aa, Oryza sativa
  unsure (1)..(386): unsure at all Xaa locations
  Clone ID: PAT_MRT4530_13682C.1.pep
LKIVRPTWAHISFPFLLALPERRRRELRGRAAPLQHQHAAAARTGQHHGEQAPAVEEPRGARAGTRRAARRLRRVPLEEGTDLAAAVAHKGSSFYVLAGLRRECHGHRSRRPPPRAPPPPPPRNPPPSPPPPPAPDFTSDPSTPPAPDAPSGDFFPPAPPTTTTPTSPGTTPSPTTVAADVSKTPSGSGSGHHGGGPTKATIVAAGAGAAAAVALLGFACAFLITGRARRRGDSQKLLGPDRAGAHRSAATSAADFLYVGTVEPTTPAXPPRAHHRRSRGVPDADHPSPELRPLPPLRRAATLGSSDEDGYYTPRQLSGGSGGGGAAEAWSSASASSPPTTTTASRRSLPSMTSDFFPPVAAIAAPPAPPPARSRRTPPRTRFSTG

SEQ ID NO: 109535 - protein, 151 aa, Oryza sativa
  unsure (1)..(151): unsure at all Xaa locations
  Clone ID: PAT_MRT4530_13683C.1.pep
MICTRVPDLLKGSDKQRFGRSHDTNRSSFLNAHALEPRNRSTTSPLVITRVETQMTSTRRLIPVCQSKDTNLFCSFPAARCEFXHGTKTIXKVDSISFRTSNNSSNLVCVEMERERPLYSLRMMVMAVGIVENAPQSLLGVLLRSPSPSIH

SEQ ID NO: 109536 - protein, 131 aa, Oryza sativa
  Clone ID: PAT_MRT4530_13684C.1.pep
STSSGQAAACTHPSAHLVVAGEVAVADPSTRTEASPMPPHLPETATSPRCWTSSLCRLQASPRWSGLTMEEVVVNRPAGVRRGSPELPPTAMTSICSHAGGQASRMASKPADDDGGKYSCSTGGRTTSQCC

SEQ ID NO: 109537 - protein, 1425 aa, Oryza sativa
  Clone ID: PAT_MRT4530_13685C.1.pep
MGGAMRGVELTEGVKKLEFEMRNVEGVLATAEGRRIDKKPLIQSLDDLRELLYDAEDVMDELDYYRLLQQIGKGEGCSAAAANYPAANYASSSTPFSPYQLLHSARSQITVWALYFRKRKQGERDLTHCTMLPFEIRLDISMRINGIVKDYPQSGNFVRGILRPNVSHPALTSNQRQNKIRNTRLTTSVPIELKVYGRDADRDRIIEILLNEESSDLRVLPIVGIGGIGKTTLTRFIYSDRRIIDHFDLRIWICVSTYFNEVDITREILEHIFEDKQDKQEFKDVSNFNVLQEILLKNIRDKRFLLVLDDMWKEKDMSGWDKLLAPLKHSQVTGCMVLATTRKNSVAEMIGTVNAFQISGLDEKEFWQFFKACAFGKENYEGDPSLQSIGRQIAKALKGCPLAARSVGALLNRNVSYEHWRTIRDKWKSLQIKDDDFIPILKLSYDYLPSHLQRCFSYCSLFPEDHPFSAATLVQVDRHYVMHDLMHDLAQQVSAKECYTVRGLQSSTIRQGIRHLSIITTGDDNDKNTNFPTEKYEILQKIRPLQKLRSLMLFGSSSVYLLKSIQTVCKEAKCLRLLRVCVLNADISAIHTFLNPHHLRYLEFIRVSETKDMLVYGDYKDAAFPRALTSFYHLQVLDVGFSGNISVPAAMNNLVKLRHLIADAKVHFSIGGVGNMISLQKLKFKVQNISGFDIRQLQSMNKLVTLVISHLENVKTKDEANGARLIDKEYLKKLFLSWSVGSMSLEPERTKDVLEGLQPHHNLKALCIAGYTGPTSPTWLSSNLSVTSLQTIHLVNCREWRILGSLEMLPVLRELKLVKMWNLVELSIPSLEKLILIELPKLEKCFGTYGTELTSRLRVLKIKDCPQLNEFTPFQSFSSFRTEQKSWFPSLNKLTIGCCPHISKWEILPLREMQSLKELELVHLHAVKELLVLPLEKLVLIKMASLEYCSGLTSPSLQISTSLGDRNESLSGLHDLTIHDCPRLVVSHPLPFSAQMRRFSISGIPTLPTMELTYDLKIKSEELVMLDDKIISFHNFARIRSFCLVDCPNLVSLSTEGERVLLGYTSLERLRIQRCPKLMPLLVMSDKVDVALLPPSLENLEIDMSPELSAAWDLKLQEHGQIIPLQPHPSLEELDISNLTDKDQSRLLQLFPTITALYIWQSPELTSLQLGYSKALRELKIIDCGSLASIEGFGSLTNLRSLAVSNSPGVPAFLELLSHQQLASAEILSRLETLQVGDGSVLTVPLCRRLASLRRLSFWSWDSRRGETMIDLTEEQERALQLLASLHRLDFWHLPNLRSLPAGLRRLASLEWLDVEDCPGVARLPEMGLPPSLTRLHSADCIQINKILHIVVVCAALASFSTDILLEPMYTVIWPYNKDHYIYAVNLGELISKLLALVIVMVFETIVRVDGYVGRHVQTKASVID

SEQ ID NO: 109538 - protein, 115 aa, Oryza sativa
  Clone ID: PAT_MRT4530_13686C.1.pep
KLRLLSFFHLQHAHIRLHILLSPVKSRWPIHLHAQKPHRCRRIYRETATSPRCWTSSLCRLQASPRWSGLTMEEVVVKPPCRSAPRIAGATADCHDFHLFSCRRSSITHGIETSG

SEQ ID NO: 109539 - protein, 52 aa, Oryza sativa
  Clone ID: PAT_MRT4530_13687C.1.pep
YNHLGSFKTPLGPATLKLSGLGEHGPPHLAGGKYWLNPYHLYQIYGNERGFF

SEQ ID NO: 109540 - protein, 60 aa, Oryza sativa
  Clone ID: PAT_MRT4530_13688C.1.pep
KKFLWALVGLHGSFKGPIGSLFNPLMNPVKIYEVGLGCQICGCCSVLGYFPFLVLTSVEI

SEQ ID NO: 109541 - protein, 74 aa, Oryza sativa
  unsure (1)..(74): unsure at all Xaa locations
  Clone ID: PAT_MRT4530_13689C.1.pep
DDRANSLTVQPLDQCYRRLCQQLQLQQFAGVYFDQAQAQAXARLGPKLPSNXCGIYPSYNICSLXALPTVGGIW

SEQ ID NO: 109542 - protein, 340 aa, Oryza sativa
  Clone ID: PAT_MRT4530_1368C.1.pep
MGGAAVSSLLATPTPTSRPRPVSTTTAPFSVNLSTAAARAPRLLLLSRRPRPRPAAAVLGVSDDTGVKMAGSDIVGKNDLLIVGPGVLGRLVAEKWQEEHPGCKVFGQTASTDHHNELSNIGIIPSLKGSTFPQKVPYVIFCAPPSRSDDYPGDVRVAASNWTGEGSFVFTSSTALYDCSDNELCNEDCPSVPIGRSPRTDVLLKAENVVLEAGGCVLRLAGLYKIDRGAHFFWLRKGTLDTRPDHIINQIHYEDAAARATPIMKKGHRGRIFLGCDNKPLSRQEIMDSVNRSGKFDTKFQGFTGTDGPLGKKMENSRTRSEIGWEPKYPSFTEFLGLDS

SEQ ID NO: 109543 - protein, 35 aa, Oryza sativa
  Clone ID: PAT_MRT4530_13690C.1.pep
LLLFGGHGTGGWLSRYDVYYNECIILDRGKHQQIL

SEQ ID NO: 109544 - protein, 57 aa, Oryza sativa
  Clone ID: PAT_MRT4530_13691C.1.pep
NEIKQFVAKEVVFYKRLNKVFFADSIPKSPSGKILRKDLRAKLAAGIPTNDNTQLKS

SEQ ID NO: 109545 - protein, 48 aa, Oryza sativa
  Clone ID: PAT_MRT4530_13692C.1.pep
ECNCMDAAPVGQSIVLGLYFVCFSTLLSSRRAVPCIIRIKYEPFLPSS

SEQ ID NO: 109546 - protein, 47 aa, Oryza sativa
  Clone ID: PAT_MRT4530_13693C.1.pep
LWRIISVLPKPKGLRVIKGVYPSSTQVAPFPLVIPHYFWPNLKVRSV

SEQ ID NO: 109547 - protein, 84 aa, Oryza sativa
  unsure (1)..(84): unsure at all Xaa locations
  Clone ID: PAT_MRT4530_13694C.1.pep
LSXFSRTQQLPLGSQLINDFSIKYKPTPLANARISTSPIQTLSLHQSPKKGHKPSKWASSIGTTVPLSCQPSHHLDRHTSSHSL

SEQ ID NO: 109548 - protein, 123 aa, Oryza sativa
  Clone ID: PAT_MRT4530_13695C.1.pep
WHRSHLPVALRLAAGRFVLAAVCSCHPRRPAVGKGRSGGHPPDGRQGQADAVDGEEAAPPRRGRRGGVAALEVEVEKPSAPTAGRPLAPHYPLQLPPPLPSPRRRRSERRGRRGQRRGARRRH

SEQ ID NO: 109549 - protein, 184 aa, Oryza sativa
  Clone ID: PAT_MRT4530_13696C.1.pep
MYRSSRPTSPFKNPTARRILFSDAVRKDGIFLKITETSSCENPSSTSSRVFVATASLLRKATATSPRWNTLEPRTMPSSSTRATASRSFMGFEVRLHHLVEVGAEEGGVLPEGPEDAVQRAEHREPKARLVARELLRKGILARGTRRAIWERGMPRSPSSATRLARFPSTPAHSSLGSAATAVA

SEQ ID NO: 109550 - protein, 174 aa, Oryza sativa
  Clone ID: PAT_MRT4530_13697C.1.pep
RPHRFAPPPHPASPHPVAAISLGRLLSPPRPFPPNPSPPRTTSSPPAASPEPKQPGLRRGSPTSGPPPSPTPSSPSSPASASRAPTSPPPSPPTRGCCAPAWRETSPSASPSSATWASRAPRSRASSPSPRSPSAAAPSPPTSPSGSRCSARWTASSGPSGRTPPSSAPTSTRW

SEQ ID NO: 109551 - protein, 109 aa, Oryza sativa
  Clone ID: PAT_MRT4530_13698C.1.pep
SPPPRPKKPAEDRCSMEYIEVLKLRGLPYSATTEDIIKFFVEYELTEENVHIAYRPDGKATGEAFVEFPTAEVAKTAMCKDKMTIGTRYVELFPSTPEEASRAKSRARQ

SEQ ID NO: 109552 - protein, 294 aa, Oryza sativa
  Clone ID: PAT_MRT4530_13699C.1.pep
MYGHRGAMMGGGGVSDGYEGSKRPRMIESNPYFAVTAGSPLDVSKRARMMEPAPPYFGAMGSSAAGGTSAFYQPYGTNLPGAGANSAIQNFPGVRLRGLPFDCDDLDICKFFVGLDIVDCLLVHKNGRFTGEAFVVFPSAMQAEFALHRNRQNMGRRYVEVFRCKKQEYYSAIAAEVNQGGFFDSEYRHSPPPPRPKKPAEDKSSMEYTEVLKLRGLPYSATTEDIIKFFVEYELTDENVHIVYRPDGKATGEAYVEFPTAEVVKTAMCKDKMTIGTSMDHVATVPQPVGVVTL

SEQ ID NO: 109553 - protein, 509 aa, Oryza sativa
  Clone ID: PAT_MRT4530_1369C.1.pep
MMEMVLPVANATAAALARVSAVFNAPLARAVVFGIHIDGHLVVEGLLIAAILFQLSRKSYKPPKKPLTEREVDELCDDWQPEPLCPPIKEGARIDTPTLESAAGPHTTVDGKEVVNFASANYLGLIGNEKIIDSCVGSVEKYGVGSCGPRSFYGTIGSYLLWLFSIIYILWPQKKNLAILWFADVHLDCESKIANFLGTQDSILYSYGISTIFSVIPAFCKKGDIIVADEGVHWAVQNGLQLSRSTVVYFKHNDMASLASILEKLTHGNKHTEKIRRYIVVEAIYQNSGQIAPLDEIVRLKEKYRFRVILEESHSFGVLGKSGRGLAEHYGVPVEKIDIITAGMGNALATDGGFCTGSVRVVDHQRLSSSGYVFSASLPPYLASAAMSAVNHLEENPSVLANLRSNIALLHKELSDIPGLEIASNILSPIVFLKLKTPTGSAVADLELLEIIAEKVLMEDSVFIAATKRSSLDKCRLPVGIRLFVSAGHTESDIFKVSASLKRVAASVV

SEQ ID NO: 109554 - protein, 525 aa, Oryza sativa
  Clone ID: PAT_MRT4530_136C.1.pep
MAQVSSAIPQAAFSVGTTSFAAGPFAPVQPAVPAEMAHASTLPVSAAMPCIPVSLAASNAPVMAGTAEGAFGPVDLKGKAKVEDALLRVIRYKNVHQSFIVISVKVRIIWSKVDVAIGDDLYELVFKVEPENGPDEPEPMQMENEGGNDNCKKDYGSNLHDNVKETGMSNPVKTSSIGMSGLSNEKGDMVKDIWSSVDEGNTPLERWQAKIRRLRQHLRGWAKHTSDVYEKEKKDLLHKLDVIDKKAETDLLTQEEIDILYYLRNRLACLLREEEIKWQRNARNFTPLFFVVSLGIFMKLSNKDWKIIEERIEKKLTSWKGKHLSVGGSLAMVMISFFEIPKGVLQKIDYYRSRFFWRGDEHKEKYRLTRWDIICQPKDKGGLGVHNLEIQNQCLLSKWLFKLINEQGVWQDLLKRKYLSNHFLSQVTRKQGDSHFWLGLMKVKTTFLNMGTRIVNNSEQVRFWEDKWVRNYTFKDRFPSLYAIVLFRATYWLQSWAQLLKCDEDIKLVKTACHNLVSTVMQFFR

SEQ ID NO: 109555 - protein, 108 aa, Oryza sativa
  unsure (1)..(108): unsure at all Xaa locations
  Clone ID: PAT_MRT4530_13700C.1.pep
YWVANNAAPASTPSRPPSPSSSRSSPPTACSTTPAASSSTPCPPSPLPPRRPPSPPLSPPTARPTSRKNPXALPMPPPPPPLPTAATAAPPTSSRSPGLHQFHRHLQP

SEQ ID NO: 109556 - protein, 77 aa, Oryza sativa
  unsure (1)..(77): unsure at all Xaa locations
  Clone ID: PAT_MRT4530_13701C.1.pep
FLLLPPAYCXXXSLYLISCSASSSSSLPQPRSPPTHRARRXXXGXWLRRXPVPKSRAIASAVWPXCDIARPRAXCHR

SEQ ID NO: 109557 - protein, 68 aa, Oryza sativa
  Clone ID: PAT_MRT4530_13702C.1.pep
FYTPIAHTSQQKIVNSTPASTKPQNSLFFDTDPICSIYYHRSHHVQEQSMLNNAFQSLDLLSCCQRIL

SEQ ID NO: 109558 - protein, 101 aa, Oryza sativa
  Clone ID: PAT_MRT4530_13703C.1.pep
YILGVETYLLPRACLNNCYKMRSMRRHRHKITIYTQLSFSKADPSSQFANNKANGIYRVETCESYMPFVQKTMRKQKQQQYSCQGLPAILLAPRMSKPTRP

SEQ ID NO: 109559 - protein, 60 aa, Oryza sativa
  Clone ID: PAT_MRT4530_13704C.1.pep
FHTKIYFKNLNKMGPSIAGISYTVHNFQVGNFYSGKLPMACSHCFNPKIGDQAPAKRNIV

SEQ ID NO: 109560 - protein, 487 aa, Oryza sativa
  Clone ID: PAT_MRT4530_13705C.1.pep
MTIQRYIYQSMEPLHFPLLSPNPDTRRRVRKAVSSKERCRSESGDMAAALLPETAPRLLTPETIRAAAKQSQGIQLVPLSLRRAIKRYLRDQDKAHMNRKVLQLSASFERAKGTGTELAAAAMRGALIDDPRAPSGAEQRAARWKVRSAYGDIGLRYREDETVAYVASRMPAIYAACHRVLREVRRRLPDFAPAKVLDFGAGPSSALWAMRAVWPKSIEKVNLVEPSKEMQRAGKNLLDNLKGLPLIHSYDSIQELNRNIEKHERRHDLVISSYALGEIPSLNDRITIVRQLWDLTGDVLVLLEPGTPQGAKIISQMRSYILWMEKRKCRKIEKSTRAAPSEMKSIVCQEASLKNGAFVVAPRSNGVPLRGFEDEKFCYVALRRGKRPEEAWPLDGMKFETLKERHAKRNPEDLIIDYDEQFPSEEDEEAPVNAEDCLVPYDSDAQELGLFHETEEEFEEQSVRADLGGGWGRIIYSPIRRGRQVYT

SEQ ID NO: 109561 - protein, 88 aa, Oryza sativa
  Clone ID: PAT_MRT4530_13706C.1.pep
MAGGGRDCDDDDVREWRKMASLRWQRCVQVEEDGEERRTSQVRTQNALKLWMTNEVGRSLFAKAGELGAPVGIMMMKNTVGATNAILQ

SEQ ID NO: 109562 - protein, 333 aa, Oryza sativa
  Clone ID: PAT_MRT4530_13707C.1.pep
PASAGKNLLDNLKGLPLIHSYDSIQELNRNIEKHERRHDLVISSYALGEIPSLNDRITIVRQLWDLTGDVLVLLEPGTPQGAKIISQMRSYILWMEKRKCRKIEKSTRAAPSEMKSIVCQEASLKNGAFVVAPCPHDGRCPLENTDKYCHFVQRLERTSSQRAYKRSNGVPLRGFEDEKFCYVALRRGKRPEEAWPLDGMKFETLKERHAKRNPEDLIIDYDEQFPSEEDEEAPVNAEDCLVPYDSDAQELGLFHETEEEFEEQSVRADLGGGWGRIIYSPIRRGRQVQLDVCRATKRDASEGAFERVVITQSKNPTMHHQARRSLWGDLWPV

SEQ ID NO: 109563 - protein, 114 aa, Oryza sativa
  Clone ID: PAT_MRT4530_13708C.1.pep
MVYDGVSVLEATFFTGGDRGSMQGRPMEVLEMMLEMVAEDQRFRPLVPRRRPSSTRPAVANRRHPSSSPPFLVLVNATIVVARSSRRPVQVVAGILSFGRHRRRPAGRQIWCLL

SEQ ID NO: 109564 - protein, 54 aa, Oryza sativa
  Clone ID: PAT_MRT4530_13709C.1.pep
ALIKAEGAMSVMELELNLVGVGVWSSEKNSAGENEYRGGVSGPSVKIGYGRRST

SEQ ID NO: 109565 - protein, 158 aa, Oryza sativa
  unsure (1)..(158): unsure at all Xaa locations
  Clone ID: PAT_MRT4530_1370C.1.pep
GFCTGSIRVVDHQRLSSSGYVFSASLPPYLASAAISAVDHLEENPSVLANLRSNITLLHKEXLSDVQGLEIASNILSPMVFLKLKTSTGSSVADLELLEVISEKVLKEDSVFIAATKRSSLDKCRLPVGIRLFVSAGHTESDILKVSESLKRVAASVL

SEQ ID NO: 109566 - protein, 117 aa, Oryza sativa
  Clone ID: PAT_MRT4530_13710C.1.pep
MVMILEERRDASYERQSDRKNGGASSPASIASRQEQRQEAKGFGFEDRGRQAGLIQAVHLSTVGISCKFHRYGKGSSNSTSKCIIENQVYTRWETDYRNALATVAFCGSNFKALRST

SEQ ID NO: 109567 - protein, 212 aa, Oryza sativa
  Clone ID: PAT_MRT4530_13711C.1.pep
MSTLDATRAELGLVVLYLNKAEARDKICRAIQYGSKFISNGQPGTAQDVDRSTTLARKVFRLLKWVNDLHGLISPPAKGTPLTLVLLGKNKERTDRIVRISLYCWMASSVCAGLVELGELKRLSKSMRKLARELRDTDKYENDQYKSKMKQSDERLLALVKAAMDVVVAVGLLQLSPKKITPRVTGAFGFVTSLISCYQQLPSRAPAIKVKA

SEQ ID NO: 109568 - protein, 237 aa, Oryza sativa
  Clone ID: PAT_MRT4530_13712C.1.pep
MSTLDATRAELGLVVLYLNKAEARDKICRAIQYGSKFISNGQPGTAQDVDRSTTLARKVFRLLKWVNDLHGLISPPAKGTPLTLVLLGKSKNALLSTFLFLDQFVWLGRTGIYKNKERTDRIVRISLYCWMASSVCAGLVELGELKRLSKSMRKLARELRDTDKYENDQYKSKMKQSDERLLALVKAAMDVVVAVGLLQLSPKKITPRVTGAFGFVTSLISCYQQLPSRAPAIKVKA

SEQ ID NO: 109569 - protein, 229 aa, Oryza sativa
  Clone ID: PAT_MRT4530_13713C.1.pep
MANSPTLTMLVFLAIGLSLVLSAAGVSVESVVTEAFFNGIKNQAPNGCAGKSFYTRQSFLNAARSYSGFANDRTNDDSKREIAAFFAHVTHETGHMCYINEINGANMDYCDKSNKQWPCQPGKKYYGRGPLQISWNFNYGPAGKNIGFDGLRDPDKVAQDPTISFKTALWFWMNNVHQVMSQGFGATIRAINGALECNGKNPGAVNARVNYYKDYCRQFGVSPGGNLYC

SEQ ID NO: 109570 - protein, 107 aa, Oryza sativa
  Clone ID: PAT_MRT4530_13714C.1.pep
TDIYITKIPNNRQHQAPNYHRIDLKSEPHKSQQPQTHGTRRRRDGGPEVGWRRRAEAAAAVLALEAKGRGDVEAEAAPVLEAEGGGGAMQAKAEAWRRRDGCEAVRG

SEQ ID NO: 109571 - protein, 66 aa, Oryza sativa
  Clone ID: PAT_MRT4530_13715C.1.pep
SLPPSSGSVDAMTPSSSRPEQRTTTTTISRLRWWLARLWRNWLWMWWCDAEECICRRRQRFGRASC

SEQ ID NO: 109572 - protein, 183 aa, Oryza sativa
  unsure (1)..(183): unsure at all Xaa locations
  Clone ID: PAT_MRT4530_13716C.1.pep
SEGLLLLTSTGKLXHRLAHREFAHQRTYFAQVEGSPTDEDLEPLRRGITFADYPTRPAIAKIITEPDFPPRNPPIRYRASIPTSWLSITLTEGRNRQVRRMTAAVGFPTLRLVRVQIQVTGRSPQQGKGKSAATWCLTLEGLSPGQWRPLTPWEENFCQQLLTGNPNGPWQKKFGDPLQSDLQ

SEQ ID NO: 109573 - protein, 128 aa, Oryza sativa
  Clone ID: PAT_MRT4530_13717C.1.pep
NDVNVQRSGRGDGKFVEADLQSPCCSGVGEDEALDLPASAGVDVGLGPPPPQRLEVLIRGRPPALDEADACRPHALGRRRLAQARGLSPPPPRCARALAAAAPHARFRPHLTKPTHGSARVGGISIHS

SEQ ID NO: 109574 - protein, 53 aa, Oryza sativa
  Clone ID: PAT_MRT4530_13718C.1.pep
MACDVLDTGICPPPASANRVHSDSSSMIANGCDSVSAAMMAGRALRADGGGCP

SEQ ID NO: 109575 - protein, 222 aa, Oryza sativa
  unsure (1)..(222): unsure at all Xaa locations
  Clone ID: PAT_MRT4530_13719C.1.pep
MRREGVASYAVWELANRRLGKQRPAGGERASGERRPVHVGWMEACGVGRKAEAXDKWSHRPSSHSRLPFLTFGIWFCAVRCRSRSNLTDFGTPDGLQDSCITPFPPTPATSSFSPAPARTLRVRIAGWGGXGWEGEGEGRSSPALEGWLGEAAARRWAADRAGGEAPATPQGWRRVVGRRRWRGHLAANGSRRKGGGEGLAGAVDVLRPAGEAGGGGGSGRG

SEQ ID NO: 109576 - protein, 452 aa, Oryza sativa
  unsure (1)..(452): unsure at all Xaa locations
  Clone ID: PAT_MRT4530_1371C.1.pep
MADDPLSNSTTNNKRAEGIQLQHGDCESESTAPLLLAPHESYRLSAAILPFLFPALGGLLYGYDIGATSGATISLKSSTFSGTTWYNLSSLQTGLVVSGSRYGALIGSVLAMHAAHMHITETAPSXIRCMLIALNXFFIGRGLLLGYSAGSLFLELVYRWRYVCASSTPLCLITGIGMCRLPASHRWLLLCAVEGKRNIMESKENATRCLCRLRGQASPDLVSEQVDLILDELSYVDQERQAGFSEIFQGKCLKAMIIGCGLVFFQQVTGQPSVLYYAATILQSAGFSGASDATRVSVLLGLLKLIMTGVAVLVVDRLGRRPLLIGGVSGIAVSLFLLSSYYTLLKDAPYVAVIALLLYVGCYQLSFGPIGWLMISEVFPLRLRGRGLSIAVLVNFASNALVTFAFSPLEDLIGTGILFSAFGVIAVASLVFIFFIVPETKGLTLEEIEASL

SEQ ID NO: 109577 - protein, 79 aa, Oryza sativa
  Clone ID: PAT_MRT4530_13720C.1.pep
YYSVVLHPTKSTNVQQRVTFHHVLHPTNNRTRSHKRRKDHYRIISTKSTISCAAICPGTSQYCLFFLATCFRTQHIFLL

SEQ ID NO: 109578 - protein, 61 aa, Oryza sativa
  Clone ID: PAT_MRT4530_13721C.1.pep
MGWLAKATQKTRQPPGQTELSTVTPVGHAGQTGRWPSVRPVTALAPRSCETEATPFGYYLS

SEQ ID NO: 109579 - protein, 133 aa, Oryza sativa
  Clone ID: PAT_MRT4530_13722C.1.pep
MAVPLLTKKIVKKRVKQFKRPHSDRYLGLKTSWRRPKGIDSRVRRKFKGCTLMPNIGYGSDKKTRHYLPNKFKKFVVHNVSELELLMMHNRTYCAEIAHNVSTKKRKEIVERAAQLDIVVTNKLARLRSQEDE

SEQ ID NO: 109580 - protein, 64 aa, Oryza sativa
  Clone ID: PAT_MRT4530_13723C.1.pep
WPKAMVEVVLTGVRGDAGSGDGPRRRRGGRAGAAAAGGCTARERWRARESSTRWGKREGVAVEL

SEQ ID NO: 109581 - protein, 200 aa, Oryza sativa
  Clone ID: PAT_MRT4530_13724C.1.pep
MAVPLLTKKIVKKRVKQFKRPHSDRYLCLKFVSNSWVGLVGYGSVLDLLEVCGDLLSLDTHKCYFANYYSLRFTIISKFVCKVCYGLLCTSIAPVVLPSWRRPKGIDSRVRRKFKGCTLMPNIGYGSDKKTRHYLPNKFKKFVVHNVSELELLMMHNRTYCAEIAHNVSTKKRKEIVERAAQLDIVVTNKLARLRSQEDE

SEQ ID NO: 109582 - protein, 628 aa, Oryza sativa
  Clone ID: PAT_MRT4530_13725C.1.pep
MASASGSATLLYPKTPQSPRLLRRNPHYSGLRLVHPLLLATVSPPPPAALRRRRNSTTIHASSSSAAAGAAAASFPASSTPPPRPPRTDPPEEHPTVARAGRSKKHRKPSGGRIEGGGDVRREAKSRARIRSRRLGENAFYRRKRRAAKENQADAFTDAELEMIGLGYDRSVRFMDGPDDPRLRHRHDWYRFGRYGPYSWRGIVVGPPIRGRFSDDRVSLMSEVSDHDEWDRVEQFDMSNQFSNRLNELDAAVGFRYYWVFVRHPRWRPDELPWEQWTLSAEVAIQASEEQRLDKWNLMGRLGNPTRELITRCAAWTRPDIIYVKRPLYQSRFEPQKNFYSQLRPLVDPVTENQFLFDLEHDGQVIRTTYFGGLCRIVKASPKAYVDDVVNAYSKLSDVDKNRCLEFLLTNHPMELLHPYTKEWKVKLEEMELGCDAPDDNESDDEGGDESGTEVVDWVEDDGFDEGGDTDDDEEPGYDDDEVIDVREEVETEEVESDDESEKYWDEQWKQAMKSSDKMEKLVKTSIEASNEYNRRRMQQEKEMELRMARANTMVMKQEQTEDEDEQQEQIEDEDEQQESPRGRSAKDKRKSKAPGHFLRAAVRPFTYRNLVKEIVLMRHFIVDGEID

SEQ ID NO: 109583 - protein, 392 aa, Oryza sativa
  Clone ID: PAT_MRT4530_13726C.1.pep
MAEGSSGGGGRQQQQGVAERRLLRSRYLAVKNLISGRGLAVGVGFGLVLDEKDDMARAGSDTFAAIITQVDCLHELVQRPREQIADAETLLDIANTLVTSVRSQSSEGITPSDFVTAMLKKFGQSGGLDSEAASLRWGDVGLSVSHVFRAAPGCCTMLGPMNTEVKQRKAVVANRKRTARPTENARPEQLAESLEGVKTDTDRNVSVIFDILRRNKRARLENIVLNRRSFAQTVENVFALSFLVKDGRVAINIDDNGHHIVYPRNAPAASAIASGEVSYSHFVFRFDFKDWKFWASTNLQLALFFVIHFQLMQEVVPDGEELMPHRNPENIPCAEDHDQADPPELCAQRTPIRKLTRNRGLVMQQDQMVVAETPEEKQPTSKRRRLFRDQQS

SEQ ID NO: 109584 - protein, 343 aa, Oryza sativa
  Clone ID: PAT_MRT4530_13727C.1.pep
MADMMDEKYGKIGGTSIETPLNCKQLISLNYPGVVKNPSMMIETLGGESKLTKYVCEENHFRVRSIAANLQMTHLPMCKRLPDKRENRITLHMFAMEHPVGIMYYAASVYSMAFNDDHAPLSLNFQPGNPYCKPARGVACRSTSLLMKVKRRYRRRRESEDGGLKTGSQGERDGNSANGQYSAEVLGVIGQKYEFPYLCDFQYLPCEHQSSGGEAESLIGKILPSAGEDISYVDKDTPSFMLPEMFSKFDKPIPYNYKAGHQLPNSKQQHEMDFRAKLIQHGRHKRTNYAHVVSTMGDFEIPKKPHPIAVEQLEAQKPGATTDEITKGLLKKRALRAFSQRLF

SEQ ID NO: 109585 - protein, 75 aa, Oryza sativa
  Clone ID: PAT_MRT4530_13728C.1.pep
MRAPHDSGTRGGGGTWQVGPTRQWLVGGGGTGRARLGFKPAAWPWRAAAARAVTTGTGGAGDGGGQHEGGSADRH

SEQ ID NO: 109586 - protein, 275 aa, Oryza sativa
  Clone ID: PAT_MRT4530_13729C.1.pep
MLRDENMATKNVTQQKDYNAKLSDFGLARTGPSGDQTHVSTRVMGTYGYAAPEYVMTGHLTARSDVYGFGVVLLEMIIGRRAVDKSRPSREHNLVEWARPLLVHNRKLFRIIDPRMEGQYSTKAAIEVAGLAYRCLSQNPKGRPTMSQVVETFEAVQNMPECQDILLQNCMTGAVTLYEVAKDPTESVEPEKIKQEQPAAKTVTVAPAPVNGKPVPQSRRTRPGNGRSKSEPSLECKLYIPSPDSDGQQPGLEALSSPSRDGSIKDPPDEDLYKI

SEQ ID NO: 109587 - protein, 169 aa, Oryza sativa
  Clone ID: PAT_MRT4530_1372C.1.pep
YLESFQFSLQYINTCSPFLIPTLPPRATALPFFGMMMMVRLPAMFVICILAVPLLPALGSEPPSTPVPTVGVTAASHLVGSGGHSYLDVRFLDTVTVTIPSSTTLHLRPGSLELRPLPPLPRVGPPSGEFASRIFASDPSTTPPVAVEASSSSLSPSSPSASSPTLGSG

SEQ ID NO: 109588 - protein, 67 aa, Oryza sativa
  Clone ID: PAT_MRT4530_13730C.1.pep
HRSRPFSQGEMELTTAHRGGQEGKQKQAQTFLSMLDNLSSPHRPKKKKWHPWTSLQDGRPMGKQGRE

SEQ ID NO: 109589 - protein, 81 aa, Oryza sativa
  Clone ID: PAT_MRT4530_13731C.1.pep
TLVSVKRGCTSPPSPPPKLHIHIRIHSQPGRGGTARWAPHGSDAPLGLRFRQVLPIATAPPPPPPPPPPPPPPPPPPHGYM

SEQ ID NO: 109590 - protein, 526 aa, Oryza sativa
  Clone ID: PAT_MRT4530_13732C.1.pep
MDGASGLQLSPLLFPVWRLSPNMKMRGDILINGLREKLSFGTSAYVTQENVLMATLTVTEAVHYSAQLQLPDSMPAEDKRARADRAIRQMGLGAVAGVRIGGRVCKGISGGQRKRVSICVELLASPALLFLDEPTSGLDSAASYHVMSRIAGLARRDGMTVVAAVHQPSTEMFELFHGLCLLATGRTVYFGAASDAIEFFESNGFPCPLRRNPSDHFLRMINKDFEGASPIPQRQATFLTKTYVLTKRSIVNMHRDAGYYWLRFVIYIAICLSIGTIFFNVGSNFASIQARASMLMFTSTLLTMMAIGGFPSFVEDMKIFRKERMSGHYGATEFVISNTLSSIPYLGLISIIPGAIAYYLTGLQRGIDHFIYFAAVLWACTMLVEGLMMIVAAVVPDFLLGIITGSGVQGVLMLNAGFFRLPSDLPKPVWKYPTYFISYHKYATQGLYKNELLGLVFEDIGGGGLTISGEYILKNYLQVELSYSKWVDLAILVAMIIIYRLLFLVIIKISEIVKPRMLHFLCASKV

SEQ ID NO: 109591 - protein, 119 aa, Oryza sativa
  Clone ID: PAT_MRT4530_13733C.1.pep
VAAAAVASFHRLPQQREAVADARPREALTTARIDSRGRCRRRAANELAAQDAVAGLMALSNGPIQGAGVDKDSNSGDVVCRVKRTEYSPPIEGEYDDTGDPRKVDVVSSSVQTISSSVH

SEQ ID NO: 109592 - protein, 125 aa, Oryza sativa
  Clone ID: PAT_MRT4530_13734C.1.pep
GTAPQERARRARRPRPAAAAGARAHRRRRGDGDHRAGRQRQRRRRRRGRHRSIDPASDPGAPFRGTTKLFCALRAAAGRNAARASAFSGLSPSSLSLFLLRRRPPLSPLFLAPIFSLAAAGLLVE

SEQ ID NO: 109593 - protein, 191 aa, Oryza sativa
  Clone ID: PAT_MRT4530_13735C.1.pep
MVLKVVLMAIKDRFASYSCETLTVPTTSQRRMLAVDPNTPGDDPLFAHAGSLHSGSLAISPALPRRRLARRLPNAAARDHRRRNPLHNALPGRRVALSSQTFPVKAALEPEIKRRAARTTVAAAASPTSGSLCAMLPDSCSPHRPQLGVGCRQIGVRRRRTGGMNGSGAWEEETVASESGRDEDEAAPWRC

SEQ ID NO: 109594 - protein, 374 aa, Oryza sativa
  Clone ID: PAT_MRT4530_13736C.1.pep
MDDNGGILPLPVGAIHLRLVLLRQICSGQRPAGEQLHDILALVGTRQAMRTSILSRAGARVWRWWAAIASRISPTVPPRLAGLLPTSRPASAELACANLVDQGDFDGARRVVDAVLSAAGPRGEVSDRLAHHFARVLLALCSEDKGGHSSDEGTSETREAIAALDRGVLLCCTGDRDRRTILPHPGCSPPAIDVERRGERKEEHSARGAAVSLHAGSLAISPALPRRRFARRLPNAAARDHRRRNPLHNALPGRRVALSSPTFPVKAALEPEIKRSFSIQSSSFLVSKQHYVLLGFSRVARTTVAAAASPTSGSLCAMLPDSCLPHRPQLGVAGCRQIGVRRRRTGGMNGSGAWEETVASESGRDEDEAAPWRC

SEQ ID NO: 109595 - protein, 155 aa, Oryza sativa
  unsure (1)..(155): unsure at all Xaa locations
  Clone ID: PAT_MRT4530_13737C.1.pep
QIVHVITLSFPSSLPSSFLSLFLLSPSKPAGGARVPGRRGRCREAGERRRPRRCGSRRVSPHAATTATADGAGARSAVTXRAPRQRHPRPPRPPAPALPCRRPPSPFHVPPWMTTMDDDDGDFPLPVGAIRLRLVHPRLPSHAAGLHRLSTCGHG

SEQ ID NO: 109596 - protein, 194 aa, Oryza sativa
  Clone ID: PAT_MRT4530_13738C.1.pep
MDKIKDRAILLFCPSSLLDDREEHSARGAAVSLHAGSLAISPALPRRRFARRLPNAAARDHRRRNPLHNALPGRRVALSSPTFPVKAALEPEIKRSFSIQSSSFLVSKQHYVLLGFSRVARTTVAAAASPTSGSLCAMLPDSCLPHRPQLGVAGCRQIGVRRRRTGGMNGSGAWEETVASESGRDEDEAAPWRC

SEQ ID NO: 109597 - protein, 264 aa, Oryza sativa
  Clone ID: PAT_MRT4530_13739C.1.pep
MTTTATSLSPSAPSASASSTRACPPTPLASIVSPLAGMDDDGGDLSLSVGAICLRLVNPRLPSHAASLHRLSTRASLTPPPPRRRRQICSGQRPAGEQLHDILALVGTRQAMRTSILSRAGARVWRWWAAIASRISPTVPPRLAGLLPTSRPASAELACANLVDQGDFDGARRVVDAVLSAAGPRGEVSDRLAHHFARVLLALCSEDKGGHSSDEGTSETREAIAALDRGVLLCCTGDRDRRTILPHPGCSPPAIDVERRGERK

SEQ ID NO: 109598 - protein, 105 aa, Oryza sativa
  Clone ID: PAT_MRT4530_1373C.1.pep
LRRAPWRNLNTGNPGPIAGRGARSIDAPWPALISPSSPSSSPRAPPWRSPRRRRPRRPRRSRRRPPTPPPAHIPRRRRLPVPASLPRSPARLPRRRRPRPPPTRQ

SEQ ID NO: 109599 - protein, 100 aa, Oryza sativa
  Clone ID: PAT_MRT4530_13740C.1.pep
MSSPDLGSSLVTLSMQYVLLGFSRVARTTVAAAASPTSGSLCAMLPDSCLPHRPQLGVGCRQIGVRRRRTGGMNGSGAWEEETVASESGRDEDEAAPWRC

SEQ ID NO: 109600 - protein, 84 aa, Oryza sativa
  unsure (1)..(84): unsure at all Xaa locations
  Clone ID: PAT_MRT4530_13741C.1.pep
TKYEDINIKPSKCWNTTWPPITFLISDGHKIYIXLHFGHNNINXGVAPPIMGLWTCNFVWDHGPIIGFICTGEIKQPXRGVSIA

SEQ ID NO: 109601 - protein, 49 aa, Oryza sativa
  Clone ID: PAT_MRT4530_13742C.1.pep
GRTCYGEVVFLRHTLFASHSSPKRPLAWRGLVEGPHAIPPTSPSRARVR

SEQ ID NO: 109602 - protein, 72 aa, Oryza sativa
  unsure (1)..(72): unsure at all Xaa locations
  Clone ID: PAT_MRT4530_13743C.1.pep
FVFFFLCGVCMYKMLMNWGDERKTNECHEIQTHCVCCGICFLHACICMHGSRCELSGISLMSRSTVAXTISW

SEQ ID NO: 109603 - protein, 57 aa, Oryza sativa
  Clone ID: PAT_MRT4530_13744C.1.pep
YSAGDRCDVVARPSVQSDVTGDRPVTDRSFLTDARQSGTPHVCPGSAARAATSGGVA

SEQ ID NO: 109604 - protein, 576 aa, Oryza sativa
  Clone ID: PAT_MRT4530_13745C.1.pep
MAMLLRRRLPLARLLRPLQAEAAASTTSSPPPLQNRPAAASPSHALGSRLGFLNGVPGAPGAREASAFTTAGFLAAGAAAALASLPVAYADANEVGVVDSAVSSDAAVKPVNPDAAVSSDVAVGEDLAHKERKRIIELIQSRGMPHGSYPQFDVAVKGQKVVVKFNVPSTCSLSDLIVDLVTHIGLEAEQGGGGSEMLLRAWNSVAARQITLNPHKKTTSNGDDNEDDLCVLIFEPLVGSQYSEVEFIKRGGFSLRELEALTSVLKLVGQKDVKQSSGKGNKSYTTRKGNGQRSKHVPSMEKTISDLEGMGVRVYGFDETSSIPMDGSGTVMWENIAGYEPQKREIEDTILLALQSPEVYDEIARATRCKFETNRPRAVLFEGPPGTGKTSSARVIAKQAGVPLLYVPLEIIMSKYYGESERLLGSVFSLANDLPDGGIIFLDEVDSFASARDSEMHEATRRILSVILRQIDGFEQDRRVVVIAATNRKEDLDPALISRFDSIICFDLPDQQTRAEISAQYAKHLTKSELFQFSLATEEMSGRDIRDICQQAERHWASKLIRGHVPRDDVGEPNLL

SEQ ID NO: 109605 - protein, 103 aa, Oryza sativa
  unsure (1)..(103): unsure at all Xaa locations
  Clone ID: PAT_MRT4530_13746C.1.pep
ILSLXLXVWISTPWTQAWYLISRISIQMAFFEASKGNWWFGCFLAIRWLEVYHSMRKRKSLMSVEAKVGNGWNLCCHQHNSSWQRYRPFLLGRTPGSILQLAY

SEQ ID NO: 109606 - protein, 155 aa, Oryza sativa
  Clone ID: PAT_MRT4530_13747C.1.pep
SVRESSYGVTVIKAAIYPGNVLSIHMNKPSSFKYKSGMYMFVKCPDVSPFEWHPFSITSAPGDDYLSVHIRTLGDWTTELRNLFGKACEAQVSSKKATLARLETTIIADGLKEETCFPKVFIDGPFGAPAQNYKKYDILLLIGLGIGATPFISIL

SEQ ID NO: 109607 - protein, 99 aa, Oryza sativa
  Clone ID: PAT_MRT4530_13748C.1.pep
CNQQNLTHSISSKHCAAVEFSGAAAGQLCFSIRTSGKETKSQPCKASYSTSAMSKNHADGKILPIGPPRLPRLACHPHHVYCCNKSPAYYGNVLLGGRV

SEQ ID NO: 109608 - protein, 780 aa, Oryza sativa
  Clone ID: PAT_MRT4530_13749C.1.pep
MAGDYVDVPLGGGGQSTLPPVAPLKKQPSRLASGMKRLASMVPDTMKLKRTHSSAQPALRGLRFLDKTSAGKDGWKNVEKRFDEMSADGRLPQESFAKCIGMADSKEFASEVFVALARRRSIKPEDGITKEQLKEFWEELTDQNFDSRLRIFFDMCDKNGDGQLTEDEVKEVIVLSAAANKLAKLKSHAATYASLIMEELDPDHRGYREIWQLETLLRGMVTAQGPPEKVKLASASLARTMVPSSHRSPMQRRFNKTVDFIHENWKRIWVLSLWAILNIALFMYKFVQYSRRDAFQVMGYCVCIAKGAAETLKLNMAVILLPVCRNTLTRLRSTALSKVVPFDDNINFHKVIALTIAIGAATHTLAHVTCDFPRLVSCPRDKFEATLGPYFNYVQPTYSSLVASTPGWTGILMILIMSFSFTLATHSFRRSVVKLPSPLHHLAGFNAFWYAHHLLVIAYILLVLHSYFIFLTKQWYNRTTWMFLAVPVLFYSCERTIRRVRESSYGVTVIKAAIYPGNVLSIHMNKPSSFKYKSGMYMFVKCPDVSPFEWLWINRFFNASRHPFSITSAPGDDYLSVHIRTLGDWTTELRNLFGKACEAQVSSKKATLARLETTIIADGLKEETCFPKVFIDGPFGAPAQNYKKYDILLLIGLGIGATPFISILKDLLNNIKSNGNVIEMHNYLTSVYEEGDARSALIAMVQSLQHAKNGVDIVSGSKIRTHFARPNWRKVFSDLANAHQNSRIGVFYCGSPTLTKMLRDLSLEFSQTTTTRFHFHKENF

SEQ ID NO: 109609 - protein, 59 aa, Oryza sativa
  Clone ID: PAT_MRT4530_1374C.1.pep
WLTKLIYYFASKDMHGESNNGYPPNQQCPPQGYMPPPGQYQPPCGAYLIPHRNYPLQLH

SEQ ID NO: 109610 - protein, 186 aa, Oryza sativa
  unsure (1)..(186): unsure at all Xaa locations
  Clone ID: PAT_MRT4530_13750C.1.pep
WPPPPPPPPPPPPRSASTTDHPPXPPPPPRLRSHLRHGAPPXPPSSPLPCWPSPRPARARPTRQSPRSASPRCPSRPEAPSTPPSTPSSPSATPAPSPRSRTTPAAPRSTTAARSPRTPTCRPGASRRAARRRWPSGSPCSPTASPGARRSCTATWSAPPGTCRSPCGRPCRARSPSLACSGATRW

SEQ ID NO: 109611 - protein, 69 aa, Oryza sativa
  Clone ID: PAT_MRT4530_13751C.1.pep
ILRSSRQGEVKVMTIQCAMNGLLANSIFSPCFSISFHSDRIASSSSYTITVGNSIHGNITDEEIPNSGW

SEQ ID NO: 109612 - protein, 53 aa, Oryza sativa
  Clone ID: PAT_MRT4530_13752C.1.pep
CFRSVSLSRFLDEIGCLVLSSLSFLRRGDMGWWTLPFLSGICFTVRWVTLGFF

SEQ ID NO: 109613 - protein, 109 aa, Oryza sativa
  unsure (1)..(109): unsure at all Xaa locations
  Clone ID: PAT_MRT4530_13753C.1.pep
PSNGFVGPQCRPLGPPWGRSRGLILGTCQVLRPQFCHQMGLMAPPFLCPAFCPLVRSIMRQVRFFGGFVGEPPAPARAQVALNLPPLCGVPPRSCTPPFKVAPGLXGFW

SEQ ID NO: 109614 - protein, 159 aa, Oryza sativa
  Clone ID: PAT_MRT4530_13754C.1.pep
HFLGYGNIAYRLWEASKGSKKISKIWCAWVGQDGSHGFDECDTYEQSDFAIVNFSYTIELGRKWSPDDQDLPISAGSFFVIDDAGHRGKRRKKSFSDQEASSEESNEQSSFAHDNSQAIITGSPTGTSHNLQVGLLSTKSMRREVRTQKRLAVEKACDI

SEQ ID NO: 109615 - protein, 71 aa, Oryza sativa
  Clone ID: PAT_MRT4530_13755C.1.pep
APPATSSRPRRVLCQGSFASASRNLLTEETMQRHAQKGRKKGLPGHVDTLTVAKKESINRYLVNGDSYTLL

SEQ ID NO: 109616 - protein, 100 aa, Oryza sativa
  Clone ID: PAT_MRT4530_13756C.1.pep
VEALVPGPLERSRVSFNFHGRPRLHFSPGPPLFFFVTHPLPPTAHLMGGVFQSTKCEGGGFPSFCPTVQNPFVFPPPPWSSAFPSGINNICMGIFYFHFK

SEQ ID NO: 109617 - protein, 791 aa, Oryza sativa
  Clone ID: PAT_MRT4530_13757C.1.pep
MATSSVAAMPHDSTPWRDPSRASSRQPARGFFNILVPPPQSPRPRCPDHQHHHHHHHHHDAAGGAAAAAAAAAAEPTPRRRKQILDRWAAAAAAASATASAEAPAPQEQRRRARDAELSALASATRPVTARAAVFREPSPAPSDASGAGAGCGGGARCGAELPPAAPRASSLIQRWREIEAVGPATPRPCDLASDSDGGSPRGRVGCIVKKLSGTSSIPDDELDAANKEVAMSQSAPPSPAPMRAGVEPPTNIAGINGSRPTQLVVRTVRGRRAMEELVAMMAHCRRCELAAVADRHVVSRFSHKGRIQSPKDGAIWLFGRSCSQLALLIIVMCKSHYHVSFCRLYLCEHKYFLSLFVPYVASANIVMLFDTLQSMLRLRLLRQGFKVKDEVWTLPKPVRPRLPKHEHEAYTTSQCLTQAFLSKCIAGNQHKGGQVLAEKSTGSVERLVSSDGLGNEQNDGQNSNSENQCQEGCKNMVKLCTQNQEYSEPSSFVRYDEHSTVDDVSPSTISTLHELCTPSSRGDNLREEDNQSLNGSWEERALWISSLGWPAPVEAMSPDSWNQDEIGDIENHTQNEFNDRPWIDSPNSWRSLCVATQADSGALSGNADICNLLESKNVSKSLESDFSNKMNNMLLTILRKQRQQHMIDDFEGYYDERLYWRQNDEQQNADQRHSSFEHQHHENQNFLEMEVRVRSEMAQVHHEIYELRKLVESCIASQVKIQHSIKEEMCSALREAGCCICHQTQVDSLLYRCGHMCTCFNCADQLKSSNRSCPICQSPIEDVVRAHMNF

SEQ ID NO: 109618 - protein, 97 aa, Oryza sativa
  Clone ID: PAT_MRT4530_13759C.1.pep
GSARSGSPCADRPSVSIFVFSASVIAGSPIHANHPIDKGRVCLLASRTCALLVPFRCFQVPIRFSSHDNFHIISFHGETTAFHRETIFMMREHNTVK

SEQ ID NO: 109619 - protein, 95 aa, Oryza sativa
  Clone ID: PAT_MRT4530_1375C.1.pep
RCKVTRAFAFVLSRVQRGPRHPHAQCLSFVMLVQFRSRRLHPNLDTVGQEREGRVASHSSAAGEIKIGSCRRSLGGEALVASCSSISIKRNADAW

SEQ ID NO: 109620 - protein, 274 aa, Oryza sativa
  Clone ID: PAT_MRT4530_13760C.1.pep
MVDRAADVVIGVTAGVAAAVAAAALVLLAICLYRRRRASASVAAPARSPESSTATLRANGSLNSSVSLSVASDWDHHPPPAKHAAAFWAWRGGANNGSHSPPPGSVSGIPKYHYKDLQKATNNFTTILGQGSFGPVYKAVMATGEVVAVKVLASDSRQGEREFQTEVALLSRLHHRNLVNLVGYCVDKGQRILIYEFMSNGNLASLLYDDNKRSLSWQERLQIAHDVAHGIEYLHEGAVPPVIHRDLKSANILLDHSMRAKVADFGLSKEEVYD

SEQ ID NO: 109621 - protein, 148 aa, Oryza sativa
  unsure (1)..(148): unsure at all Xaa locations
  Clone ID: PAT_MRT4530_13761C.1.pep
METTRTTRIVSILVSLVLLGQGDTYGYKYKTPXEERGDTHYNQHTRNNRSRHKINIQENIRQDKTPGTNSRRKTTMLSTTSQSFRPPCRQQLDRLPQILYCLAYTLVPTIPILCKYRNHDIKHRHTTYKTTHMSATEXPSTRRQLRDR

SEQ ID NO: 109622 - protein, 177 aa, Oryza sativa
  Clone ID: PAT_MRT4530_13762C.1.pep
MGRAVGALVASASASPAPLHALNGLVASIRSPWTSSTRAAKHLEVLKGVTVLKDVSWEVQRGEKVRLVSVNSAGKTTHLRIAAGLEDPDTGNVVKAKKNVRIASLSQEFEVCALLTIREEFLAAFEEEMEVRSRLEKVQAALEGATEDMDLGRLLDELDLLQRRSQDVEVKIQNVDV

SEQ ID NO: 109623 - protein, 1191 aa, Oryza sativa
  Clone ID: PAT_MRT4530_13763C.1.pep
MEDGAVFSPGAASESFLPAATLLRATEATTSAADAAPITETNYTRLCHKKSILTVNGQFPGPTIYARKGDLVIVNVHNNGNKNITIHCCTVVGGRLPASSGGTGSRRRALVARLGGLLPATSGGGQPATRQPESGVRRFSVVGDRWPAVCDGIVVMSARMVGGYGGRRLTLAPAASSASWPQPVMTREPLVGLRDELQREKKVEEEEEVCLPIMPSQVNLACDLELCPKDSFSAPTKHFASETRGETRPRAIGSRFWVLDGEDSEEEEEQEEALEDWQRKRTAGLEKTPAKFSKREDVNASTFSGNLDKASGELQVRAEEEKEVRKGGMARRKDDYDGCSNKDWGQRGSFREEEEGFGTGFQGSRMGFDPGYGFGQQGSFGQRWQRHGYRPRRARGFGPRCGGFAGRPGRGSARGFGSQRPAFERKMDDMGRKGEEKGGAASSERNGGAGRVKVGEVEVLVLARKEKQPMVEKKEENGDFVEMECDPSLFEDQQLGVEKGKPTEKDDNSFVVLFPSKVELQRAIAFGGADVKDNGLATGMRLQFEEWFEEEEGYLLPKVWVKVYGLRKKLREYLTLWAVGSLLGATQMVDMKTTRKNTFGRIFMAVLSPKLVPRRVDVVIGDHYFELEFELEKKGYDESGDEVEIEQGGDGGDDKEDGGQEEDELREKETKRSKSDDMVLDDKEEGKMEGNFSGDNGNQGMDGVQEKFFGEMASKIIDGAVVSLLEEVCDKVMHEEGQPAMHEGEIGQREVEGGDDIEQGDGEEEVGKMIEEKIVRAAMVKEVATTPTRASVRLASSEGEHSVEKATKRKARKNLEPQSGSIVSLKNVEETRLRNYVAPKADLVGNLEGELESEEDEMVDNLVLGHLCGGLVDEVMDEEPDHLSCDLKKGFKVYKSKSSFKRNKGQKVKVILKNKKKTSKEWKLDFIALLETGKHIWRKESRGSNMLEKWQFKIRRLRQFLRGWAKNVSGAIKREKVTDVENELLSESFKELEVKEAIFQMEHNKAPGPDGFPAEFYQVFWDVIKDDLMAVFCDFHEGTLPLHRLKFGIITLLPKQKDARGRIGLDNSPCCLKKMSAMHGVDQPRNPWSDGPEFITQCPIRPCGNFTYQVILFEEEGTLWWHAHSDFDRATVHGAIVIHPKHGTTFPFNKPDKEIPIILSEWWNDDVENVLDEAKRTGGDVEPADANTING

SEQ ID NO: 109624 - protein, 574 aa, Oryza sativa
  Clone ID: PAT_MRT4530_13764C.1.pep
MEEMNEVRLELAGMKDIADLKNLKSEVREVKKLLQELCKQKGTDAGNSETEGGTVGGNPEASAANVHEAVELFQNVKQYGMTVEQYIDKFEEYVDLVRRDHPYLQEQYITSCFIGGLRNDIKHDVCGQKPQVLLESYRYAKTYEKAALAKKATYGVNRNMSKGFNAGGQGRNQTNRNQPRNEGERKEEKNYWFCKEPWLPKHQCKVKQALHALLVEGNEEEGTTEETTEHESNEEDEGKNQTDDKGKTKEVMTHMGHYEYQVMPFGLTNAPATFQSLMNQVLRPFLRKFVLVFFDDILIYSQNQEEHLEHLKLVMQVLEENNLVIRLKKCAFGLSEVAYLVHIISKKGVATDPRKVDKITGWSIPTDVTELRKFLGMTGYYRRFIKGYGLICRPMHDMLKKQGLQWGPEQTAAFNELKNKMVSSPVLAMPDFNKEFVIEADACGTGIGARLVEGIQHKLMLKLMEYDYSIEYKPGWENSVVDALSRMPRQQEGVEESSQAITVVVPDWVEDIRRSYDEDLQAHKILSLVGSEADPNGEYKLESGLLKYKGRIFVGQNTEIRKDLLRGYHASSFG

SEQ ID NO: 109625 - protein, 548 aa, Oryza sativa
  Clone ID: PAT_MRT4530_13765C.1.pep
MDVNKRLSTIKDLIIPNWCPYSFRPGNCPWWCNNRMRRDGADSANSWGIPSLWRGQWTEQPRQGEREAAHAQAADSTTIAGQSSGRAPSGSGGVANSGSRARQAGNQQGRAGEGAPGNQTESLIIKNSGRLLFPQLLQFLVTSRNRKHDSGAEKHNRIALVAQKVIKPLQTAFLPGRNIMEGVVILHETLHELHKKKKNGVILKLDFEKAYDKVDWKFLQQSLRMKGFSSKWCDWIDSIVRGGSVAVKVNDEIGSYFQTRKGLRQGDPLSPILFNLVADMLAILIQRTKDQGRFKGVVPHLVDNGLSILQYTDDTILFMDHDLDKTRDLKLVLSAFEKLSSLKINFHKRIPMHHKRINNKDWQGVEERIQKKLSSWKGKFLSAGLMGVRDVFFKGGAFKVGDGYQIRFWEDCWIGDLPFEKLYPNLYNLVRNKNAIVADVIDKVPLNVEFRRALVGENLVAWFNLVAKVVLVRLSNHRDKLIWKVNKTEIFSVIFRGTYWARQWSLLLKEDECDVMKEGCKLLETSVMHFFGKDGWNMRKRLKEECGR

SEQ ID NO: 109626 - protein, 416 aa, Oryza sativa
  unsure (1)..(416): unsure at all Xaa locations
  Clone ID: PAT_MRT4530_13766C.1.pep
MEEMNEVRLELAGMKDIADLKNLKSEVREVKKLLQELCKQKGTDAGNSETEGGTVGGNPEASAGDAAGTSELVRMFDEQRNQYVGQHGEANHYAEAILKGPRLEIPFFNGDDPIDWLKQCEKFFELTGTPIDQWVNMSLAHFQGRAAMWFRGVGLPWQVISWPQWCAMICTRFSAANVHEAVELFQNVKQYGMTVEQYIDKFEEYVDLVRRDHPYLQEQYITSCFIGGLRNDIKHDVCGQKPQVLLESYRYAKTYEKAALAKKATYGVNRNMSKGFNAGGQGRNQTNRNQPRNEGERKEEKNYWFCKEPWLPKHQCKVKQALHALLVEGNEEEGTTEETTEHESNEEDEGKNQTDDKGKTKEVMCVSLNAIHGTTRPDTFSVMIQINGSKIVGLIDSGSTSTFMDXRFAIKNHCPL

SEQ ID NO: 109627 - protein, 182 aa, Oryza sativa
  unsure (1)..(182): unsure at all Xaa locations
  Clone ID: PAT_MRT4530_13767C.1.pep
MACTVASRASAEVNESEGTVMVMVAREKRRGAHRPAVAGGLLGQPRFGLTRGSAEPWWLQLRLALHVDVQDALSMTVVRGRVGKEVEDAGGDNALLSLNGREERATGGESIFHPGCRSRXPRRPPARRSPRRLPRGPVVCRLAAARPRGLRPGLRPAARPPWPPPAGAPPRGSQPPDLSVGM

SEQ ID NO: 109628 - protein, 829 aa, Oryza sativa
  Clone ID: PAT_MRT4530_13768C.1.pep
MVDNLVLGHLCGGLVDEVMDEEPDHLSCDLKKGFKVYKSKSFFKRNKGQKVKVILKNKKNFMWHWTRPKGRPGGILLGVNLEFFEVASIDEGDFYVKFHVQNKVDGFQWCVLAVYGATQEEYKEAFLVELVNACNKESIPILMGGDFNIIRKASEKNNNNFNVKWPFLFNAVIDSLDLRELELSGRKFTWANSLHNPTFEKLDRVLMSTEWEQKYPLATVRALNRELSDHTPLLLDTGAGTHANKQLLFKFELGWLLRDGFVDLVADIWRKERWAKNVSGANKREKVLLIAKADKLEKKAEVQLLSNQELDLKLFVKNRLAQLLREEEIKWYQRAKTKHIIEGDRNMKYYHLVANGKHRKTRIFQLEQEEGVIKGDVQLKKYISKYYKNLFGAPKENNFSMVESQRDDITQVTDVENELLSESFKELEVKEANFQMEHNKAPGLDGFPAEFYQVFWDVIKDDLMALFHDFYEGTLPLHRLNFGIITLLPKQKDASRIQQYRPICLLNVSFKIFTKIMANRIALVAQKVIKPSQTAFLPGRNIMEGVWCDWIDSIVRGGSVAVKVNDEIGSYFQTRKDMLAILIQRAKDQGRFKVVVPHLVDNGLSILQYADDTILFMDHDLDEARDLKLVLSAFEKLSGLKINFHKSELFCYGKAKDVEHEYVKLFGCDTGDYPFKYLGIPMHHKRINNKDWQGVEERIQKKLSSWKGKFLLVGGRNKNAIVADVIDKVPLNVEFRRALVGENLVAWFNLVAKVVLVRLSNHRDKLIWKVNKTRIFSVIFRGTYWARQWSLLLKEDERDVMKEGCKLLETSVMHFFGKDGWNMRKRLKE

SEQ ID NO: 109629 - protein, 188 aa, Oryza sativa
  unsure (1)..(188): unsure at all Xaa locations
  Clone ID: PAT_MRT4530_13769C.1.pep
METTRTTRIVSILVSLVLLGQGDTYGYKYKAPXEERGQSTDTSTTIYGTIDQDRRSTYKPTYAKIRRRISTSGISTASPLRCLWILSGETXALSLISPGTNSRRKTTLLSTTSQTFRPPCXQQLDRLPQILYCLAYILVPTIPILCKYRNRDIKRRHTPPLSLLISRTMPLDLVVVFFPRGRRLGATK

SEQ ID NO: 109630 - protein, 35 aa, Oryza sativa
  Clone ID: PAT_MRT4530_1376C.1.pep
ETHRDREGGHRLTSRAFVFPLPVIENGSPFLGSQP

SEQ ID NO: 109631 - protein, 181 aa, Oryza sativa
  Clone ID: PAT_MRT4530_13770C.1.pep
MRSERNVISSERSSGVPEPSNREKGEEARRCSSGGEALTPAVGRVPDCHAPRDGSGRKREGGGRGERGKMDSSHRGKLYGARDWLTARGGSVRRLQRWSSTRSRRQWRGAREDGAGFVLSLVGDGGAYTWWPRYGWAAAVDEHGTGYGGGATWQANGKAAATAHKTVGDGGANHNDGGDCA

SEQ ID NO: 109632 - protein, 154 aa, Oryza sativa
  unsure (1)..(154): unsure at all Xaa locations
  Clone ID: PAT_MRT4530_13771C.1.pep
METTRTTRIVSILISLVLLGQGDTYGYKYKTPXRGEGTPTTRQSTPNTINXKPTYTKTRCRISTSGISIASTLRCLRILSGEMKALSLISPGTDLRRKATLLSTTSQIVRPPCRQQLDRLPQTLYCLTYILASTVPILCKYQNCDIKRRQSPPS

SEQ ID NO: 109633 - protein, 437 aa, Oryza sativa
  unsure (1)..(437): unsure at all Xaa locations
  Clone ID: PAT_MRT4530_13772C.1.pep
MFSTIFEKFDRMAYDCMPVASLRPGHPSSTIFCDRSCDDNTNTGDELDQPKADEDGDRLSALPDCLVHTIMXSFLPARQAVQTYALSRRWRDLWRSMPCVVIDGHELRSTIANSXGELVELDKXLEDFTTNLLIAHNAPYCLDRFQLHLPNYRDIVGQPDIYMPRHKRRWIISGFRCRPVVLEIXIGETVAIHRFGLPLLGAISACRLKTLHLSSMVLDGRFRECIRSRCPVLESMELKNCXFEFSQIVCGTLKSLAIHDCSGRDALAVTAPKLTSFRRASIYICTITSSIASIMTSKLIYNVDHVKLNXSFQLLQEKHCSKSINILTFQKLTTLRFCACDLGQNFYILSRFLXNAPNLEKVILANCKIPDNSRKSKIMARLILHGPSKRESVIMFESQDLKLIMITYKDDDISDSIELLLYSRRKLENNTTILTKH

SEQ ID NO: 109634 - protein, 70 aa, Oryza sativa
  Clone ID: PAT_MRT4530_13773C.1.pep
FIEHDTSVVARGVHAASVLLKDIDMATSSWLYSICSNRYTRLSKAHDPTQTRGTHDSNLKHSDERKTAKH

SEQ ID NO: 109635 - protein, 173 aa, Oryza sativa
  unsure (1)..(173): unsure at all Xaa locations
  Clone ID: PAT_MRT4530_13774C.1.pep
MEGVPDKERQPEFYMETTRTTRIVSILVSLVLLGQGDTYGYKYKASXEERDTPTTINIHGTIDQDRRSTYKPTYAKTRRRISTSGISIASSLRCLRILSGETKALSLISPGTDSKRKTTLLSTTSQNFRPPCRQQLDRLPQILYCLAYILAPTIPIPYKYRNRDIKRRHLMLQ

SEQ ID NO: 109636 - protein, 84 aa, Oryza sativa
  Clone ID: PAT_MRT4530_13775C.1.pep
DLPSVMTCPYYVTLPPYSPRVSDCANKLLYAIVDFRVRFDPSWLDHNAYSMLHTGCLFVLRYQFGFSLHSLLCGSGEQPLCTIL

SEQ ID NO: 109637 - protein, 149 aa, Oryza sativa
  unsure (1)..(149): unsure at all Xaa locations
  Clone ID: PAT_MRT4530_13776C.1.pep
METIRTTRIVSILVSLVLLGQGDTYGYKYKPPRRRGRRGTPNTIDIEATTXKPTYAKTRRRISTSGISTASTLRCLRILSGETKALSLISPGTDSRRKATLLSTTSQIVRPPCRQXLDRLPQILYCLAYTLVPTIPIPCKYHNCDIKRR

SEQ ID NO: 109638 - protein, 103 aa, Oryza sativa
  Clone ID: PAT_MRT4530_13777C.1.pep
MAADGVGGGGIQRRRGGLAAAARVLVGLAGVGGDTGGRQGRVGEAAGSVRWGRVIKSTHHKCPPSTTMAATTRRDGGASAIVAKCHGGSSCGKGTRRGRRRQT

SEQ ID NO: 109639 - protein, 167 aa, Oryza sativa
  Clone ID: PAT_MRT4530_13778C.1.pep
MAVVGFTVGRAHAGAAARLAVDRVHGREDGGRMLTGRDLTRSSGPGAEVAATWSAMWAGAKGEEEEEEEAPGIGRPTTREAFRRAAANRSERLGPWMTSAVGLPLSALEASGVERRSGSAAGHDAGGARVCRSGDRGVGHTRTRAGRAKAVGAASLPVDHARARGKR

SEQ ID NO: 109640 - protein, 39 aa, Oryza sativa
  unsure (1)..(39): unsure at all Xaa locations
  Clone ID: PAT_MRT4530_13779C.1.pep
MMNLDPAPSSNYDAFRLRERXAVIELNSDRMRILWIILC

SEQ ID NO: 109641 - protein, 145 aa, Oryza sativa
  unsure (1)..(145): unsure at all Xaa locations
  Clone ID: PAT_MRT4530_1377C.1.pep
MNKQYTPSQHRATMGPLTTNIVLAVDVETATARARCXVRGRPRMAPXGPNMTTXYNAPWLPDRATWYGQAYGSGSTGNGGAGGIMNDSLPSYSGMNCCGNVPILKDGKGCGSCYEAKCEQPEGCSKQTVTEYITDMNYEAILVYQ

SEQ ID NO: 109642 - protein, 87 aa, Oryza sativa
  Clone ID: PAT_MRT4530_13780C.1.pep
DLVEGCPSHSEFVLYAGLRMHRSSVITAMFFLICLVICYRARTKLSMILHTSINVLGTLLYWTMRECSNVYLICYAGAYRASSIAKR

SEQ ID NO: 109643 - protein, 354 aa, Oryza sativa
  unsure (1)..(354): unsure at all Xaa locations
  Clone ID: PAT_MRT4530_13781C.1.pep
MAAGPRAAARLAVDRTHGREDGGRRLTGSDLTQSSGPGAEVAATWSATRAGAKGEEEEEEEAPGIGRPTTREAFRRAAANRSERLPPAARGGTTVAGGGDQARRIGDVLARGKGQGGANSGLAETVRDRDAHAGTRDPMVTGDARAALLCGGGNGDTTWRQRRRPAALGQPGGGQGDPRERGSERNRSERSRRWWIAAAAITGGEKRKSRRGNGSSIQRGGSISRTQGSQHQGGLVTSGGLRERAATAARPCRAAAGLGAASTRVREYHRAITQTRGGEXRARKGNGREGEEEGWPESSSAPRAHAGFTSARDGEGRRVGEREIERWWRGRARRTAARRRWPPRRRSAGWRRSR

SEQ ID NO: 109644 - protein, 338 aa, Oryza sativa
  unsure (1)..(338): unsure at all Xaa locations
  Clone ID: PAT_MRT4530_13782C.1.pep
MENEWIYREDEELNHQDYRRPRVVTLPETSGGFTLFHFTPTWIVQNSAHWRHCWCIVANTIKLRVVSLLHSVEQLWPRASHRVTGHGATRLSCPTPATTTTTTTSNLCSFLNRVVSAWLVCAVLTLFLFNLLWFYPVDALWNAALRSVVTSGKLGKHPSMAGGGEEARCDYWEGRWVAPIVLAFLLLAVRLALPKNAAKEVAYSDLLTGLRAGDVTAVAFEEDSRRIYFHRATDDVGGGGGXEDTDAGTGESRRSASAARWLCYTRRVPHDEGFLLGLMRDGGVDYRSAPRLAGRLLVYMLSTLLALWVDWWSGGGGRVLRSPMTGEAAGEAEKERKG

SEQ ID NO: 109645 - protein, 82 aa, Oryza sativa
  Clone ID: PAT_MRT4530_13783C.1.pep
MRPAAHRERSRQPAAHGGGAHWVAVLLGGTPGFLVDQVAQFLLTLHRRLLDDDCGPPAEAIPSPLLRIPSISPPYLCLYLYP

SEQ ID NO: 109646 - protein, 1640 aa, Oryza sativa
  Clone ID: PAT_MRT4530_13784C.1.pep
MASFYCVRVQIDSASLRHILRPFAAQGAAPPEQLAASHPSSQYGQPARAAPSTSLLAQVAGNHPHATHVSDRKALFGMLNAGNAANVIDLTRASPLGGAEPLPKHPRHGLEASSSVEQPSCLGPLFQNTSANVQGSFPGECSVNNGISQGAIQFQDSSTCAVQKLPSQSTPRHHPALLGDQICVSCLNVGGEFFVGEAGIFGVRCFCHRLRMSVAKFCEHSGGPAEKAGEIVIMDNGMTIVQWLKYCMGVGASISDTKWDWPEWAYMRYSSEEYWTKSLLTTNNNMEKTGLFSGHGKSTGHINNPVYSSDIHNEVGRFTSVEKLVNKPDETFYRKSVGLHEAFSKNPAIQQSSKINLANHMIHDMNMNSISRPSERTYSTANMGITYSRNHLAHDYANFLEKNLNNLSRSPGPSSTRVLSNDSRACMPDVPHKIIQDGSESLGADAYPKQTTKANKTIENIEPSFGTGNRKRSLDVSNGTSHSELNEITDDAAKNSFISLFLSHLERNSTSESIDDVLNSNEHYLLKAPDVAYSSDRLKTASTQVETRANDNQLKLAPAIIHTKRISDSRSLPVPVASKGYVHQDVLHANSQEPLINGDCLPHLLPSQPNAGISKICAEVSSPVNCRCCNHVADKSHLAHSETGAPCFYDRTENQCIDAVAKLKKILPNLVLELAISADLISVMMALQFQPIGLDEVRTRSTFIPRSSLCSRELMLQSCCHACPIDGYYRSSMGHTANSLTKNTLLDAPNNTECSPYRDGKCCCSLAPKCLAGYGFTKHCVARIDQTDHTVQKSKDDGMQAAARCCTLGESEKLICQCSSEIIARKSDSKASFQNEVSTEVLNRPCVPTLQQLKNVTEASAVGGHWPYETVKEKASACRDSGIFKELKSGFSSGFSSDVVTKFSASPELNKYGLEHKNLVFDEGSRIEKCSSSSYLPISTGCEEAQNSFSRFHLEPSLVKHKNNQISEGSTRKEHENEGQCSEMSKKTRTLRCCANKSESDDCTRKIDLSSREGDSQPQHKAGPFSRRVSKTKRKHPPTHLNKHVKRLHSNCKVLNVDNERSDDEGIYVGESNSSDRKKQEDNMTTLDRTKCQQQGSRLLVRKLPKYVSLNCIVNETNSEDACSGSASIDSSLIATGITNDNRKSPKIVPLNLILKKAKRCHAIKPLSKTENIHFSEEKSSDGSADKSSSGDRSFSPQDELWSPKKNRYSSNVSRPHVKTDCQSPCCVLEEDEPLSLADMGTSQLSASRSRGSKNQRACISLNRMERYIQRPSLDASCCVCGISNLEPSNQLIECSKCFIKVHQACYGVLKVPRGQWFCKPCKINTQDTVCVLCGYGGGAMTRALKAQNILKSLLRGIATAKRSDKYVYSSGNVNSECTSKLHGEYVRHDSFNGHRSRSFNAISSFGIKEASIGSARGDIISKSWTSNRNSSLLGPRTRQWVHVVCGLWTPGTKCPNTITMSAFDISGASPAKRNTECSMCNRTGGSFMGCRDVNCSVLFHPWCAHQRGLLQSEPEGEHNENEYVGEIVGQCVADKREIEYQSGKRQQYKSACYFFKIGKEHIIDATRKGGIARFINHSCQPNCVAKIISVRNEKKVVFFAERHINPGEEITYDYHFNREDEGQRIPCFCRSRGCRRYLN

SEQ ID NO: 109647 - protein, 266 aa, Oryza sativa
  Clone ID: PAT_MRT4530_13785C.1.pep
MGYAQLVIGPAGSGKSTYCSSLYQHCETVGRTIHMVNLDPAAEHFSYPVSTDIRELISLDDVMEELGMGPNGGLIYCMEHLEDNLDDWLDEQLEGYLDDDYLVFDCPGQIELFTHVPVLRNFVEHLKRKNFNVCAVYLLDSQFVSDVTKYISGCMASLSAMIQLELPHINILSKMDLVSNKKDVEEYLNPEAQVLLTKSLAELAPNFGKLNKSLAELVDDYSMVNFIPLDLRKESSIQYVLSHIDNCIQYGEDADVKVRDFDPEED

SEQ ID NO: 109648 - protein, 279 aa, Oryza sativa
  Clone ID: PAT_MRT4530_13786C.1.pep
MGYAQLVIGPAGSGKSTYCSSLYQHCETVGRTIHMVNLDPAAEHFSYPVSTDIRELISLDDVMEELGMGPDGGLIYCMEHLEDNLDDWLDEQLDGYLDDDYLVFDCPGQIELFTHVPVLRNFVEHLKRKNFNVCAVYFLDSQFVSDVTKYISGCMASLSAMIQLELPHINILSKMDLVANKKDVEEYLNPEAQVLLSQLNRQMAPKFGKLNKSLAELVRKTLSRYGLAEFELCTSDEASALVPSLRSGGSIQYVLSHIDNCIQYGVDADVKVRDFDPED

SEQ ID NO: 109649 - protein, 129 aa, Oryza sativa
  Clone ID: PAT_MRT4530_13787C.1.pep
MADRALRLGVLVVVITYADQLREILVLFHLGNMAWMCELGEQRQGLRGRIEAPRRVSVRDGEDARHGNGWMDACGGGKRASVLRICGGCGDLGVRAEAGSAAGMCDGLNTIEMPDTALSVISPHDEIVR

SEQ ID NO: 109650 - protein, 510 aa, Oryza sativa
  Clone ID: PAT_MRT4530_13788C.1.pep
MATLETWVGFGSAMAGVGLLWSRMPEHVHEEARYIISSVVPMVMSYFNPYEQITVSEYGEERFRRNKMFDAVSTYLRSACLGSATKLKAKLGNNIGDDPLVILDENQEVVDCLDGARMWWRLYPKASKNTGSTIISMFPGDTDEPRCYRLVFHKRHRQLVLKTYLPGIIRRWRELTAKDRQRLLFTNHSKQGEISMWTSVPYNPPSTFDMLAMDHAKKVEIMDDLRAFQKGKEYHSKVGKAWKRGYLLYGPPGTGKTTMIGAMANFLDYDVYDLDLTSVKDNAELRKLFLDTTDKSIIVIEDIDAIEVELTTKRKGKKMDNSDEVDNNHVLVELSNKTDDKSKVTLSGLLSFVDGLWSACGSERVFVFTTNHVDRLDPALIRPGRMDKHIEMSYCRLDAFKVLAKSYLDITEHSLFGEIGRLLDETDTTPADVADNLMPRGKRNGEISRLIDEIDAPADVAGNHMLRCKRKRDADECLAGLVETLKKAKMESATPPMDTIEEEANKEEQT

SEQ ID NO: 109651 - protein, 1083 aa, Oryza sativa
  Clone ID: PAT_MRT4530_13789C.1.pep
MAKHSTADIRRNVQVCSLLHQRYEDFSPCLTQGLLKVFFPGKSGEDLDADKNSRAMKKRSTLKLLIELYFVGIVEDASIFVNIIKDLTSLEHLKDRETTQANLSLLSAFARQGRFFIGLQSHGQEAYDELFKDLNVTADQKKFFKKALNTYYDAVAELLQSEHASLRLMEAENAKVLTAKGELSDENTASYEKLRKSFDHLQRGVSSLAEALDMQPPVMPDDGNTTRVTTGSDVAPSTAKEPSALEPIWDDEDTKAFYESLPDLRAFVPAVLLGEAEPKLNEKGREQSEPVAEQDTDVHDNPQTSSITEYHLEGKADDGVKDSEEKDKDKGKGVDKEKSKEKDFDRKTEREKEKIRAVDGASLDNLLQRLPGCVSRDLIDQLTVEFCYLNSKASRKKLVRTLFNVPRTSLELLPYYSRLVATLSTCMKDVPSMLLSMLEEEFNFLINKKDQINIETKIKNIRFIGELCKFKIAPAALVFSCLKSCLDDFSHHNIDVACNLLETCGRFLYRSPETTIRMANMLEILMRLKNVKNLDPRHSTLVENAYYLCKPPERSARVSKVRPPLHQYIRKLLFSDLDKSSVEHVLRQLRKLPWVECQQYLIKCFLKVHKGKYSHVHLIALLTAGLSRHHDDFAVSVVDEVLEETRVGLELNDYGMQQRRLAHMRFLGELYSYKHIDSSVVFETLYLIIVFGHGTPEQDVLDPPEDCFRIRLIITLLQTCGHYFNRGSSKRKLDKFLLHFQRYIISKGPLPLDIEFDVQDLFAELRPNMARYSSVEELDAALLELEESERAASVEKPENEKLSDSESQKVQPHDTAFSANGRSSANGAEENGKDHEGADSESYSDSGSIDGHEDEEDLMFEDKSNDASENEGDDEDDGIPAGSDEDEGVEVRHKVVQVDPKELEDFDRELKALLQESLESRKSEVRPRATLNMMVPMNVLEGSKDPRAVESESGEETVDEEGGSAGGGSKVRVKVLMKKGHKQQTKQMFVPGDCSLVQSTKQQEAAELEEKQSIKRRILEYNEREEEEMNGGSSQMGNWGQGGSNTGSSIRSGGRGIWDGSIRGGRQRHHIAGGFYHSYGRRR

SEQ ID NO: 109652 - protein, 50 aa, Oryza sativa
  Clone ID: PAT_MRT4530_1378C.1.pep
KRRWEPFFSPGFEQNHPQGAYWGGFILLYADTSSKLHYSEGSLSDSFDNP

SEQ ID NO: 109653 - protein, 140 aa, Oryza sativa
  Clone ID: PAT_MRT4530_13790C.1.pep
LAQRGARAFRDGHFDEAVSFYSKAQTLRPGDPIILSNRSSAFCMISQVLRERSAADSEYQPLNGLDPTTHAEVALKDAEKVLAIGSNSPRPYLLKAYALILLEQYHEAREAILSGLQVDPLHHVLQSWLSDLHKNTSIAA

SEQ ID NO: 109654 - protein, 1793 aa, Oryza sativa
  Clone ID: PAT_MRT4530_13791C.1.pep
LSGSRLFLARQEQQQRGVGVPVAKAQHPCGSCSRTANVVSFPKSKFILLSSKDREPPLLHQVVSELKLLGGSGEHPQHSPRTRGIIQHFERQVREHAEGLDEDVRVANDRLGQLEAAQIDTNSKLSSLERSLVAVNTSLAGILNTLERMGQDGHDGSARRNHNGHDANSSIAAREELEYAADTEHDEEVLGRPQRQQRRQRHGMGAPPRQEVRDNDDSLGKIKFTIPCFDEKYDPDAYLTWELAIDQKFACHDFPENKRVRAATSEFTDFASIWWSEFVRSNPNNTPQTWDAMKRVMRARFVPSYHARDLLHKLQQLRQGNKSVEEYYQALQTGMLRCGLVENDDAGMARFMGGLNREIQDILAYKEYNSINRLFHLACKAEREVQGRRASFRTNISAGRASSWTSSNVAAPSTRAAAPSSSNNKLRPSTTNSTPCPSEPTRGVAATPSKSSSSVASSGRTRDIQCLRCKGYGHVRKDCPSTRVMIVRADGGYSSASDLDEETYALLATNNAGKGDAPHQDEEHIGAEAAEHYESLVVQRVLSAQMERAEQNQRHTLFQTKCVIKERSCRVIIDRGSCNNLASAEMVEKLALSTQPHPQPYYIQWLNSSGKVKVTRLVRVHFAIGSYHDSINCDVVPMQACSIFLGRPWQFDKDSLHFGKSNQYSFVHNGKKLVLHPMSPEVILKDELARASKQKNQEHTRSEHLIAANELEKHKKKPTNSVQNNKNEIKLKGSCFIATKSDLDEVDTDTVVCYALVCKETLFPIEDTPISLPPPVTNLLQEYADIFPKEVPPGLPPIRGIEHQIDLIPGASLPNRAPYRTNPEETKEIQRQVQELLDKGYVRESLSPCSIPVLLVPKKDGSWRMCVDCRAINNITIRYRHPIPRLDDMLDELSGSLVFSKIDLRSGYHQIRMKLGDEWKTAFKTKFGLYEWLVMPFGLTNAPSTFIRLMNEVLRAFIGRFVVVYFDDILIYSRSIEDHHGHLRAVFDALRDERLFGNLEKCTFCTDRVSFLGYVVTPQGIEVDQAKVEAIHSWPVPTTITQVRSFLGLAGFYRRFVKDFSTIAAPLHELTKRNVTFTWAAAQRNAFDTLKDKLTHAPLLQLPDFNKTFELECDASGIGLGGVLLQEGKPIEYFSEKLSGPSLNYSTYDKELFALVRTLETWQHYLWPKEFVIHSDHESLKHIRSQAKLNRRHAKWVEFIESFPYVIKHKKGKENVIADALSRRYAMLSQLDFKIFGLETIKEQYAHDDDFKDVLLNCKEGRTWNKFVLTNGFVFRANKLCIPASSVRMLLLQEAHGGGLMGHFGVKKTEDILADHFFWPKMRRDVERFVARCTTCQKAKLRLNPHGLYMPLPVPSVPWEDISMDFVLGLPRTKKGRDSIFVVVDRFSKMAHFIPCHKSDDATHVADLFFREIVRLHGVPNTIVSDRDTKFLSHFWRTLWAKLGTKLLFSTTCHPQTDGQTEVVNRTLSTMLRAVLKKNIKMWEECLPHVEFAYNRSQHSTTKKCPFEIVYGLLPRAPIDLLPLPTSERVNFDAKYHAELMLKLHETTKENIERMNIKYKLAGSKGKKHVAFEPGDLVWLHLRKDRFPNLRKSKLLPRADGPFKVLQKINDNTYKLELPADFGVSPTFNIADLKPYLGEEDELESRTTQMQEGEDDEDIPSNDTTTPIAQQGPMTRALARELNYQVQGCSWHGKNSNNVESVYRLLRRSTPVVVVVGPPTSYPSPNRSLSSSHRKIGNPRCCIKTRMEMLEKHILGAVIRVTGKKARQNLSRNFSQLPFTHPTVEVYHCFALS

SEQ ID NO: 109655 - protein, 612 aa, Oryza sativa
  Clone ID: PAT_MRT4530_13792C.1.pep
MTSPGASSFAAALVVEDFPWVKREEEMGMDPDKYREVFDLAQRGARAFRDGHFDEAVSFYSKAQTLRPGDPIILSNRSSAFCMISQVLRERSAADSEYQPLNGLDPTTHAEVALKDAEKVLAIGSNSPRPYLLKAYALILLMLTVGCLLLPPLGAMHDLYMIFSPLIRKLILKQHFRKPENCPISSAILFSIRVTIEVLTEAITQRRRRCIELSMDWMRRLGMGTNDEDEVMGASLLGFTFTSLNGLLSIGDLTSHVSLASSCTYANVLQVLEQYHEAREAILSGLQVDPLSHVLQSWLSDLHRNTSIAARARRPTLDRPDDFECTLCFKLLFEPVTTPCGHSFCRSCLHQSMDHGNKCPMCRTVLFIGPKTYPISVTLSNIIQKNFPEEYAERKSEHETMTYAGVDLMPLFVMDVVLPCQKMALNIFEPRYRLMVRRIMEGNHRMGMVGIDSATGTVADCGCEVEILECEPLPDGRFYLEVEGSRRFRILRSWDQDGYRVAEIEWLQDISLPDGSQERKDLMERANAASELARTYIRRAREISRPARRARQTDLESMPGPQDPEKFSFWLVNLINLRPSDRLDLLRLSDTRERISRSLRLLGDAEQICRVQ

SEQ ID NO: 109656 - protein, 84 aa, Oryza sativa
  Clone ID: PAT_MRT4530_13793C.1.pep
GRLAPVPIRHDLGIKCRLHELANKRRISVTGASKLLAHISYSYRGMGLSVGTMIAGWDETGPGLYYVDSEGGRLKGTRFSVGSS

SEQ ID NO: 109657 - protein, 92 aa, Oryza sativa
  Clone ID: PAT_MRT4530_13794C.1.pep
MGNPNDAPLSARPFGAAHDSLLFFLRGGRKTKNNRCRNKLRASSRKTIAKGAASVTKFKDTMLEHVLVEAKDKKTINRQAIDDYDEEKEEEE

SEQ ID NO: 109658 - protein, 123 aa, Oryza sativa
  Clone ID: PAT_MRT4530_13795C.1.pep
IWGIHNLHTYQEDNNNNNNNNNNNNNNNNNNNNNNNNNNNNNNNNNNNNNNNNNNNNNNNNNNNNNNNNNNNNNNNNNNNNNNNNNNNNNNNNRSTIDITSASYVIKFSNNKVTLNLLKKNLK

SEQ ID NO: 109659 - protein, 36 aa, Oryza sativa
  Clone ID: PAT_MRT4530_13796C.1.pep
LRLHCRLVFATADRCLRRRQVFSPIRWVGHTAFDGH

SEQ ID NO: 109660 - protein, 139 aa, Oryza sativa
  Clone ID: PAT_MRT4530_13797C.1.pep
MPCKGHGCPGTTKGTRIRGMTHKPPWPRSCPHNSRAAIVPQILSGDVMNRIGEENENSARGEKRGLPPRTHHLIHGRIFQGLRSIRHQVVSPSARIAPSICTGDRDKVASIWWLGEEMEERSWRKGRESQPQRRNYRKK

SEQ ID NO: 109661 - protein, 594 aa, Oryza sativa
  Clone ID: PAT_MRT4530_13798C.1.pep
MAPAAQIERKEGEKGEKTVMVDNPAFEEWFAADQQVLGFLLSSLSRDILNQVAGARSAALAWKAIGDMFGSQTRARTLNVRLALQTTSKGTMTISEYFGKMKAYSDEIASTGKPLDEEDMIAYIVNGLDGDYDSFVSALGMRVEPISMTELYAQLLNFENMLHLRQQGSANAALRGSGGRSNFAPRGGSTSAAGGSNSGRGRGDGGSRGRGNMRANRGRGGNQQQCVDTRPVCQVCYKRGHVAAECWHRFDANYVPDERHVAAAAYAYGVDTNWYIHTGATDHLTSELDKLTTKEKYKGTSTLQMVQPTLTMVGVVVVFAVMNTLIKMALNEGMHATVLITLRQLIATLFLAPIAYFRERASLTQWLFFLGLQYTTATFACAFINMTPIFTFLVALPYGLEKVNLNIAGIAKVGGTVLGFSGAMVLALYQGPSLTKLSSSSSSSSSSSSPMASAAVIAAGHVGGAHRWAIGSVALLGGSACWSLWFILQSRIARKYPALYSGTALMFFLSFLQMAVVALAIDRVSLPPWILRTKLQIITVLFVGIVGSGIGFLAMSWCVEQRGPVFTTAFTPLIQIIAAAINVIVLREQLHLGT

SEQ ID NO: 109662 - protein, 109 aa, Oryza sativa
  Clone ID: PAT_MRT4530_13799C.1.pep
HRVHYNTPQLADISFNLTKFITKHHNTHLAANTSPYISPYQHQCKHDKIHTPYHHLTDTIFPFLAYYFYPSPQQFFQHSHMTAFLLPPTLFEQHQPLLSSPQPSSSLLG

SEQ ID NO: 109663 - protein, 144 aa, Oryza sativa
  Clone ID: PAT_MRT4530_1379C.1.pep
MGGGGGGRPTASGANSSSSSDDDGDAAWKAAFESIAAVGFGLPLSNGAAKATSGGGGEASHGVEQQPPQEGKAQAPGLKLYQIKVRNMLDNMLEKNLEIVKTTCSNLADPMETDGGIKLFKKAPPGIRMDAWDYFHVQLKRPRI

SEQ ID NO: 109664 - protein, 57 aa, Oryza sativa
  Clone ID: PAT_MRT4530_137C.1.pep
MRRDTVVYGLFMPLEIWSELKAEVMARSLVEVGTTSQVFGSMSVEAVKASLEKDNVQ

SEQ ID NO: 109665 - protein, 53 aa, Oryza sativa
  Clone ID: PAT_MRT4530_13800C.1.pep
FFFFFLRKDIYDGDRDFIAYGIQRDRNQRDRWPWMDIMISFISEYPGGSYHGF

SEQ ID NO: 109666 - protein, 133 aa, Oryza sativa
  unsure (1)..(133): unsure at all Xaa locations
  Clone ID: PAT_MRT4530_13801C.1.pep
KVVPGLPAEDARERDRAGALEGHNGGDGAARGVVLSERLAGETISPMMLVGTQEQXCISDRPXSFILAHLVVINXELEIPSDGILSIXRTHNFGEISTIEDPMGFMQKGCFMTMLLGDDTLGAYTRRLLCTGT

SEQ ID NO: 109667 - protein, 163 aa, Oryza sativa
  Clone ID: PAT_MRT4530_13802C.1.pep
PRVREIVASDDPPVKARKKDHSGRNQGRAQDKSITSSKQTPPPEQEKSKKRPSPPKRKGKPKGLPKNKRRKIGGKSSVDAAGDANIDSDSSSSLAHSDSDNDKKSDGRIEKEVVVAKKAKAEKVSGKGDEPKEEEPDDHNLNSKEESDNETLSVWKKRTAKAT

SEQ ID NO: 109668 - protein, 76 aa, Oryza sativa
  unsure (1)..(76): unsure at all Xaa locations
  Clone ID: PAT_MRT4530_13803C.1.pep
KPPXGXEASFXSGETTXMRRXICRFLXGRKLGXVXKXGSKAAXXXRAARXXITAILVRCIAFSNXVQRAPKRXXXV

SEQ ID NO: 109669 - protein, 151 aa, Oryza sativa
  Clone ID: PAT_MRT4530_13804C.1.pep
MEGYGSVILQIWTPFGWTTPAPLKLNLGARAPPNKPSTSDSNIINPCFFQLLHNHHRHLRHVRNHRGKEELKTNLARMGIPSIYHTAILEFIFKIIKENLGEKRVLYAICINITNVRLSIMNIIDANAFCQSANDNSGKGLRKWKAAEDIQ

SEQ ID NO: 109670 - protein, 67 aa, Oryza sativa
  Clone ID: PAT_MRT4530_13805C.1.pep
MLGDGIPSPNGIAPPPQRDSCSLAAVVVPRRCRDCPPSPPPLPPPPPPPPPPRPSPAWCCTPSLAPA

SEQ ID NO: 109671 - protein, 89 aa, Oryza sativa
  Clone ID: PAT_MRT4530_13806C.1.pep
FLLFFGFLVFVLLLLIFFFFPWKNPLPFGKSYQRPKTQLWKYPAGWLKRTPNKFFNPPKKNLPTASNHLFTLKASTAASNDYFRAQGCA

SEQ ID NO: 109672 - protein, 416 aa, Oryza sativa
  Clone ID: PAT_MRT4530_13807C.1.pep
ISPGGAKSFELVARFCYGVKIELSSENVVYLRCASEHLQMTEEIAEDNLISQSEIFLNQVIIRNWKDSLKALETCEDLLPHAENLQIVKRCIESLASKATTDPNLFGWPIREHGIMQSPGGSVLWNGISTGARPRNFSSNWWYEDASPLSFHMYKRLISTMESRGIRPEIIAGSLTYYAKKYLPGLNRRHSMGAVPLTATLSEVEQKNLLEEIDRLLPVQKGLASTRVLLGLLRSAMILKASPTCISNLEKRIGMQLDHATLEDLLLPNFSYTMETLYNVECVQRILDHFLAMDQANGAASPCLDDVMASPSLAPITTVAKLIDGYLAEIAPDINLKLPKFQALASAVPEYARPLDDGLYRAIDIYLKAHSWLSEAEREQLCRLMDCQKLSLEACTHAAQNERLPLRVVVQVLFFE

SEQ ID NO: 109673 - protein, 91 aa, Oryza sativa
  Clone ID: PAT_MRT4530_13808C.1.pep
WPSPRPPVLAFSSSTIIVGWRGGGRRRCLLHHHRRCCRRKPLTSRSPDGEEEARAFLPAGWSGRESAPTHPLVGRSGFSFRGIWADVGRRC

SEQ ID NO: 109674 - protein, 73 aa, Oryza sativa
  Clone ID: PAT_MRT4530_13809C.1.pep
MPQFLIGSSFQASNAPFLIKVANQEVVLIASAIALLYLWVDPQSNVRGDLTPMTSSEMRGDAQNSTSCDPGIR

SEQ ID NO: 109675 - protein, 736 aa, Oryza sativa
  Clone ID: PAT_MRT4530_1380C.1.pep
MGMVKFSASAAHLQIAPSRYSRALGTTKIPKSLGRLRRHLARRRLMSSSSPHIVLVAHHGCVASLVKFSGLAVSLDVHSAAAIASLPASSVAAVALPEVKLDDNPTGRRPMARSSTCSTSTTWFLPPKDRTSDSGGGGVGSKEEEDEAWDEWLAKPIHERMPWQMPPATELQDAGLEAVTNCYGELYGDMMEYCGRSWKPGTGTAPCWCMTAIPPFNPTTSLSGARLEGHVLGTSVPPEAELEQKEGEKGEKTIRVPNPAYGEWFATDQQVIGFLFTSLTREILSQVADAPTAAAAWKTIENVFSTRSRAGAINVRLALTTTQKGQSTVTEYVSKMRALGDEIAATGKPIDDEELVAYIINGLDSEFDPVVEALVAKNASVTVAEVYSQLLGFENRVKIRTACAAMSGNRGGGNQGRGGGNPRGRGAGRGGSGRGGGRGRGNGRGGADNRPTCQVCHKKGHVAADCWHCYDENYVPDEKLGGAATHAYGVDTNWYVDTGATDHITGQLDKLTTREKYKGTDQIHTASGEDDTEADASDSNAEINAEQPDGTHPGASTGVHTAETEVAEESSSRTDQWRAVQAPEQPATATEPAAATSSAVQSSRASSRSIASHHQPGGDTSPGPRHDAAGSSAAPEVIAEIEQVSKGWSLRQLDVQNAFLHGVLEEEDLNQEFALKDLEDLHFFLGIEVKKDLTLYLGVHENKLQSLDQVLKLNTRHWQMQQQKLCGYKHYFRNLV

SEQ ID NO: 109676 - protein, 83 aa, Oryza sativa
  Clone ID: PAT_MRT4530_13810C.1.pep
PPHLLRSAAAAAVPVFAGAAAGAAVAGGHSRRRPQPVVGRRERRQRRTGRKERRGNLIEEGKFGEFGVEGSNVGGVESEYRRS

SEQ ID NO: 109677 - protein, 73 aa, Oryza sativa
  unsure (1)..(73): unsure at all Xaa locations
  Clone ID: PAT_MRT4530_13811C.1.pep
HEAQPSLSTAGRGRRERRQRRAXRKERRGNLIEEGKFGEFGEYFQILRFSYTLVLLGVEGSNVGGVESEYRGS

SEQ ID NO: 109678 - protein, 263 aa, Oryza sativa
  Clone ID: PAT_MRT4530_13812C.1.pep
MGSKDSQVEATLQDGNKEDEEDDWEAIADRGENDETLTLARSLEQQAKVSPSSSSEKISTPSSGPKRRGRGSFLYDKSVLYSDQCGLENDMDEQESNDQSGSKGRVDEQKHKSNAAAKQYGTRHVLVLYDFPPSTLAADLEKIFDKFGDHGVAIRWVNDTVALAVFRTPSAANEAQACIPPRYKVRPLKEDDDLLTKNDGIDLEPPTPRPKTSARTAQRLIAHGMGLRQFTNFGSDELKKQEEARRSRIAARQALRDDAWGSD

SEQ ID NO: 109679 - protein, 252 aa, Oryza sativa
  Clone ID: PAT_MRT4530_13813C.1.pep
MTKNKASTVAEKVPKKPRREDTATADGGPTVEDEPTVVAPGCPEFIGGLVVSFCKRNGSVVLAAHHAPSTEQREGSRKAPCPAGPSFKADPHHTVEKKLEVSEADLAKMKELYAGSNDRYKGLEARLDELHGHMDELKKSLRVSYTALHQTATSLGEVEAPAFGDETSMTAALAELVTVLESVVPKYTSQMRETATTGVRIGAAHILACFRANYPELDLENILRHGEANSGHLQFAEEVAPIADSILPFYQG

SEQ ID NO: 109680 - protein, 100 aa, Oryza sativa
  Clone ID: PAT_MRT4530_13814C.1.pep
RCLSYLAGPYIQLKTRCEHTSVTACQTPSEACAFRCFEWARNLGRPLIDSFFSFPDVTSNSYVDDLLKLIAERISKSFGPSIYFTGNNTCHPKKSDHSSV

SEQ ID NO: 109681 - protein, 66 aa, Oryza sativa
  Clone ID: PAT_MRT4530_13815C.1.pep
MENNKNSQLQPPPGYPRLDSEQQAGKKKGRCCGSSCRRSTKRGETSFIEGCIAALCCCWLCELCCD

SEQ ID NO: 109682 - protein, 331 aa, Oryza sativa
  Clone ID: PAT_MRT4530_13816C.1.pep
MAFADPHLQIPDRYISAPPPPASATARASSLPVVDMARLLDPEHREAEVALLGSACRSWGFFQLINHGVDEAVIQKMKDNTVQFFELPLEDKNTVAVRPGGIEGFGHHFRSSAGKLDWAENLIVETQPFQQRNLEFWPSKPPTFRDSIDKYAMEMWNLTTRLLRFMASDLGVEQETLLAAFRGKRQTFGLHRYPPCRHPEKVIGISPHSDGFGLTLLLQVNDTLGLQVSKDGRWHPVRPLPGAFIVNVGEILEVLTNGRYKSVFHRVAVDAERGRVTVVVFQDACINGLVKPLPELGETPRYHAIGKSEYFKGHTAEVLGQGERFIDTLKK

SEQ ID NO: 109683 - protein, 1078 aa, Oryza sativa
  unsure (1)..(1078): unsure at all Xaa locations
  Clone ID: PAT_MRT4530_13817C.1.pep
ALSLISPSPYSRRKTTLSGEGDAKTKKIPLDPSNPSKIAANKDIFAWKPSDMPSIPREVIEHSLNVKDDAKPIKQRLRRFAQDRKDAIKEELTKLLAAGFIKEVLHPEWLANPVLVRKKIEQXCMCVDYTDLNKSYPTDSFGLPRIDQVVDSTTGCELLRFLDCYSGYRQIRLKESNCSKTSFITPFGAYCYITMPFXLKNARATYQHIIQRCFSTQMXVVDDVVIKTKQKDDLIADLEETFASIRAFRMKLNPEKCTFGVPSGKLLGFMMSHRGIQANPEKINAILNMKPPSSXKDVQKLTGCMAALSRFISRLDERGMPFFKLLKKTDNLQWGPEAQQAFNDFKRFLSTPPILASPHPQEPLLFYVSATSQVVSTVLVVKREEDGHVQKVQRPIYFVSEVLADSKIRYPQVHKLLYGVLITVRKLSHYFQSHSITVLTSFPLGDILHNREATGRIAKWALELMSLDLSFKLRTSIKSQALADFVAEWTECQEDTPVEKLEYWTMHFDGSKRLSGTGAGVVLIFPTGERLSYVLWIHFSASHNVAEYETLLHVLKIVVSLGIXHLVVRGDSXLVVNQVMKDWSCLDDNMVAYRQEVRKLEDKFDGRELTHVLRHNNEAADRLANFGSKREAAPSDIFVEHLYELTVSRKDKVGDGEANEVGVIDADWREPIIKFLTQQELPQDKNEAERISRHNKLYVMIEADLYKKSPSGILHCYISLEEGRQLLXDIHSVICGNHAAARTIVGKAYRQGFFWPTAVSDAEKVVRTCESCQFFARQIHLPDQELQTIPLSWPFAVWGLDMVGPFKRATGGFNQLFVAVDKFSKWIEAKPVVTITANKARDFFINIVHRFGVPNRIITDNGTQFTGGVFKDFCEDFSIKICYASVAHPMSNGQVEHANGVVLQGIKARFFNRLRPYAGKWVEQLPSVLWSLRTTPSRATGXSPFFLVYGVEAMLPSEVEFESMRFRNVKEERYEEDRVDDLNQLEEAREATLIQSARYLQGLRRYHNRNVRSRAFLVGDLVLRKIQTTRDRHKLSPLWEGPFIISEVTRPGSYRLKREDGTLVDNSWNIEHLRRFYA

SEQ ID NO: 109684 - protein, 194 aa, Oryza sativa
  Clone ID: PAT_MRT4530_13818C.1.pep
RGGEDEDDDGDHDDRERREDDDRNRRGGDEGSRQQLHRDEDGAEHACRCDAGGGDGDVGRRTGTAKGAAGVGADETEGEAVRATAIRRNTGDAVAWPGKRMAFRCRERWWRRRPAHRGRGRGGWRRNSGGNATVAGGDALPEVFAGNRGQAGEEEAAATLEEATARPAGVLTRRQGRLKTAGGTGERGRRRGGG

SEQ ID NO: 109685 - protein, 191 aa, Oryza sativa
  Clone ID: PAT_MRT4530_13819C.1.pep
RQRGGTGRPASESRRDECVGVGSGEQGGGGGGERSKAAVSASSPCSPTRRSGGQPRQPSWSHTRGSGSAGRPASGEVMTWLTDMWGSRGSHAESATTWDKIGVKTAEGPFVTSFVSWGTPDVRFSLPLLFPTWPCAPAPRGSPTAAKSTAWLTDHPEDWDPAMAENVVKMWSVVCPATTGVDDDPWINPRR

SEQ ID NO: 109686 - protein, 164 aa, Oryza sativa
  Clone ID: PAT_MRT4530_1381C.1.pep
MPAGHGLRARTRDLFARPFRKKGYIPLTTYLRTYKIGDYVDVKVNGAVHKGMPHKFYHGRTGRVWNVTKRAIGVEINKQVGNRIIRKRIHVRVEHVQPSRCTEELRLRKIKNDQLKADAKARGEVISTKRQPEGPKPGFMVEGATLETVTPIPYDVVNDLKGGY

SEQ ID NO: 109687 - protein, 334 aa, Oryza sativa
  Clone ID: PAT_MRT4530_13820C.1.pep
MADQEDQDDGGKGAPASIEEQQYMDFPPSSLHSYVPEQPEISLDAESMKMLTSLPLYGEPLCTNESIIAHVKSVKGILESLLRRNDWLKVDEYLTKIVSENYLNSYSAISGVPMSEINQAHPELALLARRQHVYDLLVEGKYDEASDYYNANVAILEKCRSKRVRTASSDLKVLISNRTAAVNNDVDTGMAIKDYIYLYYPIFRPDIRKRNFGRKPHELWEFAWRKSTVSGFRCFACHKVFKHKKLTMIESHLKGDRTDDITACPAVTENVLSRLQLALDTGAAGRLSRKIERGRMSRDTQSTGDEHPSPDGEEDGRGDGCTDSAGPSNAVPAC

SEQ ID NO: 109688 - protein, 350 aa, Oryza sativa
  Clone ID: PAT_MRT4530_13821C.1.pep
MSGGVISMVVAPWILACGFLLCSSSFLGAEGAIGVNYGMLGNNLPSPAQVISMYKAKNINYVRLFHPDTAVLAALRNSGIGVVLGTYNEDLARLASDPSFAASWVSSYVQPFAGAVSFRYINAGNEVIPGDPAANVLPAMRNLDAALKAAGISGIPVTTAVATSVLGVSYPPSQGAFSEAASPYMAPIVAYLASRGAPLLVNVYPYFAYAADAERVQLGYALLSASQSASVTDGGVTYTNMFDAIVDAAHAAVEKATGGQAVELVVSETGWPSGGGGVGATVENAAAYNNNLIRHVSGGAGTPRRPGKPVETYLFAMFNENQKPEGVEQHFGLFQPDMTEVYHVDFAASS

SEQ ID NO: 109689 - protein, 45 aa, Oryza sativa
  Clone ID: PAT_MRT4530_13822C.1.pep
LSEVEADPKPEEPIKKSQSTLLKALLESPRVDVAGALKKWLNDGN

SEQ ID NO: 109690 - protein, 452 aa, Oryza sativa
  Clone ID: PAT_MRT4530_13823C.1.pep
MAAAAGGVAGEPSGTRTKQLKVAVIHPDLGIAIPSPRGGSISRFEEPLLPELVAGIFVGFLNFAQGGAERLIVDAACQLAVHGHDVHVFTSHHDKNRCFEETVSGPFEVKVYGDFLPRHIFYRFHAICAYLRCIFVAMCVLLWWPSFDIILVDQVSVVIPLLKLKAKSKIVFYCHFPDMLLAQHTTMLRRLYRKPIDMIEETTTGMADLILVNSKFTATTFARTFCSLHARGVEPAVLYPAVSVEQFQEPHAYKLNFLSINRFERKKNLGLAISAFSLLRSVASMLPGDARQEVTLTVAGGYDKRLRENVEYLEELKRLAASEGVSEHVKFVTSCSTSERNELLSNCLCVLYTPKDEHFGIVPLEAMAAYKPVIACNSGGPVETVINDETGFLCEPSAPEFSKAMLKLVNDHDLAVKMGKQARGHVVQKFSTKTFGDLLNSYVLNVYHQRIE

SEQ ID NO: 109691 - protein, 147 aa, Oryza sativa
  unsure (1)..(147): unsure at all Xaa locations
  Clone ID: PAT_MRT4530_13824C.1.pep
KVRNLVQSPTTILISNSHQIYIEASFLTCEYMMQSSQSSLSNESSIISKFHLSQLKSQKQYATSPMMSLXIAGLLVTETQLIICIKFLFVIQIAXSCFACFFDLLAEIRLICTGKIKNSRRGILITKAQHNNVSYGCSHVVNVSSKL

SEQ ID NO: 109692 - protein, 57 aa, Oryza sativa
  Clone ID: PAT_MRT4530_13825C.1.pep
MGDADEQSKTNRGRGAVVQKHSPKPAYPVQISGEGVVPEALLVPISCARKRSEPVKQ

SEQ ID NO: 109693 - protein, 1239 aa, Oryza sativa
  Clone ID: PAT_MRT4530_13826C.1.pep
PEALHSVETWPELCVVVHNKFGKDKYQEHLEELESLRQTSGVDAYYSKFEELMHRVLVYNQAFDETYFVTKFVGGLKTEIKAAIKLHKPRTVDAALSLAKTQEDLALEIKKGGQKSTYKEGFKSTAFRVNYQGKGILGQAPDDTTKTEEKPKWEDCFESLKAARKAKGECFKCGEKWGPGHKCPKYVQLHVLEELLEVFQLREDDEVCQNEEAESSEEELVVSECVVSGTMGKKTIRLQGLIQNHEVLILIDSGSSNSFISQQLVEKLGLAVTDIPLSQVIIADGGVMQCDKLAIGVEWWCQGHSFTNDLKVLKLGGYDIILGMDWLEHHSPMWIHWQRKKLRFTYQGKRINLVGVKENLSDCKSVTSKQLKGMLKTGAVSQVVQLCSIAEESLETELPPTISAVLKEFQEQFKAPSGLPPHRSFDHSIPLLSGSKPVNVKPYRYAPKQKDEIERQVKEMLLQGIIKPSSSPFASPVLLVKKKDGTWRFCVDYRGLNDITVKNKYPMLVVDELLDELSGAQWFTKLDLRSGYHQIRLVQQDEHKTTFKTHQELYEFRVMPFGLTNAPASFQGLMNTIFDKMIRRNVLVFVDDILVYSKTLEEHVQHLREVFAVLQQHKLFVKASKCSFAKQQLEYLGHIIGAQGVATDPSEVHAVQDWLVPRNLKQLRGFLGLTSYYRKFIKNYGIMTRPLTALLKKGVPFKWAELQQQAFSQVKWAMVQAPVLALPDFSQEFIVETDACDKGIGAVLLQNGHPIAYLSKALGVKAQALFTYEKECLAILMAVNKWRAYLQNNEFVIQTNHKSLTHLGEQKLTTSMQHKAFIKLMGLQYKIRYKQGAENRVADALSRRDADEELSAISVGRPKWLESVVDWYDQDEEAKQLLAQLIINLVGVEHFTLTNGVISGLGGHSRITATYNRIKNLFYWPGMKKDVYQYVSSCDICQQAKPEHCKSPGKLQPLPIPEQAWSTISMDFIEGLPKSEGFDTILVVVDKFSKFAKFIPLILSQHYKLPQLLSRMFMIHLGCHSALKKSPYEVLFARKPTPFGLIDVGKSTVPDVQIWLQNRAHMNEVLHQQLTRAQQRMKHQADKHRSERVFAVGDMVYLKLQPYVQMIVARRSCQKLCFMYFGPYKILERIGEVAYRLDLLQSSQIHPLVHVFLLKKVIHSGIQVQADLPENCVSEEAEVVPEEILSRQLIKRGNSAVPYGLIRWTGLPASLATWENLRQLQLRFPGAPAWGQAVS

SEQ ID NO: 109694 - protein, 172 aa, Oryza sativa
  unsure (1)..(172): unsure at all Xaa locations
  Clone ID: PAT_MRT4530_13827C.1.pep
EELSAISVGRPKWLESVVDWYDQDEEAKQLLAQLIINLVGVEHFTLTNGVIRFXGKIWLGKFVEAQHAVLLAMHASGLGGHSRITATYNRIKNLFYWPGMKKDVYQYVSSCDICQQAKPEHCKSPGKLQPLPIPEQAWSTISMDFIEGLPKSEGFDTILVVVDKFSKFAKFI

SEQ ID NO: 109695 - protein, 266 aa, Oryza sativa
  Clone ID: PAT_MRT4530_13828C.1.pep
MASANAISTASLLRSFSSQGRVRRAKNGRAQRLVVRADAKDIAFDQKSRAALQAGVEKLANAVGVTLGPRGRNVVLDEYGSPKVVNDGVTIARAIELYDPMENAGAALIREVASKTNDSAGDGTTTASVLAREIIKLGLLSVTSGANPVSLKKGIDKTVHGLIEELEKKPRPVKGRGDIKAGGSISAGDDELIESMMSDAIDKPGAAKRMTTMPRDSSSATRWEQQDAKGGGRPKEPIHHHHHRLLELFSFTSHRDVLLFLSSYNG

SEQ ID NO: 109696 - protein, 110 aa, Oryza sativa
  Clone ID: PAT_MRT4530_13829C.1.pep
MCMERSLISMVRIGHVGLRKCATTGHAPYKLGGLDKRWIDRVQMAPLEMNKRRFKLARRLEKPKDARERGLTMDIALWKFETTKGQCAEIGGPGHGVCTKHMSTGASQVD

SEQ ID NO: 109697 - protein, 333 aa, Oryza sativa
  unsure (1)..(333): unsure at all Xaa locations
  Clone ID: PAT_MRT4530_1382C.1.pep
IYPXRVLFSIXICVIGLILFALLIGNMQTYLQSVAIRLEEMRVKKRDAEQWMHHRSLPPQIRERVRRYERYRWLETRGVDEENLVQTLPKDLRRDIKRHLCSGLVKRVPLFENMDERLLDAICERLRPTLYTENEYILREGDPVDEMHFILHGCLESETTDGGRSGFFNKVQLKEGAFCGDELLTWALDPKSAANFPASTRTVKALTEVEAFALCAEELKFVASQFRRLHSRQVQHTFRFYSQHWRTWAACFIQAAWRRYYKRKMAEQHRKEEEAANRQSSSSHHPSLAATIYASRFAANALRGVHRLRSRASPTIVRLPKPPEPDFAVDEAD

SEQ ID NO: 109698 - protein, 90 aa, Oryza sativa
  unsure (1)..(90): unsure at all Xaa locations
  Clone ID: PAT_MRT4530_13830C.1.pep
SHXXXNWRXSCRLVVVVAARXCLLPLPLYPSXHLLLLPHRDXDGKPRRGGVPGGGGWRGGGGSTGGRLHRGDLARETSSSXRCREEERVG

SEQ ID NO: 109699 - protein, 158 aa, Oryza sativa
  Clone ID: PAT_MRT4530_13831C.1.pep
MVAPANALVSMSPRKFTFAKGALVTALLGIAFQPWRLLSSCESFVYTWPFELSSAARGRCAPRRPTTPTTARARSCTCIVEDGGGGSSRDRARPAHRRARRCRHKVAVLIIIADLQGKELSSPSSSSSSPANSKVAYGQRWPSARDFHSPTLSCRGGA

SEQ ID NO: 109700 - protein, 84 aa, Oryza sativa
  Clone ID: PAT_MRT4530_13832C.1.pep
TKDGTSQILIDSALQEPKNRRARGMQFWAIGVSPTSIFSKGVVDPGLFEGPNPQLKALHRELKNDLPRTLVFEGLPPAPGGQRG

SEQ ID NO: 109701 - protein, 486 aa, Oryza sativa
  Clone ID: PAT_MRT4530_13833C.1.pep
MAVSSSSLLLRRGATGGAGRRWGPGEALRRLVSSSEAAPAEKVPARSPPVMPPFEHRPRPYAGWSGDEILAKRKQFLGSSVFYYYQKPLNIVEGKMQYLYDENGKRYLDCFGGIVTVSCGHCHPDIVNAVVEQTKLLQHTTTIYLNQPIVEFAEALASKMPGNLKVVYFVNSGTEANELAMLMARLYSGNLNMIALRNAYHGGSAGTIGLTGLQTWKYPIPQGEIHHVMNPDPYRGTFGSDAVAYAKEVEEQINYGTSGRVAGFIAETFQGVGGAVELAPGYLKLAYDTVRKAGGVCIADEVQSGFGRTGSHYWGFQTQDVIPDIVTMAKGIGNGLPLGAVVTTPEIANVLAQKIQFNTFGGNPVCSVGGLAVLKVLDKEKRQAHCADVGSHLVNRLKELQQKHEIIGDVRGRGLMLGVELVTDRKEKTPAKAETNLLFEKLKDLNILVGKGGLHGNVFRIKPPMCFTRDDADYLVDAMDYAMSGL

SEQ ID NO: 109702 - protein, 129 aa, Oryza sativa
  unsure (1)..(129): unsure at all Xaa locations
  Clone ID: PAT_MRT4530_13834C.1.pep
XXGERXSPRSWFIRTPGRVRSNFWXTLLFXICFANFXIXCNFXSRIEXRAFTGTCFSFGLAFHFXVGFNSSSVAWAQAHDLSRWHGNSIVHQNAFANILLGCIPSSRXKSXLXXRTXSXXPXAESLQPK

SEQ ID NO: 109703 - protein, 117 aa, Oryza sativa
  Clone ID: PAT_MRT4530_13835C.1.pep
PGAGKGTNRAKVKGPREAGHSAGRRGSEARVGWLGPVEGGTGRAGPKVPKLNGRLFKLGKNFKILTPIWSWKLPGCGTRLPSNGSSLRDLDCTHSNYQTLKRPVCYLLSLPPRVRIG

SEQ ID NO: 109704 - protein, 82 aa, Oryza sativa
  unsure (1)..(82): unsure at all Xaa locations
  Clone ID: PAT_MRT4530_13836C.1.pep
GRDHHLFSIPLDFLSLSGMEAPESAAGDMSQRDKQDEGLWKRRRLAVTARCCLRDLAQAITTPADADWLEXDASTMIAVSHT

SEQ ID NO: 109705 - protein, 47 aa, Oryza sativa
  Clone ID: PAT_MRT4530_13837C.1.pep
KVATCLGSMLRASVWCSLHLLCLRPGIYSASFILLLSAGDLLQLIVA

SEQ ID NO: 109706 - protein, 311 aa, Oryza sativa
  Clone ID: PAT_MRT4530_13838C.1.pep
MKVAPFLKKNDTFVAALKKELSEHIADVHVQNDFLDGMFTFCGATMAPAPLNLGLTLFRENSITVLTFSKNAIYALYGVYGGIKIPSALASTRYQPRLQDEMESSHKCVNDGIHDCATGKGKRLRGFEKGPSSSRLWQWWYSKPKKEKKYWRPQHLGTPQLRKNLIEITSIQIQRGLTGPGRRVRRSGRTQTYDKMTNSWAGILDVISSTLPLLFGLPAAEACVFESNTSTISEVKNGVLREFFTCPINAGTLGRDPMSNLLRKRVSVSGRNRTLVAEIGTYAESTTGCTMHLSFLEGYPLCDYDRDVPML

SEQ ID NO: 109707 - protein, 378 aa, Oryza sativa
  Clone ID: PAT_MRT4530_13839C.1.pep
MAERSSSSSESTGNDEKKSSKPQGSSNDHQGFLPGGSPANTFDFASLHSLLNLFYMILPAAYLRFRFYEPSDPSVKEIADQIAKDPAFTQMAEQALEGEGEQGMPAIDPYIETMQKFMESPHFFTMAERLGDALVKDPAMSSLLENLTSPMHNAKIEERVSRMKEDPAVKSIMDELETGDPAALIKYWNDPETFRKISQAMGPLGGPDFAEPSGTEGTEEEGEYEDESIVHHTASVGDDEGLKKALDGGADKDEEDSEGRRALHFACGYGEVSNDKNISLRILCKTDCMYALLVFRKLHLKCAQVLLEAGAAVDALDKNKNTPLHYAAGYGMKGCVDLLLKNGAAVTLENMDGKTAIDVAKLNNQDEVLRLLEKDAFL

SEQ ID NO: 109708 - protein, 1120 aa, Oryza sativa
  Clone ID: PAT_MRT4530_1383C.1.pep
MASSSSSTAFANPLFGVQVSEKLTKQNHSLWSAQVLTALRGARLEGHVLGTSVPPEAELEQKEGEKGEKTVRVPNPAYGEWFATDQQVLGFLFSSLTREIRSQVAGAPTAAAAWKTIENTFSTRSHAGAINVRLALTTTQKGQSTVTEYVSKMRALGDEIAATGKPIDDEELVAYIINGLDSEFDPVVEALIAKNASVTVAEVYSQLLGFENRVKIRTACAATSGNRGSGNQGRGGGNPRGRGTGRGGGGSGGRGGGHGRGNGRGGTDNRPTCQVCHKKGHVVADCWHRYDENYVPDEKLGGAATHAYGVDTNWYVDTEATDHITGQLDKLTTREKYKGTDQIHTASGEVHRLVADNYAFLEIHQKYFLIKDKGKSHQLPFPKFFSVSSNPLELIHSDVWGPASDSVGAKRYYVSFIDDYSKFVWIYFLKFKSEVFEKFKEFQSMVERQFNRKILGMQTDWGGEYQKLNSFFKQIGIAHQVSCPHTHQQNGAVERKHRHIVEIGLSLLAHASMPLKFWDEAFLAATYLINRLPRKVIDFDTPLARLFHQQPDYKSLRTFGCACWPNLRPYNTHKLQFRSKQCVFLGFSNLHKGFKCLEVATGQVYISRDVTFDEQEFPFSKLQPNAGARLRAEISLLPADLTSHASDQGGVAHSNDHMHNILPVVTDSSFENDAADDTDASDSNAEINAEQPDGIHPGASTGVHTAETEVAAESPSRTDQRRAVQAPEQPATVTEPAAATSSAVQSSRASSRSIASHHQLGGDTSPGPHHDAAGSSAAPEVIAATEQGDINARPKTRLQSGIRKKKIYTDGTVKYGCFTSSGEPQNLAEALGDRNWKEAMDKEYYALMKNETWHLVPPKKGINIIDCKWVYKIKRKADGSLDRYKGRLVAKGFKQRYGIDYEDTFSPVVKAATIRTVLSLLGFVSSKSDTSLFFYDKNGVTMFMLVYVDDIIVSSSSEKATSALLQDLNQEFALKDLGDLHFFLGIEVKKVNDGLVLTQEKYASDVLRRVGMSDCKPVNTPLSISEKLSSQGGALLGPNDSTQYRSIVGALQYLTLTRPDISFSVNKINKSSSLLDPTLYLGVHENKLQFLDQVLKLNTRHWQMQQQKLCGYKHYFRNLV

SEQ ID NO: 109709 - protein, 82 aa, Oryza sativa
  Clone ID: PAT_MRT4530_13840C.1.pep
ISDNDLEGPIPTGGQMNTFSSSSFAGNPKLCGSMLAPCGSVEVAHTIPTISEDQQCSSKTISAIAFGVFFGIGVLYDQLVLV

SEQ ID NO: 109710 - protein, 48 aa, Oryza sativa
  unsure (1)..(48): unsure at all Xaa locations
  Clone ID: PAT_MRT4530_13841C.1.pep
KSGFYWYSEVTTYQMGILRWPKHDVXKNRPDHLNQEYTKRAPGKWNHL

SEQ ID NO: 109711 - protein, 72 aa, Oryza sativa
  Clone ID: PAT_MRT4530_13842C.1.pep
MSSLILSLAVGSNFTDRRPATDHVAAGEGAVCGRPGAERRPLVAFSLKDRSLHDEFEIDMLRRFGWIVPAYT

SEQ ID NO: 109712 - protein, 63 aa, Oryza sativa
  Clone ID: PAT_MRT4530_13843C.1.pep
MKASRSPDVAALHGLGDSVAEEDEVDPVDEEFFQEQVGYDDCELGICPQPNMTVNLERHGLVP

SEQ ID NO: 109713 - protein, 1101 aa, Oryza sativa
  Clone ID: PAT_MRT4530_13844C.1.pep
MDVAADLQRVIDILSSARMESQSRLLELDALLGAVRDSIARFPNIINNIIDRRDKCLVLATCGDYDRRLEEARRLFAHLRGELEAILSRQVEPDSWYQVTALHISNLFFRRATVRELRSLLKKLAGLEESLASVPESGESMDEDLYPVGTSTNDVGPDDYVKSPMVGRSELAEKMLGRMLLADGEEEEGDGPLVLPIVGGPGMGKTYLARFLFNDDRVKQAFQVRHWVHLSPHFDLSEGVSTITSSWLVDRKDGPSYLQQVISSVLRGGAKYLVVLDNVWNVGQHDWPEWDNLMLAFPPNGRILLTTRTPSIIPRTAVVMRTTEAYFLQPLDQESSKHVMDMYLPPYHEYGIKLVEKCAGVPLLLEYTSFLILQRDQLTLIRWKRVLEGSWRIQQEEELTDVFQRAYASYQHLSSELRNCFLFCSLFPLDFNFTAEELADLFAAKGFIPSTVPEAQRIRFLQQFLDECFYPVEEYDHGGRHMYRMHKILHIFVQYADRVSSSIIRVGQFNAVQDIILSTRSASLLVHPSTESLPICMSQLKMLKTFILLQEGKTCSSDRQCEIKQIPQELCQTLRHLEVLSLEATKIRKLPNKFDLLFHLTFLNLSGTDIRVIPSSISKLQLLHTLKLSYCGKLQKLHRNICRLSRLHKLDLEGCRYLSELPQNISKINSLEYLSVLGCASLTRMPHRFGNLKNLQTLLGYVVSNSNVVMLSELQPLANLHRLSLERLENVLDLKDARDAMLQDKLELESLALRWNMDTEHANTAAYELIEILRPPQQLKELELVAYEGDKLPSWMTHTEPYLKSLVEIRLINLTECKSLPPLGILPRMRIAEISGAESITCIDNNFYGHNGTFPSLEKLTFSYMHNLELWEQADRTGAFPCLAEVEIIHCPKLSALHMELPSVEKLTLWMNNKMLYGSKGGLRSVARNLEQISICFGEELESSSNFEGLQDLARLKKLNICGCHELTCLPQGLQHISSIRSLAIDNCNKLETLPEWLEHQPSLQVIRLSGCPALHSISEGLLRGNSIEIHMNDCPNLTEQSSGGYSTTQVKKHKEIIRLVEETISEDDYTILGNTLLEDDTYLEEAFFGARVDTRRHHVS

SEQ ID NO: 109714 - protein, 259 aa, Oryza sativa
  Clone ID: PAT_MRT4530_13845C.1.pep
MATIAIYESMIIYPCYGYNVLHLNQDLAYIFRQEVYGEAVVRSQVPPLIGNGCKHRQIRFTEKFFLGDTVVHKATLELEKKSGIARALQGRTSEKELLSLSLVPILFGLGNYKKLIRKGKQLILHGLNEVIPRKFMDLSYIQESEAVRLIKRRLLYLGPETIEEGSLLVLKVSPHSIRERVSCFDPAINKNKRQENRASVLTALAKTFPNLFLELSGDIFELSGHLASDSLLHQPPSPTMSTSTDPSSAPTANYVEFPA

SEQ ID NO: 109715 - protein, 43 aa, Oryza sativa
  Clone ID: PAT_MRT4530_13846C.1.pep
GEGIQNSIYPRCPKGTRLAPALAGGGPLFFLANLPKIPGEKGG

SEQ ID NO: 109716 - protein, 206 aa, Oryza sativa
  unsure (1)..(206): unsure at all Xaa locations
  Clone ID: PAT_MRT4530_13847C.1.pep
PRAAVGHPLAVSSRLHPPGAPSTLPLPYAEPARCRPPGTPRAPSLFPRPCHSRCYDHPAVLSLSSLEPPQTVALPDSLPPRMTARRRRPSPRRILSSPPSWSPLDSSRTAALAAGLLSFSHVVPPDSPPRHTGALCRRFPPXSSNPLATTFLGPLLTSPLLPRGHRAPXQXSRRAALFVAXPRXRTSNTRDHQAXRPTRVRRXHHT

SEQ ID NO: 109717 - protein, 73 aa, Oryza sativa
  Clone ID: PAT_MRT4530_13848C.1.pep
VIGVLMNPRGEGPPGKLFFSPPLIWPERHEFNWSPFSPKWSHQGSGTPLAQGGGQNRFPNPAGAQTPFQIFLV

SEQ ID NO: 109718 - protein, 272 aa, Oryza sativa
  unsure (1)..(272): unsure at all Xaa locations
  Clone ID: PAT_MRT4530_13849C.1.pep
PPRRALFPPTPRSAERHRWPPSRGLPAPPPALSSLEPPQTVALPDSLPPRMTARRRRPSPRRILSSPPSWSPLDSPRTAALAAGLLSCSHVVPPDSPPRHTAALCRRFPPXSSNPLATTFLGPLLTSPLLPRGHRPPLQLSRRAXLFVAAPRRRTSNTGDHQPPRPTRVRRNTTPIRSNHSPRPLFPXHRVSTSAIRRASPPSPAAVAPLLSGPIRGTDSPLPPLASSACRPLRFAAVRWSAPSAVGHPMSRPASSPFPVRRGVHLDATSAE

SEQ ID NO: 109719 - protein, 145 aa, Oryza sativa
  unsure (1)..(145): unsure at all Xaa locations
  Clone ID: PAT_MRT4530_1384C.1.pep
MAAPITSRTETLQKYLKLDQKGMIMAEYVWVDAEGGTRSKSRTLPEKDYKPEDLPVWNFDGSSTKQAPGENSDVYLRPCAVYPDPFRGSPNIIVLAECYDSDGTPNKYNFRHDCVKVMKTYADEEPLXFGLEQEYTLLGSDDRPY

SEQ ID NO: 109720 - protein, 366 aa, Oryza sativa
  unsure (1)..(366): unsure at all Xaa locations
  Clone ID: PAT_MRT4530_13850C.1.pep
PLNFYIGYQVVTLKESDYLKTSFITPFGAYCYIMMPFGLKNAEAXYQRIIKRCLQSQLERNVEPYIDDVVIIKTXQKVNLIADLEETFQNIRAFRMKLNPXEVPSGKLLGFMVSYRGIEANLEKINAIRDIKPPTTRKDXQKLTECLAVLSXIYFQGGERGMPFFKLLKKTNDFXWTPETQRAFEDFRXSIVSSQYIXVLASPHPXEPLLLYALARXERDIQKAQRPIYFIGEVLADRKMWYPQVXKLLYGVLITVRKQAHYFQSHLVTMVTSFPLGDVLHNREAFGKLXKWALEIMAFDIAFKARTSIKSQVLADFVAEXMEIQEGTPMEKLEYWTMYFDESPSLACSKSSIMLSRIWRTRLMCM

SEQ ID NO: 109721 - protein, 245 aa, Oryza sativa
  Clone ID: PAT_MRT4530_13851C.1.pep
MGEAAAARWKMRPSPLPLLPRRSGRAWLQGGWIRWPPASRRPDPAAYTLERNGTRWRWWRGGGSALIAASLAGRDGERRRRTDGEREGGWIGRIGFDSWHKAPEMRSLQGQRRPRRVGGQREHRRGLVHHESTNHFSLNDIFHGRIKQYESLTQLVVHLFYAGTQVNAGSSIPRRAKLAESALAPRPPIHSSQRRLMVGNEERDARGMETEEVIRRQKSGSSTREARGTRKKELAVSEGGDWSQQ

SEQ ID NO: 109722 - protein, 289 aa, Oryza sativa
  unsure (1)..(289): unsure at all Xaa locations
  Clone ID: PAT_MRT4530_13852C.1.pep
AKWRPVAGMEITRDRNSGLFFLSQQSYIKKVLHHFNMHDAKSVSTXIAPHFKLSALQCASTDEEVEFMSRVPYSCAVGSLMYAMVCSHPDLSHAMSLVSRYMANPVKEHWKAVQWIFXTFXGTTYACLKFGRAAKGLIGYVDSDFIADLDKRRSLIGYVFTIGSCAVSWKATLQPVVAQSTTEAGYMAIAEACKESVWLKGLFAEICGVDSCINLFCDNQSAIYLTKDQMFHQRTKHTDIKYHYGRDVVAQGKLKVCKINTHDNPADMMTKPVPVAKVELCPSLVGIMV

SEQ ID NO: 109723 - protein, 184 aa, Oryza sativa
  unsure (1)..(184): unsure at all Xaa locations
  Clone ID: PAT_MRT4530_13853C.1.pep
HEAPLLTASNDPTYYIVMLAGXSVGGRPQRVDASVNASGAVGDTGAVVTRLPRTAYSALRSALRAARAPGGSPTARAPGIPGTRYAYTRDGSVTQPPIRTGDGGGGAPAVGTGGPLPSGCLAFXAPPAATARRPYLGNVQQRSFEVRFDGSHRTASCPPPADRSILTTHPRQYSSIVRTWRIGV

SEQ ID NO: 109724 - protein, 180 aa, Oryza sativa
  unsure (1)..(180): unsure at all Xaa locations
  Clone ID: PAT_MRT4530_13854C.1.pep
MPPKKVTKEKVAKRKEGGSEVEMVVEXGADPSASVGEAGAALPSTGLPPLPSSAPKTSTDAEAAKAVAAAKXQANTALEVQAEADMGAMRQNMAKLQDTLRQMQEWCTSPXPALAAAVHPTHQVIQAPVRPAAPQAQYPKQRASPPVQTEGSPRQGALAGLLVGQFAQPSQVRGPSPQGP

SEQ ID NO: 109725 - protein, 603 aa, Oryza sativa
  unsure (1)..(603): unsure at all Xaa locations
  Clone ID: PAT_MRT4530_13855C.1.pep
MPPKKVTKEKVAKRKEGGSEVEMVVEXGADPSASVGEAGAALPSTGLPPLPSSAPKTSTDAEAAKAVAAAKALQVRDVVLSSQVLGTPSATAFAQPISTSAAITTSQANTALEVQAEADMGAMRQNMAKLQDTLRQMQELQXAPALAAAVHPTHQVIQAPVRPAAPQAQYPKPTYTPQAMMEAASTLQAQFQVFLQXNNVQRASPPVQTEGSPRQGALAGLLVGQFAQPSQVRGPSPQGPSSQFDPSTMAQALTTFAQAIPPGYGXSPTTESNMESNHVQPNRGTQQPVDSMASPFALPYPHLNWPAQQGAMIKPRTEKGLPLSWGINNHPIPPQFNIYSWEXLRDVFVLNFRGTYXEEPKTQQDLMGIRQRQGESTRECICLFSQARCQVQDITEAYVIHAALASLLEGELTRKLARKEPRTLEHLFCIIDGYARGEEDTKRREEIQAEYDKAATAAAAAVQTNTQAQVQAQAVSSAPVQVHPASLANQVXAPQAEPSTHESKRIVEDLIRIEFSRNIRQQGNVQAQRHCLSIVSTADSIPRYFSQPISFGPEDAKGVLFPHQDPLIVSVEMASFEVRRILIDGGSSADVMFASSQANPGQP

SEQ ID NO: 109726 - protein, 112 aa, Oryza sativa
  Clone ID: PAT_MRT4530_13856C.1.pep
ARLWIWPPMPVSPPDPASVASLAAISNPAADAPNKRSSMPPARMPSPSPSPSPPPPSSPSPAPAATNDPPPAASPPDPAAAARIWAVFAVPHAVAVPHAAPHRDGRGRQRRG

SEQ ID NO: 109727 - protein, 1587 aa, Oryza sativa
  Clone ID: PAT_MRT4530_13857C.1.pep
MAPDEKLDLLLRKMEENEKKRVAAEERSRADLAQLKSAMEARLPQVEKRVDDIASVVSTLSQKVEQLEGALQKFGDDDQKPEEVKEEHLATPKGKSSFQIQGMRDPALNSATTFQFDSVQATAAGSLGSSLPPMTCPQFSGDNPQMWRANCEVYFDVYGVLPSNWVKVATLNFVGNAAFWLQSVRNQLIGITWHDLCERVCARFTRDRQQSLIRQWFHVKQLTTVADYVERFDSIMHQLNAYESAAPPDYFVTKFIDGLKDEVRTVVLVQRPQDLDTACSVALLQEEAMEGQKSGSYRKSEHVSNYIKPSYRNQTQIGVTTPILQKVTSNSGGDDRRTAELARSRDDKLAALKAYRKSKGLCFICGERWGRDHKCANAVQLHVVQELMEAMNSEGGEELEEEPPEEVEEVQLLAISKQAISGTESSKSIRLRGWIQGTEVLMLIDSGSTHSFIEEQVGNRLSGVELLKQPLKVQIADGGQLTCTRFIPDCTWWMQGHSFKSNFTLIPLGSYDIILGMDWLVQHSPMHINWCQKWIEFQYNNSLVRLLGLSSKPTQFMEISGEQLLGMAKNGAIMYMVQLTRVPPEQQQDIPGSVQSLLQEHQDVFAEPKGLPPRRTCDHKIPLIEGAQPVNLRPYRYNPELKNEIEKQVAEMLQSGVIQHSQSAWSSPALLVRKKDGTWRMCVDYRHLNNLTIKSKYPVPIIEELLDELSGSKWFTKLDLRAGYHQIRMVPGEEHKTAFQTHSGHFEYKVMSFGLTGAPATFQGAMNQTLSSVLRKCALVFFDDILVYSPDLPSHLSHLKQVLQLLRQDHWQVKFSKCSFAQQQVSYLGHVIGVNGVATEPKKIQDVLNWATPVSVKKLRGFLGLAGYYRKFVKNFGIISKPLTQLLRKGVPFKWSAEAKDAFQRLKHALTSAPVLGLPDFSKIFYVETDASEAGIGAVLSQEGHPIAYLSKALGPRSRGLSTYEKECMAILLAVDHWRAYLQHQEFVIITDHHSLVHLADQRLHTLWQQRAFTKLLGLQYKIIYRKGSSNAVADALSRKDCPNDAQVLAISVCTPKWMQEITKGYELDPHSSQLLIELLVDSAAREHFTLQSGLIRYKGRIWVGNNEDLQAKLISELHNNPIGGHSGFPVTYRRIKRLFAWMGMKKQVKKQLQQCQVCIQAKPERVKYPGLLQPLPVPAGAWQTISMDFIEGLPKSERYNCIFVVVDKFSKYAHFVPLTHPFTAESVATAFMKNIYKLHGMPKVIVSDRDKIFTSQFWEYLFTKSGTELHMSSSYHPQTDGQTERVNQCLELFLRCFVHSTPHKWAAWLHLAEFWYNNAFHSAVQKTPFEVIYGYQPAHFGISMEDCAVPDLQEWLRDRKFMHQLIQQHLHRAQQQMKFYADKNRTFREFQPGDWVYLKLQPYVQTSVARRANHKLSFKYYGPFEVLHKVGQVAYKLLLPSDCYIHPVVHVSQLRAATGFKPPVQHSLPSSAGAMQFPLQILDHRIAKKGSSVEDATWEDKEELRSRFPHAPAWGQAGSQGREDVRAHQASHHQAVEEEEDPEDDQGGDKAKDEVQEEGGKQEGVVKRGRRIRMENRKYKGAEWAV

SEQ ID NO: 109728 - protein, 74 aa, Oryza sativa
  Clone ID: PAT_MRT4530_13858C.1.pep
GVNQPTNLVMFFHLCLAQYSFIIMCMSRVLTQKEHGPADCIDACNIVTRQEVIGQCVFLGPLHACSHTLSSALP

SEQ ID NO: 109729 - protein, 76 aa, Oryza sativa
  Clone ID: PAT_MRT4530_13859C.1.pep
QLRVLLLSPTSRQKHAYASMKRSFLANAIFYMEANWMHAQKEHSFTETKLTETNKGITQLLRQKCHHQASCRFLQP

SEQ ID NO: 109730 - protein, 80 aa, Oryza sativa
  Clone ID: PAT_MRT4530_1385C.1.pep
SCLASSNVLIHVCRSFEVQRCSFRAAMITLQAYLFIIFEHFSPLPSFLHSFCVNMQMQSARLLLAPPASSPQVISVFMRL

SEQ ID NO: 109731 - protein, 134 aa, Oryza sativa
  unsure (1)..(134): unsure at all Xaa locations
  Clone ID: PAT_MRT4530_13860C.1.pep
GVQRRYREAAAADGGDPRRAXRRDERRRRDATTRQWCYQRKREGEDGGGVLIEEVRPAWRETTVNGGETLRREVDKRRTGNAGQRRRPWPNTPAHGAEWVSAAESDGRGVDGVARTTANVTASTARLGAAASDG

SEQ ID NO: 109732 - protein, 393 aa, Oryza sativa
  unsure (1)..(393): unsure at all Xaa locations
  Clone ID: PAT_MRT4530_13861C.1.pep
ICKTIEDNCAQHRHLHRDMRSDQHDHYEESAIVLAKIKSALPYFEGNYDPHAYIDWELAVDREFQKHGLSGKXRYFCRHNKISQSWKDLKRHLRDVYIPMYYADILFNKLQCLKQDTKSVISYYHDMHACLLRYGLHEYEEATKLRFYXGLNKEIQVMFACQXYKSLSHLLQLACSAESKIEEDMKKXHAMFLPTITNQLXEVHNHEKKERDMKEPLFXLLTLKIDAPPSSEEIIKGKLNDVEINQAGQPLVEPIVAIPLSQVDLFIVPCDKEELCDNASLILMPQLVNEDAIYSVSSLCADFKHVVHIANEIEERELTSSLNTLGYVXFDDFYKLNNLKEELFAKSDFPCPTNAIFDIFSEYNGRRIYFVHKVYICLNLEPPIDVHKTCHLL

SEQ ID NO: 109733 - protein, 140 aa, Oryza sativa
  Clone ID: PAT_MRT4530_13862C.1.pep
MAFHASRWTPPGHSIEQTEFVFQWSDLVGPIFSEQIGIASNVTHGGGAVWHFVEQHERSCGSPMPISAAAQGRCRESSETERVGFAGALEEGSGGVVMAKYAHRMRKYTDRWWRPPPTAAAAGGEDPKAVSQDAICKINI

SEQ ID NO: 109734 - protein, 83 aa, Oryza sativa
  Clone ID: PAT_MRT4530_13863C.1.pep
MTTGSGVPVRLESGGAKGVASGGSDGCGDYDDSDQSGSAEQAASGKGRARRRGVRGTLLSTANGEELNAQVHMAMSHDRGDKM

SEQ ID NO: 109735 - protein, 204 aa, Oryza sativa
  unsure (1)..(204): unsure at all Xaa locations
  Clone ID: PAT_MRT4530_13864C.1.pep
MRPRRGEEEKRRKKKRSSRRKGLTTRGREEHLILSITYFPHPPLSHFPPAPSPGXGIGGGAGGGVDGGGXGIGVGAAEREVRLPSLSCPSTLPSMAGRDDDNADDDAACIRXGRGGGGATRGEGPSLSSXQFYSSAPGCDDDDDDYAAAAWIRGGXGGRHRPEGEVSGTAGGVVAMAPTKMIFADGLHGRLRKSSIFVGLCVQA

SEQ ID NO: 109736 - protein, 77 aa, Oryza sativa
  Clone ID: PAT_MRT4530_13865C.1.pep
PSPAPAPAASPIAKPPAAVTAATPPPPPPPPSPSPSPSPAPQEAATASAATSSSAATAAHALLLAAMAMMGLILGEW

SEQ ID NO: 109737 - protein, 88 aa, Oryza sativa
  Clone ID: PAT_MRT4530_13866C.1.pep
PPDGELDGLRGRVPRIGGVGLPPPNELVGQEKLLGGLSLSMGTSPHRVAFVQKRGALVLKKAPFKGPIIMKAFLGGFFPLLFVLGVLP

SEQ ID NO: 109738 - protein, 50 aa, Oryza sativa
  unsure (1)..(50): unsure at all Xaa locations
  Clone ID: PAT_MRT4530_13867C.1.pep
KSQGVKKGSSFGGVIVXTQKNPFQEVPPREENGGCKFGTNCSCTDCKCGK

SEQ ID NO: 109739 - protein, 175 aa, Oryza sativa
  unsure (1)..(175): unsure at all Xaa locations
  Clone ID: PAT_MRT4530_13868C.1.pep
DAHRSAAAELFAASPDGSFGDLETTYEAVRTFQILGVEKDKGLIGKACKFAAEKLASSSSSPAKDLFHAARISGVLKCSVDSGVYDDVATRLKAVIKDTNSLLELYYSVGGLLSIXDNTFHAIKALSQSDGRWRYDTNSAESSTFAAGIALEALSAVISLADSEVDSSMIAVVKN

SEQ ID NO: 109740 - protein, 698 aa, Oryza sativa
  Clone ID: PAT_MRT4530_13869C.1.pep
MAAAGGLPASATLLLLVIAAVAVAPLASAVRPVSDAHRSAAAELFAASPDGSFGDLETTYEAVRTFQILGVEKDKGLIGKACKFAAEKLASSSSSPAKDLFHAARISGVLKCSVDSGVYDDVATRLKAVIKDTNSLLELYYSVGGLLSIKEQGHNVVLPDADNTFHAIKALSQSDGRWRYDTNSAESSTFAAGIALEALSAVISLADSEVDSSMIAVVKNDIVKLFDTIKSYDDGTFYFDEKHVDAAEYKGPITTSASVVRGVTSFAAVASGKLNIPGEKILGLAKFFLGIGLPGSAKDCFNQIESLSFLENNRVFVPLVLSLPSKVFSLTSKDQLKVEVTTVFGSAAPPLRVNLVQVLGSDSKVITTETKELQFDLDNNVHYLDIAPLKIDVGKYSLVFEISLQEQEHETIYATGGTNTEAIFVTGLIKVDKAEIGISDNDAGTVESVQKIDLQKDTSVSLSANHLQKLRLSFQLSTPLGKTFKPHQVFLKLKHDESKVEHLFVVPGSARQFKIVLDFLGLVEKFYYLSGRYDLELAVGDAAMENSFLRALGHIELDLPEAPEKAPKPPAQAVDPFSKFGPKKEISHIFRSPEKRPPKELSFAFTGLTLLPIVGFLIGLMRLGVNLKNFPSLPAPAAFASLFHAGIGAVLLLYVLFWIKLDLFTTLKYLSFLGVFLVFVGHRALSYLSSTSAKQKTA

SEQ ID NO: 109741 - protein, 158 aa, Oryza sativa
  Clone ID: PAT_MRT4530_1386C.1.pep
MQHTVRRRSSVALQLDRSATSHELTHCALGGASSNRGSYVFTAHGESRVRGRTTATRPRAKRRSRGQLARTAFMAKNVSNQAHESSARCAPRRTSRYFSRVYPFFILRREFHRFAFRANLFLVKGCHGDDRSFIQLELAARFAAPYQLIFSDVKGVNC

SEQ ID NO: 109742 - protein, 56 aa, Oryza sativa
  Clone ID: PAT_MRT4530_13870C.1.pep
LPDRHGLTNTLGRGVPAHRLHLKPRHGPPIVGPCRASPKAQTAHRVVPAQRVEVVT

SEQ ID NO: 109743 - protein, 49 aa, Oryza sativa
  Clone ID: PAT_MRT4530_13871C.1.pep
MGHPCLRAGTSGDPRYIFPGSSDPGPDRLGLCLGGAGLIAIYTTELCSR

SEQ ID NO: 109744 - protein, 74 aa, Oryza sativa
  Clone ID: PAT_MRT4530_13872C.1.pep
CYVDQFPNSCLLQTVKRLFPLFKAPFKNPQTKLSFPVAKMVWFLAFSLWPFCSKKKKKKKKKKKKKKKKKKKTK

SEQ ID NO: 109745 - protein, 186 aa, Oryza sativa
  unsure (1)..(186): unsure at all Xaa locations
  Clone ID: PAT_MRT4530_13873C.1.pep
GVCSSRCSSSCSDCLPASPPCCRTHASPSPPATSTSPTTTASRPSRPTAPAPPRPTRAASPPSRPGSRRRPPTPRPRASPRXSRGEGREEEGPPRRVRGGVLGRRGPARGDRRGHRQGRGRGHPGRGXRSSARRWTRQGRARTRSARPTTRRRWPRRTPSSRSWRPSPSPSLRPSRRRHRHRQPWI

SEQ ID NO: 109746 - protein, 49 aa, Oryza sativa
  Clone ID: PAT_MRT4530_13874C.1.pep
MARSNRHRLDLTDCGSGFSPRGRPTSTGSAGQTDKVSMVIIPLDCKTKV

SEQ ID NO: 109747 - protein, 47 aa, Oryza sativa
  Clone ID: PAT_MRT4530_13875C.1.pep
MFGIRISRADSKLCPFSLQPQAAYADRITLADHLQRTRLTRVDVPTM

SEQ ID NO: 109748 - protein, 79 aa, Oryza sativa
  unsure (1)..(79): unsure at all Xaa locations
  Clone ID: PAT_MRT4530_13876C.1.pep
LGREWEKEEMSYLFPRATSHKCLRPHGCLVKPTFDLXEPICVHGLVXSLFAYLNPTCNFSKYCMISSFTRSFSYILSXI

SEQ ID NO: 109749 - protein, 94 aa, Oryza sativa
  Clone ID: PAT_MRT4530_13877C.1.pep
MGKRRGRRRRCSGKRRGGDADGGGGGKRRREGESEEDYCFACKDGGLLRFCDHRQMDRTIAILLGYMFGFSENFIGYAFTSSIIFQELPQGLPS

SEQ ID NO: 109750 - protein, 130 aa, Oryza sativa
  Clone ID: PAT_MRT4530_13878C.1.pep
MSRFSNIKTRFGNLIVLEGTLTNLGLDWKEGPATVRGYQGLTAKAAVVIEQSNDYDLGFSWNGQEYELVTDLQYWQQPLSVEGFLQKITQGYALETVLNESAKQGFAVTEQQKNEDGSVRLVVQRWSASW

SEQ ID NO: 109751 - protein, 103 aa, Oryza sativa
  unsure (1)..(103): unsure at all Xaa locations
  Clone ID: PAT_MRT4530_13879C.1.pep
MVYFDSWDEFVSKSVELFRNHPDTTRYVVKYRHCEGKLVLKVTDNHECLKFKTDQAQDAKKMEKLNTIFFTLMTXGPDADISDVSGKEQAEQQQSKKGRGRRQ

SEQ ID NO: 109752 - protein, 80 aa, Oryza sativa
  unsure (1)..(80): unsure at all Xaa locations
  Clone ID: PAT_MRT4530_1387C.1.pep
YGXXYKYGRXPMMFSXKNDTEHMLHVQPTXKRYRVTSVYNIFIKEDIRRIKSYNPGIRHKKXFNTGCKNWAHFPNIHFWV

SEQ ID NO: 109753 - protein, 97 aa, Oryza sativa
  Clone ID: PAT_MRT4530_13880C.1.pep
MARRDKAFGAHGRDASFGSWWKKCFGAKARAEERARVRAGESVTWRTQPDGLRLPEVAVGSSVFASRGVLLIIIILRVWWLSQPRPFLETWRRGANG

SEQ ID NO: 109754 - protein, 776 aa, Oryza sativa
  Clone ID: PAT_MRT4530_13881C.1.pep
MESGSSEGMKEKHCRKKKTEKRYCGERILIFFKDAEPTGNLPEDAQSTNNGEAKKTDDFMSQVASCLNIMRGQQLICEAEWMSLTQSRDWAAFRVPTPFQKLLANCKDVLVGHQDQPGTQPRGRPGSMCLLKPVLFNDSGTFDVPRHTATLAQQFITSRTKRWLEDQPMQLRLEISPNDKLMLWARMLMVNPYDRTYLKKAGVLRGIMASIYKCKIDPSLVAAFLTYWNMDGHTLLTSQGEMGYPLHTMYDVMGIPISGRLYEEFIPLSSTVRGHVQTLHNIYVEECPLQLNEGPGIVTIATWVNHFFGDHPVPFQSFLPDGFADPKEPLYEGPNFRVEIRNGRPTGIMCGLEMTYVHTYPLVVYRAAFIAAWLCTYCVPVEEGNFIRPEVFTMAVEIAQGSRQAIGVTSMAFLYRALDNVYHQVAARQASASDCSSFVPGHFIMGWFASFWRGVPTSATFSCPVMNPPFIIDFRDYESMDIKSAHSLFWDFNDAGTTLHSLDFLGQSSIRFPTSDQEVELFDDCSPKAHRAISMAAVDFLEESAQTKIKTTSPLPTSSANPTEIVRVEPDRSGKDIEKIRACIANPDNVTTHVSAQASQQELLLLPPRNETALNSSVMTHIDPYSEGLAIPHDDIGTLPTDLLTGDFSDLATLLEGGANPETSLCLDSPIFPGATQKDNVNSHISEDDETRTEACADTGKGGTSHHASLTGVEELSNESKKLSMDVEQIVAQIPKAPNVDSGAWENSQFKEFHGNNPVTLPKLPADVSAHGLKHI

SEQ ID NO: 109755 - protein, 963 aa, Oryza sativa
  Clone ID: PAT_MRT4530_13882C.1.pep
MESGSSEGSRDMRTGYLKTTAHNDAEPTGNLPEDAQSTNNGEAKKTDDFMSQVASCLNIKWGQQLIREAEWMSLTQSRDWAAFRVPTPFQKLLANCKDVLVGHQDQPGTQPRGRPGSMCLLKPVLFNDSGTFDVPRHTATLAQKFITSRTKRWLEDQPMQLRLEISPNDKLMLWARMLMVNPYDRTYLKKAGVLRGIMASIYKCKIDPSLVAAFLTYWNVDGHTLVTSQGEMGYPLHTMYDAMGIPISGRLYEEFIPLPSTARGHVQTLHNIYVEECPLQLNEGPGIVTIATWVNHFFGDHPVPFQSFLPNGFADPKKPLYEGPNFRVEIRNGRPTAIMCGLEMTYVHTYPLVVYRAAFIAAWLCTYCVPVEEGNFIRPEVFTMAMEIAQGSRWAIGVTSMAFLYRALDNVYHQRVPTSATLSCPVMNPPFIIDFRDYESMDIKSAHSLFWDFNDAGTALRSLDFLGRSSIRFPTSDQEVELFDDRSPKAHRAISMAAVDFLVSCTVGGVTYRRGGSGGRVGTPKQRTAKSVSISPEHQEESAQTEIKTTLPLPASSANPTEIVRVGPDRSGKDIKKIRTCIANPDNVTTHVSAQASQQELLVLPPRNETVLNSSAMTHIDPYSEGLAIPHDDIGTLPTDLLTGDFSDLATLLDGGANPETSLCLDSPIFPGATQKDNVNSHLLEDDETRTEACADTVKGGTSHHASLTGVEELSNESKKLSMDVEQIVAQILKAPNVDPDDVSARGLKHVWSEIKAFQELLKQRPIQKDIVLKEISINLDLWSNFFSKPPPEIIRLMEGLRVQKGALSEEAPLPTTKIDHHIDMLRTAQDKVESSCVALAALTSQYNVERAVEEGNKRECSRQAQKIKAEIAMLQAKLQQVEDDYSRAQCHQDVVIENLNSHLERHRQAKDRGYEIAAQLEQASVHQKSLQNIEDFTKPDEFGLSQYVYNIFDFFIGCSLDE

SEQ ID NO: 109756 - protein, 53 aa, Oryza sativa
  Clone ID: PAT_MRT4530_13883C.1.pep
MGREETQEWWSLEGRLTCLLREPVTRPSIRTNGAARLRLLSVSLSPMRPVARY

SEQ ID NO: 109757 - protein, 736 aa, Oryza sativa
  Clone ID: PAT_MRT4530_13884C.1.pep
MPTWWKRSKSAFQRSSAVSSAPASPARASTSSCAAPGRRSAAGRCADDAGGLLLARRRQLTRQRKLRHVDDIGVGLESLGLVVANSSPPPRGRASTSAAVGHPVSIPIARSASSAEFRAVHQPPPRAATAASPVLLPLPLPSPKPVESDTSEPDVGGERATRVTSQIVQNFPDNNNNLPDNSSKRTTTSSHHRKVFREKFQDKSSTETANFRLNIPAKSAPSSGFSSPVCSPRRFSNAEYTTPTAQGPQAWSAPSVRSVDSMATSSPRISPEIYTGVTEQSTFSNSLRSPILMSKNSSAPPSPLHPKLFPENNMSRIEGNGNVSFHPLPRPPGAINSMQTSIVNQSAPKVEMPSVAGQWQKGRLLGSGTFGCVYEATNRQTGALCAMKEVNIIPDDAKSAESLKQLEQEIKFLSQFKHENIVQYYGSDTFEDRFYIYLEYVHPGSINKYVKQHYGAMTESVVRNFTRHILRGLAFLHGQKIMHRDIKGANLLVDVSGVVKLADFGMAKHLSTAAPNLSLKGTPYWMAPEMVQATLNKDVGYDLAVDIWSLGCTIIEMFNGKPPWSDLEGPAAMFRVLHKDPPIPDNLSHEGKDFLQFCFKRNPAERPTASELLEHPFIRNSSHYNKHGSIHSFAGIKSNDNNNGNGSRDKAASKSDSCVKGKITVGEPTNARPSESSAFRLTPLSIQEVAPNFSSRPLGLTSNPSPSANLVNTVYFPIANSQRSPLPRPNEKEALF

SEQ ID NO: 109758 - protein, 55 aa, Oryza sativa
  Clone ID: PAT_MRT4530_13885C.1.pep
LRAYWLAHFRHGGFRLPSLSVTQHGVPGWGPFLERCSRAHFRMLLGRHSFGTWFA

SEQ ID NO: 109759 - protein, 114 aa, Oryza sativa
  Clone ID: PAT_MRT4530_13886C.1.pep
PRDSGREAARRCAVAGVGGSGASATNEGGRAELAAEGGREEAPSSRGGGAAPAGHGESLDFGGDSGRGIEGRRGKIAEAIVGASTGEGKTKGIERTPRRRQRRFTASRVTQAAN

SEQ ID NO: 109760 - protein, 124 aa, Oryza sativa
  Clone ID: PAT_MRT4530_13887C.1.pep
MAKTSRARLDPRPVLREVAPHRGFPRRGSRDRRRRVCGEVVGTSSSSVGLPHPPTPHGIAVRLVLLLRFNKGLSAPAHREQDDKTFASWFIASAKLQSWFLREIGIRSQNHTTYEPEALSVKPG

SEQ ID NO: 109761 - protein, 72 aa, Oryza sativa
  Clone ID: PAT_MRT4530_13888C.1.pep
LYSCILTFTLKHIFRTNHTFVLTDILTKDCYKNRRLLSQLPATCSNHFNLHRNNKSHCICIRAYSKLKICLV

SEQ ID NO: 109762 - protein, 174 aa, Oryza sativa
  unsure (1)..(174): unsure at all Xaa locations
  Clone ID: PAT_MRT4530_13889C.1.pep
IRSAHNLSSPSRRTPRFPPTPAPLSPPPSPQPSQPPPPPPPLTPPLPPLPPTPPXPPPPLPLPTGASSPPPSRPTLPPLASSLPPPALSLPSRRHGATTAGCGGVWRWRHLPPRRAAAAATLPFPHGERWRRPPPASGGGDASPVSSSGSSGGAPSPPTSGGGGGTLPPARRPP

SEQ ID NO: 109763 - protein, 207 aa, Oryza sativa
  Clone ID: PAT_MRT4530_1388C.1.pep
TPSERGSESFQFVQNLFLSGMGSFASPKNLLHIHRYSAEDVTAQCRLESFARQMRLTRKKIGYADVRYGWLGSRKQDIVGVLINGFISTGQTSHSSDMRTGVYLSPENRAFTSVGLCDVDEKGVQYMLLCRAILGNMGTIKPGSQDEFLSIYDSGVDNCSNPSYYVIWPSKLGTHISLEYLISFRLTPEIQDYLLHLKGLWVVPTTK

SEQ ID NO: 109764 - protein, 151 aa, Oryza sativa
  Clone ID: PAT_MRT4530_13890C.1.pep
MDDGCNREYVHLGDMVPRLQGGDRRLRGNVLHNTAPKHFPLLDGDLGAPSTAGWHHVVEARGTVGCPSVADIHPIAGSRRASPESSSDSCVSVVGGEQRYQRHLKHRGWQDSERRLRIWGSDGSFSLLPKAVAKDVSKLSLASCAAAVVVN

SEQ ID NO: 109765 - protein, 64 aa, Oryza sativa
  Clone ID: PAT_MRT4530_13891C.1.pep
FFFFFFFIIFFFFFGFFFFFVFNHPKEKLPGLIFFVRKTQTLTGHREGNPNCLKNSTLTAKKKI

SEQ ID NO: 109766 - protein, 310 aa, Oryza sativa
  Clone ID: PAT_MRT4530_13892C.1.pep
MARSTGKEGGASATTIGGGHQESRHEHPGAHWKRHEQRKETPGAAESAQHPAPPPPPSSGPEAAASGDLARMIALHGYDPSLVEDDYFRSFLRRLNPNFEVPSRLAIEEMCDAIFDETRKDIFSRLYDFPSKDQKARASGENAISYNESNGFPGAKDGNYVADVLGEAMVAIEKAIQDSYPVWSIPLVLDPRYKLARTKFIFQTAFGTEAAADYISKVTQNITKLYSDYVEDHGSAMNVVAVSSTDPLQQAWDEHCRGEAQTDLDRYLKDELVHDPTSGFDILNWWKVHGSVLYPTVALMAGDALAMPTC

SEQ ID NO: 109767 - protein, 84 aa, Oryza sativa
  Clone ID: PAT_MRT4530_13893C.1.pep
EREKTKRPGPWGLANITGPLGGNPPPPGLYRPLKGGVPFPFRGGHFLERGPVGAFFLFVQNGKRGFCSRRFNWVIQGVFPFPRF

SEQ ID NO: 109768 - protein, 578 aa, Oryza sativa
  Clone ID: PAT_MRT4530_13894C.1.pep
MAEASSSTHRRRSQAQISKIAPRHQESRHEHPGAHWKRHEQRKETPGAAESAQHPAPPPPPSSGPEAAASGDLARMIALHGYDPSLVEDDYFRSFLRRLNPNFEVPSRLAIEEMCDAIFDETRKDIFSRLYDFPSKVSIAVGTVRTIQGNVLYMACHFIDDEWNLHKVIMDAYVIVPFLDYHGPLLGVDEVCLDPDIREFAIKKVMVRFSNDEVLNNLFMMVWETKDNDINLEHELRNEIEKNQNYTNPNRRELICTTYMDSVIHSIARLLIVHQGFKDDIISNLLHLDLTRQERHQLLSQLGLDYHLWAYDEKWYSEYCSLECLKNYRICFGEKYTVPFKGFLPPIVTLHQICLIELFKLREVFKDQKARASGENAISYNESNGFPGAKDGNYVADVLGEAMVAIEKAIQDSYPVWSIPLVLDPRYKLARTKFIFQTAFGTEAAADYISKVTQNITKLYSDYVEDHGSAMNVVAVSSTDPLQQAWDEHCRGEAQTDLDRYLKDELVHDPTSGFDILNWWKVHGSVLYPTVALMAGDALAMPTCTPNSVSLMFLQFTVQVQQSSENSLLFSTESPKTE

SEQ ID NO: 109769 - protein, 80 aa, Oryza sativa
  Clone ID: PAT_MRT4530_13895C.1.pep
MAGSWVRTITSPFRKVFGAQPHKDGGKRPQQPNSGMMVQHVVVDAERSKLHGEVMACAYEDVQVMWDMLDKARIREFNSS

SEQ ID NO: 109770 - protein, 117 aa, Oryza sativa
  unsure (1)..(117): unsure at all Xaa locations
  Clone ID: PAT_MRT4530_13896C.1.pep
WTCECHXMSMSPLPXLVGLMSSGPKKEKKPLPVKPSDMKRTRRDRRELENIXLFKLFERQPNWSLKNLMQETDQPEQFLKEILNDLCFYNKRGPNQGTHELKPEYKKSTEDADATAT

SEQ ID NO: 109771 - protein, 62 aa, Oryza sativa
  unsure (1)..(62): unsure at all Xaa locations
  Clone ID: PAT_MRT4530_13897C.1.pep
DGGARCPVPLLPHATLKGPSATXDTCIGLTLGLVASVLCQMHYWNQQRKTISFYDMLMKGTY

SEQ ID NO: 109772 - protein, 58 aa, Oryza sativa
  Clone ID: PAT_MRT4530_13898C.1.pep
LAYTLRLTASIWPEQPLSQPLPHELLDRDVYGHDYRAQLQAKMHPMTPALAVALLLTL

SEQ ID NO: 109773 - protein, 90 aa, Oryza sativa
  Clone ID: PAT_MRT4530_13899C.1.pep
MSFNATAAANAPTVTANAGTAGAGNPGGRRATAGRGTERARPAGQGWSRGEGEAVLVPARRAKVAALPPRLPDGHARLAGAGQPGGYQTD

SEQ ID NO: 109774 - protein, 40 aa, Oryza sativa
  Clone ID: PAT_MRT4530_1389C.1.pep
RGKTPPFSPKKKKKKKKKKKKKKKKKKKKKRKKKKKKKGR

SEQ ID NO: 109775 - protein, 1049 aa, Oryza sativa
  Clone ID: PAT_MRT4530_138C.1.pep
MAAANDGADAAAVAAEDGLGGGKRYYMPVYHIDIYILVKSEFMVALDTAEKQVQEYRATLDDMEERLSKSEDERATCQDKLNYVEQELAATKGRESAMQERLLKEVGDFQERYCDQIKKIGELETQLKKEIDSRIAAESSSASAKESVKELEGNLQRLSENSEREKKALKKKLSYLQDDTKLSISKLNAELERMRLRALNSEDEAKLLNEQLGGLKKQLDESVRENNEMEHRLLNCSSLSYERTPSDDQKLIKLLQEELRNYEKEVDEARRLKSSHTNVELLKEKILEEQGCRERAEMELSKLQEIEAKAQKLELELASCTALLSNIPDVSSFGDIPQKIADLQKQALTNLNKVGEVTSQLKELKVALEFADLSKQRAEGEATLAKERAESATREIKRLELLLAAISEERDRLRKDHAVSKSRDGDDASSKVTIQNMESDLSRMEKVVTELESTIRDQRELISQQHTELNLMNEKLSIESRKAKSLERDGDQLRSQVALLESKLGHGDYSASSTKVLRMVNTLAVDNEAKQTIEALQAELKKTKERLQAVEELKGQADVGTVVDVNIAEKLAQLKNQIATLEKREERYKAVFAERISVFRKACCSLFGYKIVMNDQQQSNGIPVTRFILHSVYAQSDDEKLEFDYESGSTNIVVNDYTSQHEIAQQTLSTSERQPQPEKKPPRTRPPLPGKAVAALCVASFVVGLLLSGRVVVPLLPPGSSSPASNYKTSFSTGCENKRAKLGESNPTDIMNEVSRTHHAIQSLDKAVSSLEMELAVERARSSAAVGAGTAVSSLGPQKAFVVIGINTAFSSKKRRDSLRDTWVPRGDKLRRLEKEKGDRDPDAENKDFLRLDHVEGYHELSSKTRVYFTTAVATWDADFYVKVDDDVHVNLGMLTSRLAKYRTRPRVYVGCMKSGPVLSQKGVKYHEPEYWKFGDEGNKYFRHATGQIYAVSKDLAAYISINQPILHRFANEDVSLGAWLIGLEVEHVDDRSMCCATPPDCEWKKRAGNVCVASFDWSCSGVCKSVDRMKHIHRACGEGQGAVWSVAT

SEQ ID NO: 109776 - protein, 138 aa, Oryza sativa
  Clone ID: PAT_MRT4530_13900C.1.pep
ALSRPQHQNHSSLQKTSNQAAAARREDVERPGQQCARAVTGILQFQRVALVSWRSDLKRESRLLVAIPGGAPDAAFTGVGRSPGRHPPGCRLLRAFPSIAHGHGAAAVRARDSRRRLPHTLSPPASKPPTRLTPSAVA

SEQ ID NO: 109777 - protein, 184 aa, Oryza sativa
  Clone ID: PAT_MRT4530_13901C.1.pep
MEIKPKRNPRDKFGQKSAAKTYGILEFVRDKSRVRQEHSLYLGIKSTSTLTNLKDALPDIDSGPTCGAILEALVGVGGDRGSGADEVMVVGGGVGGCGDEEDRVLVVGEERDEKLGSHNGYVEGIREGIAGSDRAKGNGEEGKKMEVVVVAVEKTILVEDFSCDLPDDNHLLHCKTLVPAISVC

SEQ ID NO: 109778 - protein, 448 aa, Oryza sativa
  unsure (1)..(448): unsure at all Xaa locations
  Clone ID: PAT_MRT4530_13902C.1.pep
MSPKQKSLRSKRMAEASEEDGIDVLPDALLQHILSFLPAEDAVKTCVLSRRWRHLWKLTPILCITNTERWRSPKDFIKLVNHLVLFRGSSPLHKFEIKINSCAHWMIMSGDSNPFHCAIMWVMYALMCQVQVLTIKNMHAYIEMDDGFSLFSRHLTELNLSGLDFRKFVLNFSSCPALEYIYFSASCCFNSVEKILSQSVKYLTFDFPEFSEHHRTHIYAPNLITLRLDDCWGRVPFLESMPSLIAAFVRPHRDSDDLCSNTYSGNCEDEYCHGCYGMVDNAGNDSAKCVLLGGLSEAKKLELIAGPEMRIFRSDLRWCPLFSKLKSLLLNEWCVANNFWALACILEHSPVLLKLTLQISKETKPMIGAVENYSALVKPAAISKHLKVVKVHCKEVDEGVCETVKFLSTLDVVVLIRRMDRSTNRLLENLRFSEGNXSRPSHDEGSSR

SEQ ID NO: 109779 - protein, 678 aa, Oryza sativa
  Clone ID: PAT_MRT4530_13903C.1.pep
MGSVADDAEITGPLLAAAAGGGGDSAAAAGVERVPAWREQVTVRGIVVSAVLGVLFCLITHKLNLTVGVIPSLNVSAGLLGYFLVRSWTAVLGRLGFVIAPFTKQENTVIQTCVVACYGLAFSGGFGSYMLAMDQKTYELIGPDYPGNRAIDVMNPSLGWMIGFMFVVSFLGLFSLVALRKVMVIDYKLTYPSGTATAMLINSFHTTSGAELAEKQVSCLGKYLSISFFWNCFKWFFSGVGDSCGFDNFPSLGLAAFKNTFYFDFSPTYIGCGLICPHIVNCSTLLGAIISWGFLWPYISTKAGDWYPANLGSNDFKGLYGYKVFISVSVILGDGLYNLIKIIYATIKEVMNARSKQGRLPLVRVHDDDEGSKLSAEEKLRNDTFLKDRIPSWLAGSGYVGLAAISTATVPMIFPQVKWYLVLCAYVVAPLLAFCNSYGCGLTDWNLASTYGKIGLFIFASLVGRSGGVIAGLAACGVMMSIVSTAADLMQDFRTGYLTLSSPRSMFVSQLIGTTLGCIIAPLTFWLYWTAFDIGNPDGMFKAPYAVIYREMSILGVEGFSALPQHCLAICSVFFVAAILINLLRDVTPKSVSKFIPLPMAMAVPFYIGAYFAIDMFVGTVILFVWERVNRKESEDFAGAIASGLICGDGIWSVPSAILSIMRIDPPMCMYFKPSLTS

SEQ ID NO: 109780 - protein, 77 aa, Oryza sativa
  Clone ID: PAT_MRT4530_13904C.1.pep
MEQRILPCRSPAVAAPLRRRRRGRSEEKGEASSDGEKGGYRLGEGQPTRWTNGLVIGGYRARNAAHPDRLHLVTMAS

SEQ ID NO: 109781 - protein, 107 aa, Oryza sativa
  Clone ID: PAT_MRT4530_13905C.1.pep
KRGFQANLRVSPGLWLKKELGYKSKGGQKKEGIYGALFTFKKETKRTKGPRGLFWQGIYHVRVAFWLAGGLTLVAPFTVGVARGGAGVTGPGAKFWGTNKGPFGLML

SEQ ID NO: 109782 - protein, 140 aa, Oryza sativa
  unsure (1)..(140): unsure at all Xaa locations
  Clone ID: PAT_MRT4530_13906C.1.pep
EPPATEPPRPPRTXPLPTPSPPPPHGHGPKHQTPPPTPPXPPQPTDQPPPPRRFPWTTYSPPPTPPPPPTNQLSPLPPTDQPPPPPKDHLAATCHESELNRDDPYAKRQHYPSTPLTIPIPSHGQICTWRYRIISTVRSS

SEQ ID NO: 109783 - protein, 91 aa, Oryza sativa
  Clone ID: PAT_MRT4530_13907C.1.pep
MEAHRRPNDGGATETGNGVTKASGGGSTAYGATAIRARGVRRGCKPATEGRAPPLAVVDAEYLCPPLKPVAVRSCCLRCGRRGIVKPGAAR

SEQ ID NO: 109784 - protein, 173 aa, Oryza sativa
  unsure (1)..(173): unsure at all Xaa locations
  Clone ID: PAT_MRT4530_13908C.1.pep
MSYTKTDLEGVPDKKRQPEFYMETTRTTRIVSILVSLVLLGQGDTYGYKYKAPXEERGYGQSTPTTINIDATXQYKPTYAKTRRRISTSGISTASPLRCLRILSGETKALSLISPGMDSRRKTTLSSTTSQTFRPPXRQQLDRLPQVLYCLAYTLVPTIPIPCKYRNRDIKRR

SEQ ID NO: 109785 - protein, 150 aa, Oryza sativa
  unsure (1)..(150): unsure at all Xaa locations
  Clone ID: PAT_MRT4530_13909C.1.pep
MKTTRTTRIVSILVFLVLLGQGDTYRYKYKTPXEERGYGQHGTIEATIXRSTYKPTYAKARRQISTSKIGTASPLRCLWIQSGETKALSLISPGTDSRRKSTLLSTTSQTFRPPCRQQLDRLPQILYCLAHILVPTIPILCKYRNHDIKR

SEQ ID NO: 109786 - protein, 73 aa, Oryza sativa
  Clone ID: PAT_MRT4530_1390C.1.pep
AEGQTDKAKEIFMNSRWKDYSPDEIVWKVIIDGLIKKGHSDISREMIIMLERMNCRPSHQTYAMLTEELPDRE

SEQ ID NO: 109787 - protein, 150 aa, Oryza sativa
  Clone ID: PAT_MRT4530_13910C.1.pep
MSYTETDLEGVPDKERQPEFYMKTTRTTRIVSILVSLVLLRQGDTYRYKYKPPRRTAGHPPWGDQHRQSTTSINTQHVTRDNIQAYIRQDKTPDIDFRDKHGYSLTVSQDTVRRDEGAISDLAGHGFEEEDYPVVDYESDLQTAMSTTVR

SEQ ID NO: 109788 - protein, 279 aa, Oryza sativa
  Clone ID: PAT_MRT4530_13911C.1.pep
MAAARHRGGGTHAARVRLVVLLLLSMGRLPRAAAVGLGGGLGELMTKVPFSPGDVLPVLPRQVSWPVMNTLHSAVDLLPSFVAAVAPGAAPSDAAWSGACFARNEAALELTPGDRNGTELSGAVLRLKTASAKSWTCMDLYVFATPYRITWDYYFAAREHTLEIKSWEEEAELEYVKQHGISVFLMPSGMLGTLLSLIDVLPLFSNTGWGQHSNLAFLEKHMGASFEKRSQPWVTTIRKEDIHSGDFLALSKIRGRWGAFDSLENVVTGAFAGHTAVCL

SEQ ID NO: 109789 - protein, 156 aa, Oryza sativa
  unsure (1)..(156): unsure at all Xaa locations
  Clone ID: PAT_MRT4530_13912C.1.pep
METTRTTRIVSILVSLVLLGQGGTYGYKYKIPXEERGDNQHTXTIDQYTRSTYKPTYAKTRRRISSLEIGTASPLRCLRILIGETXALSLISPGTNSRRKTTLLSTTSQSFRPPCRQRLDRRPQILYCLAYILVPTIPILCKYRNRDIKRRQWRAR

SEQ ID NO: 109790 - protein, 158 aa, Oryza sativa
  unsure (1)..(158): unsure at all Xaa locations
  Clone ID: PAT_MRT4530_13913C.1.pep
METTRTIRIISILVSLSLVLLGQRDTYGYKYKTPXEERGHNQHTXTTEATTYKPTFAKTRRRISTSKIGMASPLRCLRIPSGEIXALSLISPDADSKRKATLLSTTSQTFRPPCRTLXKLPQILYCLAYILVPTISILCKYRNRDIKYPHLHFQNFCC

SEQ ID NO: 109791 - protein, 169 aa, Oryza sativa
  unsure (1)..(169): unsure at all Xaa locations
  Clone ID: PAT_MRT4530_13915C.1.pep
MEMTRTTRIVSILVSLVLLGXGDTYGYKYKAPLRGEGRRPPQWTPTTINIHGTTEATTYKPTYAKTSRRISTSEICLXGPIRYLHXAGRRDLALFLISPGTNSRRXTTLLSTTSXTFRPPCRQQLDRLPQILYCLVYILVPTIPILYKYRNLDIKRRHIGSPILLDHQT

SEQ ID NO: 109792 - protein, 158 aa, Oryza sativa
  unsure (1)..(158): unsure at all Xaa locations
  Clone ID: PAT_MRT4530_13917C.1.pep
METTRTTQIVSILVFLVLLGQGDTYGYKYKAPXEERGHETIDQDIRSTYKPTYAKTRRRISTSEISMASPLQRLRILSGETXAMSLISLDADSRRKATLLSTMSQHFRPPCRQXLDRLPQILYYLAYIIIPTILILCKYRNRDIKRRQISSNTVYPRV

SEQ ID NO: 109793 - protein, 112 aa, Oryza sativa
  unsure (1)..(112): unsure at all Xaa locations
  Clone ID: PAT_MRT4530_13918C.1.pep
GQPWSMVRTITMLREDQRFSAVRIPCEKVTRVKILVCQLRSTMGIGTTLREELRSRXLRIPDDEVEYXMAHGGWTPCGRDLHNGLHDVCAASVFTKKIGRRIRDYGCYSSMQ

SEQ ID NO: 109794 - protein, 145 aa, Oryza sativa
  unsure (1)..(145): unsure at all Xaa locations
  Clone ID: PAT_MRT4530_13919C.1.pep
METTRTTRIVSILVSLVLLXKGTYGYKYKAPXEERGHETIDQDTRSTYKPTCAKTRRRISTSEIGMANPLRCLRILSGETXALSLISSGTDSRRKSTLSSTTSQTFRPPCRQQLDRLPQILYCLAHILVPTIPILCKYRNHDIKR

SEQ ID NO: 109795 - protein, 147 aa, Oryza sativa
  Clone ID: PAT_MRT4530_1391C.1.pep
LDGAVMEILSRSLQSMPASPDVSAYFSGDRGGGAGATRAAVVAASSRMRSRRGRGIREGRKLRRLLPCMLDLAAASCRHCRRRRCRRRRFFLDGKPMREGKRGGRREDVGDGCYLARSTSSSPGHPRGRRRFSRGRRSGSDEKQRLV

SEQ ID NO: 109796 - protein, 158 aa, Oryza sativa
  unsure (1)..(158): unsure at all Xaa locations
  Clone ID: PAT_MRT4530_13920C.1.pep
MKTIRTTWIVSILISLILLGXGDTYGYKYKAPXEERGYETIDQGTRSTYKSTCAKTRCRRSTSEISMASPLRCLRILSGETXALSLISPGTDSRRKTTLLSTTXDXFRSPSRQQLDRLPQILYCLAYILVPTIPILCKYQNRDIKRQHSCHTTLNGSV

SEQ ID NO: 109797 - protein, 161 aa, Oryza sativa
  unsure (1)..(161): unsure at all Xaa locations
  Clone ID: PAT_MRT4530_13921C.1.pep
YFSPPSRQQLDRLPQILYCLAYILVPTIPVPCKYRNRDIKRRQWRASMSPDEIGTIVINNSISRDRPNLKIRGVPKDVRSYDVKQVRGKIHPACIYKESIFQEQLSTXVGCGRVHCIIKNVLDKCRVVAPNQPTKTDDLSHXTGHGWTTREKHLNRSVLFV

SEQ ID NO: 109798 - protein, 72 aa, Oryza sativa
  Clone ID: PAT_MRT4530_13922C.1.pep
MPPQSTPNFSKDLIVIIDYYTAIDWINDTVIFIKPCLFGYAYSAAVDAQLRHHNRLSLLPPIVIIADCIHHR

SEQ ID NO: 109799 - protein, 58 aa, Oryza sativa
  Clone ID: PAT_MRT4530_13923C.1.pep
TLSRSARESPSHCSRCPLCTLGLAHTAANPSRGVGPCHQTTPSLSRARACSTVLLRPS

SEQ ID NO: 109800 - protein, 64 aa, Oryza sativa
  Clone ID: PAT_MRT4530_13924C.1.pep
MLQAPNNLAKLSTAKTWVTRVGDLDYCRRLWRESPVFLRPAHPFFSGDGGGGRTRSGFPTRPDY

SEQ ID NO: 109801 - protein, 149 aa, Oryza sativa
  Clone ID: PAT_MRT4530_13925C.1.pep
MATCLGGAIRDGEARLGDGDARGQCTPRCSHLLDPAGGPPIPDPEASWGTAATAAACSGEGRRSSVALPSPCGSSDVVGREAAEVAWRRRPERRAGAVSSWKRNSPSLPLPSKTLVVAVAGRESGDGERRQRLGPRRSSGGWCSSGWRR

SEQ ID NO: 109802 - protein, 65 aa, Oryza sativa
  unsure (1)..(65): unsure at all Xaa locations
  Clone ID: PAT_MRT4530_13926C.1.pep
YLCGYTTLIWVIXWCGPVLLIXTGTIIAFCIPRQREQRSSDLXTYVRINYRQSRRVGHASXXPWI

SEQ ID NO: 109803 - protein, 80 aa, Oryza sativa
  Clone ID: PAT_MRT4530_13927C.1.pep
MAPPSLARRGCVPPYPARIPVERCSTRGGDGDLSKEHARRRSRAGTAGREAARGPSPRVRARLLLRRGDTKVAAGHHALR

SEQ ID NO: 109804 - protein, 79 aa, Oryza sativa
  Clone ID: PAT_MRT4530_13928C.1.pep
MAAGDAATPLLVLETAYQYHEGCPACAVERSKAVNPGIPYMRFFHIWIIILVSCHAVLRPSKMAVSSARPSGPGPYGHL

SEQ ID NO: 109805 - protein, 145 aa, Oryza sativa
  Clone ID: PAT_MRT4530_13929C.1.pep
FTPSLSSSGGHQGSASLANGGGGGLSARRKSVSVASALSASLGQRLEVIVEPDSPGRRSEGSLSSSFRRKVVRLRSVGCGSRSFLGDFLELLSTGFSDCVLRRVESHCEPKPKSSVGALVHLGGSHFVAGNLSSPAMASSCFGFS

SEQ ID NO: 109806 - protein, 455 aa, Oryza sativa
  unsure (1)..(455): unsure at all Xaa locations
  Clone ID: PAT_MRT4530_1392C.1.pep
MGKKGWIGCGGGGRNANILPLWTVTDLTGNQLNGTIPPGLLKRIQDGFLNLRYGNNPNLCTNGNSCQPPKNKSKLAIYIVVPIVLVLAIVSVTTLLYCLLRRKKQGSMNNSVKRQNETMRYGPTNNGSGHNSSLRLENRWFTYNELEKITNKFQRVLGQGGFGKVYDGFLEDGTEVAVKVRTESSNQGDKEFLVEAQILTRIHHKNLVSMIGYCKDEKYMALVYEYMSEGTLQEHIAGKGNDGXILNLEREASNCAGICSRARGTNILLNTRLEAKIADFGLSKVFNPENGTHVSTNKLVGTPGYVDPEEILIVRLIGTDQMRRYQSTMQPTTKSDVYSFGVVLLELVTGKPAILRDPEPISIIHWAQQRLARGNIEGVVNASMHGDYDVNGLWKVADIALKCTALSSAHRPTMTDVVAQLQECLELEDKHQVSDINNGFYNGNSGDLNSNFYTT

SEQ ID NO: 109807 - protein, 120 aa, Oryza sativa
  Clone ID: PAT_MRT4530_13930C.1.pep
MGTQDRNGAALPFHGTGSPAGWLCDTASLPQPRRAVAWSRINQGTASGADGQEQGGCAAMMRGTEPVTQRRVAGPPSSEAMRGGAARLSCATAGPTEWKSGTASIPYPHYAEEELDNSRI

SEQ ID NO: 109808 - protein, 598 aa, Oryza sativa
  unsure (1)..(598): unsure at all Xaa locations
  Clone ID: PAT_MRT4530_13931C.1.pep
MGTYKCCLIFKRRFRWNDAPPPDDVRALFANHSAGGGPHMAADGLRAYLQATGXTATWTWSGWWSRSGSCRGAAGASRGWGGHSHSXTVDDFHRFLFSHELNPPIRHGQGQVHHDMAAPLSHYFIYTGHNSYLTGNQLSSDCSDLPIIRALQRGVRVIELDMWPNSSKDDISILHGRTLTTPVSLLKCLLSIKQHAFEASPYPVIITLEDHLTPDLQDKAAKMVLEVFGDILYYPDKDHLKEFPSPQDLKGRVLLSTKPPKEYLQAKDGNAATIKEDAKAAATDDAAWGKEVPDIHSQIHSATKHDQREDDDDTDEDEDDEEEEQKMQQHLAPQYKHLITIKAGKPKGTLLDALQSDPEKVRRLSLSEQQLAKLADHHGTEIVRFTQRNLLRIYPKGTRVTSSNYNPFLGWVHGAQMVAFNMQGYGRALWLMHGFYKANGGCGYVKKPDFLMQTDPEVFDPKKSLSPKKTLKVKVYMGDGWRMDFTQTHFDQYSPPDFYARVGIAGVPADSVMKRTRAIEDNWVPVWEEDFTFKLTVPEIALLRVEVHEYDMSEKDDFGGQTVLPVSDLIPGIRAVALHDRKGIKLNNVKLLMRFEFE

SEQ ID NO: 109809 - protein, 103 aa, Oryza sativa
  Clone ID: PAT_MRT4530_13932C.1.pep
MAIYCVDNVGLGMAPPTMKVLREPLASAAAHPVAAATAISSSTIRRGAMLPLFFFFLWSAARSANTMMIMVTSWAVTPAAAARSHQNVSHEGFLWRMRTAWNS

SEQ ID NO: 109810 - protein, 615 aa, Oryza sativa
  unsure (1)..(615): unsure at all Xaa locations
  Clone ID: PAT_MRT4530_13933C.1.pep
MGTYKCCLIFKRRFRWNDAPPPDDVRALFANHSAGGGPHMAADGLRAYLQATGXTATWTWSGWWSRSGSCRGAAGASRGWGGHSHSXTVDDFHRFLFSHELNPPIRHGQGQVHHDMAAPLSHYFIYTGHNSYLTGNQLSSDCSDLPIIRALQRGVRVIELDMWPNSSKDDISILHGRTLTTPVSLLKCLLSIKQHAFEASPYPVIITLEDHLTPDLQDKAAKMVLEVFGDILYYPDKDHLKEFPSPQDLKGRVLLSTKPPREYLQAKDGNAATIKEDAKAAATDDAAWGKEVPDIHSQIHSATKHDQREDDDDTDEDEDDEEEEQKMQQHLAPQYKHLITIKAGKPKGTLLDALQSDPEKVRRLSLSEQQLAKLADHHGTEIVRPSLANSAEMPNLFGQNRFTQRNLLRIYPKGTRVTSSNYNPFLGWVHGAQMVAFNMQGYGRALWLMHGFYKANGGCGYVKKPDFLMQTDPEVFDPKKSLSPKKTLKVKVYMGDGWRMDFTQTHFDQYSPPDFYARVGIAGVPADSVMKRTRAIEDNWVPVWEEDFTFKLTVPEIALLRVEVHEYDMSEKDDFGGQTVLPVSDLIPGIRAVALHDRKGIKLNNVKLLMRFEFE

SEQ ID NO: 109811 - protein, 99 aa, Oryza sativa
  Clone ID: PAT_MRT4530_13934C.1.pep
VDAGMLRPLPLTLFHELADPRRRQLHGAQHRRGGWCPQGVLSALLFVASLQALSIRPGLVPASVTSQWHAVLLHLVGVCPARQYPQSPPVVSPCIALRQ

SEQ ID NO: 109812 - protein, 147 aa, Oryza sativa
  Clone ID: PAT_MRT4530_13935C.1.pep
MDMYKAKNKQHIKNLTVLLYGADQSKSLRRMKRLYSHGKSSTAGADREWEEDHEWIEHKGVAKLCHIDLKPSRCLGLPSTLEMRRGRRGRRWREDASEGREGAPGDGQDRGELEGQVVVAGEEKRGREEKAAAAQGQGKGREGIGEQ

SEQ ID NO: 109813 - protein, 195 aa, Oryza sativa
  Clone ID: PAT_MRT4530_13936C.1.pep
WASDLSLCQEKEKKKREREEAPARRQLGPSGTVECVGPTQVRFARQVSGTSSHVGIAGAHVQFNPPRCSRRTRCTPPIFALTSGPRTVVRVVSLGMGTCSWGADVRDRSSVGPTVSDAWVGPWRVRGALHAHQLADTSNGKGEKEHKERTEWSINSIGGKQKQQILQARRGGKESLILRDHKPSLTIELWYFYTT

SEQ ID NO: 109814 - protein, 117 aa, Oryza sativa
  Clone ID: PAT_MRT4530_13937C.1.pep
MWDPCTGAPAGQPSCAEDRATPIGRSCYYAVYLKGTEKIFFCTVIQPVYSVLSYVKPDLIQGSAKFRQELSLVAELGVPLAGVERCSGTQLALLSPAAVSGRSGAQIQTSPGKRASG

SEQ ID NO: 109815 - protein, 55 aa, Oryza sativa
  Clone ID: PAT_MRT4530_13938C.1.pep
APASSSSSRLSIRCSFSSLAWDTTHCTMTSLPTLPLIRPSLRHACGSGEREQLLD

SEQ ID NO: 109816 - protein, 155 aa, Oryza sativa
  unsure (1)..(155): unsure at all Xaa locations
  Clone ID: PAT_MRT4530_13939C.1.pep
SASPSPPPCRLRSTRPPPPXRRRHCHERRPPELDRHATAPRRRYATRPPPPRAHHAATTPRRGRRVPPPRPHAAGPRRRGRARTPLAPTPXTAPPRRWPRHRSRAPTPPGPHAAGPPRRRRRRARTPPGRPTAPRRRRHCTPLPRAPERDRTRRT

SEQ ID NO: 109817 - protein, 800 aa, Oryza sativa
  Clone ID: PAT_MRT4530_1393C.1.pep
MDPDEAVSRLLSHEAFQEVKSKRDKKKMTGGGAGGGGGGGKGGAAAGPVPAASRKLVQSLKEIVNRPEAEIYAALRDCGMDPDEAILFKRQCGFKVNLRAWYDINQFHSEANNSKHGWSGTPGQLSMADIVKMGRPQVKQSSSKPAVTADKGYTGQYPSLPSTVNQNLKQSASTVSPTNPDQGLHSAQDSIHPKDHNHSAAVNKQAYDNDWLPQDEPPPGNQSALPETSGDQSLYESSLQSSTLVAGVINPHENSHLDENRSAAFSSERHLEHHGGDSEYDDGLLQESSTYLPQKNSHAEDEVEGSNSDVALATENFQGLSLHNEELVPTKLAEDNPAVIIPDHLQVTGSDCVTLSFGSFESGAFSGLLPVPSRSADDNNVELPVIEESVPLDQIDSRDQDYYDSAAVNSSGNENLDTIIGTNMENIDVPSVSQPDVLRQEVLDHSGLQYNLPSDSSAAYANTTQPSTMESSQGNNQAHTLSHLSNLLQANSLHNSLLGSNIAPLRDLDFSLSPLLAAQSMTKYNSAAPTTTGPAISMQETLKPGVFSNAQSTQNLPSTSIATGPPLPQQLVHPYSQPTVPLAPFANMIGYPYLAQNYPAAYLPSAAFQQAYSSNGPFHQSAAAAVPGAMKYNMNVPQFKNNLSATSLQQQPSSVISGYGGFGSSSNLPGNFTLNQNAASASTNLGFDEALSTPYKDPSQYMALQQGDNSAMWLHGAGSRATSALPPSHFYGFQGQSQQGGFRQAQQPQQHSQFGGHGYPAFYHSQSQEHHQNPAEGGLNGFQNAQSQPSHQGWQQHTGY

SEQ ID NO: 109818 - protein, 86 aa, Oryza sativa
  Clone ID: PAT_MRT4530_13940C.1.pep
GNFAPVSVGRHPRWLGGMHSERGLMVAVVHTRKCDSQFFSGQSGLQRPLLLRFHYCPSGCRYLPVPPQWPFDHSYVGPASVSKVPL

SEQ ID NO: 109819 - protein, 94 aa, Oryza sativa
  Clone ID: PAT_MRT4530_13941C.1.pep
KKRERSAATAVPDRDNLRVPSTISDCSSAALSISTQARRRSWQPRGARMHGAAAADFKNHFVMGGNQGHWLPHCQDPMSGGAPGHICYNRKGPH

SEQ ID NO: 109820 - protein, 156 aa, Oryza sativa
  unsure (1)..(156): unsure at all Xaa locations
  Clone ID: PAT_MRT4530_13942C.1.pep
METTRTTRILSILVSLVLLGQGDTYGYKYKNPXEERGTTNRRPPQSTPTTIYWTTYKPTYAKTRRRISTSGTSTASPLWCLRILSGETKALSLISPGTDSRRKTTLLSTTSQTFRPPCRQXLNRLPHILYCLAYILAPAIPILCKYHNCDIKRRHM

SEQ ID NO: 109821 - protein, 65 aa, Oryza sativa
  Clone ID: PAT_MRT4530_13943C.1.pep
AKTSEWNNNHTTIPQKVIQKKLVIKKKQSLKKKKIQQYKIMDVISYVFYYSRKQVSVQAIHKKCW

SEQ ID NO: 109822 - protein, 155 aa, Oryza sativa
  unsure (1)..(155): unsure at all Xaa locations
  Clone ID: PAT_MRT4530_13944C.1.pep
TTRTTRIVSMLVSLVLLGQGDTYGYKYKAPXGERIQTIDTTTTINTHHRRIKTEDQXKPIYAKTRRRISTSGISTASPLRCLQILSGETKALSLISPGTNSRRKSTLLSTTSQTFRPPCRQQLDSLPQILYCLAYTLVPTIPILCKYRNRDIKRR

SEQ ID NO: 109823 - protein, 64 aa, Oryza sativa
  Clone ID: PAT_MRT4530_13945C.1.pep
GLVDTPTRERERIYICKLFFLKEFSATLSAQFSGLPSGSELSRRKMRCSHSATQAPPKILKACV

SEQ ID NO: 109824 - protein, 249 aa, Oryza sativa
  unsure (1)..(249): unsure at all Xaa locations
  Clone ID: PAT_MRT4530_13946C.1.pep
METTRTTRIVSILVSLVLLGQEDTYGYKYKTPXEERGRHKAISQYKPTYTKIRRRISTSGISTARILSGETKALSLISPGTDSRRKTNLLSTTSXTFRSPCQQQLDRLPQILYCLAYILIPTILILCKYRNRDIKRRHLLAPTPSPAAGSREPRRRRLLTPITPSSPAAFXHRRRLLHRRSLPPLHPPRAASTTPVASSLSSRTTSATAAPPSSTPSPSPSPPSSRCPPSSSPPRRASRWQATSSSFSS

SEQ ID NO: 109825 - protein, 55 aa, Oryza sativa
  Clone ID: PAT_MRT4530_13947C.1.pep
GSLPHRVRARRDQRQRDVSPNSIRRHRRGLAMLISEVDIRRLILAHVGLYVDLVS

SEQ ID NO: 109826 - protein, 397 aa, Oryza sativa
  Clone ID: PAT_MRT4530_13948C.1.pep
MAGRWLRAARGMGGRRRRGWSEAPAFAAEQRATLVNVKLKWVKDRALDGAVSRERDLRAAHHLLDVVSARPGHRVSRPELLADSSVRRAFGGVDGVDAFLARYHTLFALRRGGGVSLTDAALDLRRREVDCLVESEPDLVSRLRRLLMLTLPRSLPLHTVDLLRWDLGLPRDYRASILRRYPDHFALDQPEGDERVWLRLLWWDDGLAVSELEKSTAGGGGGDTTCLPFPVSFTKGFGLRSKCINWLKEWQALPYTSPYADPSGLDRRTDVSEKRNVGVFHELLHLTVAKRTERRNVSNMRKLLGMPQKFTKVFERHPGIFYLSRVLGTQTVVLREAYGGGSLLLAKHAHPLATIREEYSAVMRAALPPRRRRSRESDSCSEQDEECVGGEEFELTE

SEQ ID NO: 109827 - protein, 154 aa, Oryza sativa
  unsure (1)..(154): unsure at all Xaa locations
  Clone ID: PAT_MRT4530_13949C.1.pep
STTRIVSILVSLVLLGQGDTYGYKYKTPXEERGHIHHRRHETIDQDTRSTYKPTYAKTRRWISTSGISKASPLRCLRILSGETKALSLISPGTNSRRKTTLLSTTSQTFRPPCQQQLDRLPQILYCLAYTLVPTIPILCKYRNRDIKRRHAPHT

SEQ ID NO: 109828 - protein, 357 aa, Oryza sativa
  Clone ID: PAT_MRT4530_1394C.1.pep
GGGGKGGAAAGPVPAASRKLVQSLKEIVNRPEAEIYAALRDCGMDPDEAVSRLLSQDTFQEVKSKRDKKKEVKEIPEPRSRAASNAASRGVRGGADRGGRNSSFHSSSIDNVASRSISGPGMTSTNSTQKQTIPSSLVNKSVVADGPSVPAQSSSGFQHGWSGTPCQLSMADIVKMGRPQVKQSSSKPAVTADKGYTGQYPSLPSTVNQNLKQSASTVSPTNPDQGLHSAQDSIHPKDHNHSAAVNKQAYDNDWLPQDEPPPGNQSALPETSGDQSLYESSLQSSTLVAGVINPHENSHLDENRSAAFSSERHLEHHGGDSEYDDGLLQESSTYLPQKNSHAEDESEGSNSDVPLAT

SEQ ID NO: 109829 - protein, 248 aa, Oryza sativa
  unsure (1)..(248): unsure at all Xaa locations
  Clone ID: PAT_MRT4530_13950C.1.pep
MKMTRTTRIVSILVSLVLLGQEDTYGYKYKAPXEESEHGTTEATTYKPTYAKTRHXISTSEIGMTSPLRCLRIPSGEIXALSLISPDADSRRKATLLSTTSQTFRPPCRQHLDRLPQILYDLAYILVSMIPILCKYRNRDIKRRQLPPRWSTPRETDDPRLKMMMTNSDGVVVMAAVAGGSEQKGGDDLRLHPRHFAALHRDRGAARRRGSRGTRAQPRPPPAAPLARPSPATNLSLPTISETEIERD

SEQ ID NO: 109830 - protein, 151 aa, Oryza sativa
  unsure (1)..(151): unsure at all Xaa locations
  Clone ID: PAT_MRT4530_13951C.1.pep
METTKTTRIVSILVSLVLLGQGNTYGYKYKAPXGIEGTESTPTTINIDATSQYKPTYAKTRRRISTLEIRLDRPYPVPTEAGHRDLALSLISPGTDSRRKTTLLSTTSQTFRPPCRQQLDRLPQILXCLAYILVPTIPILCKYRNRDIKRR

SEQ ID NO: 109831 - protein, 301 aa, Oryza sativa
  Clone ID: PAT_MRT4530_13952C.1.pep
PPGTSSGPSPSADPGGPPTSSPTASSPTSPTPTPTTPLAAPPTSGPSPTPTPTSWPAPPPPAPSSPPSNTPRLRPPLSSTPTSPAPAPPPPPPPPTHRPRPSAPPSTTCRPPTSSPPSATPLSTPPPSACSTSPGSRPGSPPSPTDGVPLARATTRAAPSPTWSTRLTSMCPPPGMPRTRTPGHSRCRRRHPPKRSAASPSSWTMTMTRLRHTTRTALPPSPSPTSASARRANICRRPTPTWAGLPLSRRRLIRQSHRHPLPLKMMNTRYCQSHCRRMFLHKRSCFLCAGLGWTSSIGYGQ

SEQ ID NO: 109832 - protein, 114 aa, Oryza sativa
  Clone ID: PAT_MRT4530_13953C.1.pep
MGINTSPLGRQGTDTQTHHEMINTITTIGTTTSSTPNTINIQAYIRQDTPPDIDFRDRHGYSPTVSPDTVRRYESAISDLAGHGFEEEDYPVVDYELVNKKQHRLRPTGCRAIT

SEQ ID NO: 109833 - protein, 159 aa, Oryza sativa
  unsure (1)..(159): unsure at all Xaa locations
  Clone ID: PAT_MRT4530_13954C.1.pep
IETTWTARIVSILVSLVLLGXGDIYGYKYKAPXDERGHEQXDQDIRSIYKPTYAKTSRRTSTSEICLDRPYLVPTEASRRDLALSLISLGTNSRRKNTLLSTTSQNFRPPSRQQLDRLPQILYCLAYILVPTIPILCKHRRGSSRVDLQACKLEYSIVS

SEQ ID NO: 109834 - protein, 267 aa, Oryza sativa
  unsure (1)..(267): unsure at all Xaa locations
  Clone ID: PAT_MRT4530_13955C.1.pep
METTRTTRIVSILVSLVLLEHGDTYGYKYKAPXEEMGHGTIDQDTRSTYKPTCAKTRRRISTSEISMASPLWYLWILSGETXALALSLISPDADSRRKATLLSTTSQHFRPPSRQQLDRLPQILYCLAYTLVPTIPIPSKYPIRDYQTXHNSPRRRRRPSSSPPTSRRSSRTSSPAARTSPSSGAPAPARRRRLRCSACTTPRAPSASASAARRRCSARRSPRRARSTAARRGCASLPSPTSSAPSAPTSSTASTCPARRAPRSSAR

SEQ ID NO: 109835 - protein, 79 aa, Oryza sativa
  Clone ID: PAT_MRT4530_13956C.1.pep
MGRRRSDLGGGVGARDLEEAGPGVIRREGWALVVGLRRRGAGSLRPPIMEGGHAVGTMLPGQKQSTSVDETAGWKKLTD

SEQ ID NO: 109836 - protein, 91 aa, Oryza sativa
  unsure (1)..(91): unsure at all Xaa locations
  Clone ID: PAT_MRT4530_13957C.1.pep
IVPHPYVVVKKAQRXGCAYIAFKTNPNSMVTHIAGKSSIFRALPTDVLANAYRISREEVQRLMHGRVDEFGAFTPLQYKGYQDVYNVAESS

SEQ ID NO: 109837 - protein, 79 aa, Oryza sativa
  Clone ID: PAT_MRT4530_13958C.1.pep
CVNQLVLLLLWFIVTIHNITMPSQLDCHVLIKQDVRKLSVCGGLLVTMCFAISIRRILPIEVTSCVLFYSLTNLPIVIQ

SEQ ID NO: 109838 - protein, 578 aa, Oryza sativa
  Clone ID: PAT_MRT4530_13959C.1.pep
MAATAAAAHTLLHLAAPRKPSAGPPLPPATLRLPSRRLARLTASCSSGSGNNSAADFPNPNGILVAPPSAAAVAAASSHIDVDVATEADLRENGFRSTRRTKLVCTVGPATCGADELEALAVGGMNVARVNMCHGDREWHRGVIRAVRRLNEEKGFAVAVMMDTEGSEIHMGDLGGAAAAKAEDGEIWTFSVRSFEAPPPERTIHVNYEGFAEDVRVGDELLVDGGMARFEVVEKLGPDVKCRCTDPGLLLPRANLTFWRDGSIVRERNAMLPTISSKDWLDIDFGISEGVDFIAVSFVKSAEVINHLKSYIAARSRGSDIAVIAKIESIDSLKNLEEIIRASDGAMVARGDMGAQIPLEQVPSVQQKIVKLCRQLNKPVIVASQLLESMIEYPTPTRAEVADVSEAVRQRADALMLSGESAMGRYPEKALSVLRSVSLRIEKWWREEKRHEELELKDVSSSFSDKISEEICISAAKMANKLEVDAVFVYTNTGHMASLLSRCRPDCPIFAFTTSTSVRRRLNLQWGLIPFRLSFSDDMESNLNRTFSLLKARGMIQSGDLVIALSDMLQSIQVMNVP

SEQ ID NO: 109839 - protein, 71 aa, Oryza sativa
  Clone ID: PAT_MRT4530_1395C.1.pep
CARHLERHLMCSHHPRQLSTYACGISARSSMSSFSPVVASGACACMASSSADQFVCDYSGGLVMINSHLFY

SEQ ID NO: 109840 - protein, 82 aa, Oryza sativa
  unsure (1)..(82): unsure at all Xaa locations
  Clone ID: PAT_MRT4530_13960C.1.pep
PVVRRCVNYNLRNERKGRRLRTLQLXLIEGINNGLTMCYLTSFTVEDLMEQIEILLRNXWVHCHEIRLVIFIYRENHISRGY

SEQ ID NO: 109841 - protein, 512 aa, Oryza sativa
  Clone ID: PAT_MRT4530_13961C.1.pep
MRLLRHKPTGCPRLPPSPPLPQAPPAGYYFTSPSRPEAVRFGRVLLRSPPPPPRPAQAPPSRYFYTSPQRQKVVHFNRRRGSRWYHDPRKLTTVVVVSGGAAAAVYFGNLETVPYTNRTHLILLSPPLERQLGESQFNNLKKELGPKILPPLHPDSIRVRLIASEVVRAVHRGLAGRHHDAFAADDASYGDISTDVVIKNHEAGAEDVMLGRSRGNKNASVAAAAQRDEEVLDDRWVTESRDRGKARGAQPETRHLDGLNWEVIVVRDDLINAMCLPGGKIVVFTGLLNHFKTDAEIATVLGHEVDLGFPGSCVILVGHAIARHAAEMITKNLWFWILQIVIMQFIYMPDMINAMSTLLLKLPFSRRVYVLTRKRWGSWPSQPNKAVPRRYQEATEHGNLTIARHFLAIIVYPEQLWLFDLVIVFVHNWKMEIEADHIGLLVLGAAGYDPRVAPSVYEKLGKIAGDSTLSNYLSTHPSSKKRAQLLRQAKVMDEALRLYREVSSGQGTEGFL

SEQ ID NO: 109842 - protein, 593 aa, Oryza sativa
  Clone ID: PAT_MRT4530_13962C.1.pep
MGNSLASLATPCFADAAAGGGRGRGHHAAGDDAVAFDDDDAAGGCNSIGHILSFDGRDAPAFAIHGVLLPSNPSTMASTGGGGGGGASVLNDGALSIGSSSFDSSNSFSFRTLQPRQYSGPLEYCTTSPSTSGASSSRQLGPRTDKQILNDIYANRQRRRCQGSKGPPLLGRLRKAVASLLRAGPCGFPEQEEPAAMINGVGVVRNGEESISRNVDAAAADDGAERVQWARGKAGEDRVHVVVSEEHGWMFVGIYDGFNGPDATDYLADNLYAAVCRELNGVLSEDEPDPPEAAAAAGRCNGCGGAARHREVLDAMARALRRTEEGYFAEAEARAAECPELAMMGSCVLVVLMKGADVYAMNVGDSRAVLAHQAEPDLSHVVLPRGSHHDGDGDLAGVKEAIKRQFDECEMGELAALQLTMDHSTNVYKEVRRIRSEHLDDPGCITNGRVKGCLKVTRAFGAGYLKEPRWNKALLEVFQVDYVGSSPYISCRPYIRHHRLGAQDKFLILSSDGLYDYFTKEEVVAQVEAFTAGYPDEDPAKYLSHQILLRAANQAGMGFHELLEIQQGDRRQYHDDVSIIIISLEGKIWRSSQ

SEQ ID NO: 109843 - protein, 398 aa, Oryza sativa
  Clone ID: PAT_MRT4530_13963C.1.pep
MSSSSSPPAASAAARLDLDGNPIAPLTICMIGAGGFIGSHLCEKLMAETAHVVYAVDVYCDKIRHLVDPAPPHLHGRISFHRLNIKNDSRLEGLIKMADLTINLAAICTPADYNTRPLDTIYSNFIDALPVVKYCSENNKRLIHFSTCEVYGKTIGSFLPTDHPLRKEPEFYVLKEDESPCIFGPIVKQRWSYACAKQLIERLIFAEGAENGLEFTIVRPFNWIGPRMDFIPGVDGPSEGVPRVLACFSNNLLRREPLKLVDGGQSQRTFVYIKDAIEAVHLMIENPARANGQIFNVGNPNNEVTVRQLAEMMTEVYANVSGEPPLDEPMIDVSSKQFYGEGYDDSDKRIPDMTIINKQLGWNPKTPLKDLLETTLTYQHKTYKEAIKRQMSQASASS

SEQ ID NO: 109844 - protein, 96 aa, Oryza sativa
  Clone ID: PAT_MRT4530_13964C.1.pep
FIQSSFDELEKITTPGDDMNGDMSSLSTLFAHRKTGHFMKGDAVIVIKGDPQTREGWVEKVKAETAHITTQRRDLPKTLAFNEKEICKYTKPGDHV

SEQ ID NO: 109845 - protein, 263 aa, Oryza sativa
  Clone ID: PAT_MRT4530_13965C.1.pep
MPFTYLGLLMGTTRPKVIDFVPLVDRIERRLTSSSMFLPYGGRLTLVNSVLYAIPRYYMCSLQLPITVIEAIDKARKNCLWRGNDPSSKRKSLVTWHKVCRLKEKGGIVLFWDDLWNGQIRSTTYPNLCAHAFTRDESLAITCAKPFEDCFKLPLNQEAYTEFLQLKGELDDLSLASQHGDNWSFIWGMTTYTSKAFYKLKFSSMQPLRPFRWIWKTKCLMKIKVFIWLLFSDRLNKRDMLDRRNCAPLNADLLSHPEVLSQA

SEQ ID NO: 109846 - protein, 62 aa, Oryza sativa
  Clone ID: PAT_MRT4530_13966C.1.pep
MREISSGSSSSLRIGGGCRWSPRGGGCQIWSAGGSGSPDLEPPGSYHCLLHRPSSFTGRLPP

SEQ ID NO: 109847 - protein, 214 aa, Oryza sativa
  Clone ID: PAT_MRT4530_13967C.1.pep
MVTAQYGRLPRSLYSYIQFPGVGYTSVSYFGWRVMTGYRKKLGNPGKAKTEWRSARTLAVRQELCRDADVEAVDFDPDDDDLMDEDVAENMPAPAPRLCYTIAGGGDDGGVERNRVLNMAKCPFSRGELRKWEYGRDATLVGAGRRKRERRWCRVNIPSARRERTTALIGGGGRPTAYGRVEDRSPARGDEAGIPGVEEARMSRLEIHEPEFLS

SEQ ID NO: 109848 - protein, 798 aa, Oryza sativa
  Clone ID: PAT_MRT4530_13968C.1.pep
MASKLSFKRMDSIAETMPDALRQSRYQMKRCFQRYVSKGKRLLKNQQLMEELEKSLDDKVENEKLVEGFLGYIICSTQEAVVLPPFVAFAVRMNPGIWEYVKVHSDDLSVEGITPSEYLKFKETLYDEKWAKDDNSLEVDFGALDLSTPHLTLPSSIGNGLQFVSKFMSSKLGGKPESMKPLLDYLLTLNYRGEKLMINDTIDTVSKLQTALLLAEVFVSGLPKYTPYLKFEQRFQEWGLEKGWGDTAERCKETLNCLSEVLQAPDPTNMEKFFSRVPSIFNIVIFSIHGYFGQEKVLGLPDTGGQVVYILDQVRAMEEELLQRIKQQGLHVTPKILVLTRLIPDAKGTKCNVELEPVENTKYSHILRVPFKTEDGKDLRQWVSRFDIYPYLERYAQNSCAKILDILEGKPDLIIGNYTDGNLVASLLSNKLCVTQGTIAHALEKTKYEDSDVKWREMDQKYHFSCQFTADMISMNTSDFIITSTYQEIAGSKEKPGQYEHHYAFTMPGLCRYATGINVFDPKFNIAAPGADQSIYFPFTQKQKRLTDLHPQIDELLYSKDDTDEHIGYLADRNKPIIFSMARLDKVKNITGLVEWYGQNKKLRDLVNLVVVAGLLDASQSKDREEIEEINKMHNLMDRYQLKGQIRWIKAQTDRVRNGELYRCIADTKGAFVQPALYEAFGLTVIEAMNCGLPTFATNQGGPAEIIIDGVSGFHVNPINGREAGIKIADFFQKCKEDPSYWNKVSTAGLQRIYEWQRLWQEQGINRLGKPQQAWRLKAADSDAKDLNQVSRAEASSF

SEQ ID NO: 109849 - protein, 147 aa, Oryza sativa
  unsure (1)..(147): unsure at all Xaa locations
  Clone ID: PAT_MRT4530_13969C.1.pep
IETIRTTRIVSILVSLVLLGQGDTYGYKYKAPRRRGKNQHTXTTETTTYKPTYAKTRRRISTLEIGMASPLWCLQIPSGEIXALSLISPDANSRRKATLLSTTSQTFRPPCRQQLDRLPQILYCLAYILVPTIPILCKYRNRDIKRR

SEQ ID NO: 109850 - protein, 63 aa, Oryza sativa
  Clone ID: PAT_MRT4530_1396C.1.pep
TTLLQSNRIEPPPPSPSSCQTLASSEGYIGKYVNLTYPLIFFLSHSQHHTFVYRSHYTAHFGP

SEQ ID NO: 109851 - protein, 84 aa, Oryza sativa
  Clone ID: PAT_MRT4530_13970C.1.pep
MEDTHDNQHTPTRSHNIQANIRQDTPPDIDFRDRHGYSPTVSPDTVRRYESAISDLAGHGFEEEDCPVVDYESDLQTDMSTTVR

SEQ ID NO: 109852 - protein, 94 aa, Oryza sativa
  unsure (1)..(94): unsure at all Xaa locations
  Clone ID: PAT_MRT4530_13971C.1.pep
RDAXSVLVAXVXSLGSARNGVGVVSGXGXRPRFAXPXWXXXLXXLAVAPXSSXXGVFFCGSSALPXXLXALXLXXSPASVAWFRFLLVSLLDPT

SEQ ID NO: 109853 - protein, 264 aa, Oryza sativa
  unsure (1)..(264): unsure at all Xaa locations
  Clone ID: PAT_MRT4530_13972C.1.pep
METTKTTRIVSILVXLVLFGQGDTYGYKYKTPXEERGDNQHPRESTPNTIDIEATTXKPTYAKTRRRMSTSGISTASTLRCLQILSGQTKALSLISPGTDSRRKATLLSTTSQIVRPLYRQQLERLPQILYCLAYTLAPTIPILCKYXNNDIKRRHVAGSSRSPPLTRPSPSRVLLLHGGRWSTSPAKRAASDGGDFDDGRRARPRRLRWQRRRRRQQQETVVASTTIDEPGASEAGSSGRPAGARRPPPLPLRAGVASLADDN

SEQ ID NO: 109854 - protein, 159 aa, Oryza sativa
  unsure (1)..(159): unsure at all Xaa locations
  Clone ID: PAT_MRT4530_13973C.1.pep
METTKTARIVSILVSLVLLGQGDTYGYKXKGPLGGEGTQSTSTIEDTXIDQDRRSIYKPTYAKTRRRISTSGISTASPLRCLRILSGETKALSLISPGTDSRRKTTLLLTTSXIFRPPCRQQLYRLPQILYCLAYILVPTIPILCKYRNRDIGYRARIS

SEQ ID NO: 109855 - protein, 56 aa, Oryza sativa
  unsure (1)..(56): unsure at all Xaa locations
  Clone ID: PAT_MRT4530_13974C.1.pep
ELEVRGSGVILRXRGGGGGGVVGXRGEGRXGRXTTSSSIYRSCFEEEATIGDAELE

SEQ ID NO: 109856 - protein, 256 aa, Oryza sativa
  unsure (1)..(256): unsure at all Xaa locations
  Clone ID: PAT_MRT4530_13975C.1.pep
METTRTTRIVSILVSLVLLGQGDTYGYKYKAPXEERGDGTIDQYTRSTYKSTYTKTRRRISTSEISMASPLRCLRILSGETXALSLISPDTDSRRKTTLLSATGWFYXPPSRQQIDRLPQILYCLAYILVPTIPILCKYRNHDIKRRHFLFSPLRLHRGRSPPPRCRIYRTPALSVPQQPAAAASLPFSIPDSQHGGIYCSLSPLSSPTFSKALEATPSRFPPPPDLPLPAAARAIWPAERRPHLREEAPPPPRRC

SEQ ID NO: 109857 - protein, 160 aa, Oryza sativa
  Clone ID: PAT_MRT4530_13976C.1.pep
ATSRSPVAVVTHQLRQSHEMGNQWRWGNQAPRQRAKTARLQWIGSGRYSLLVENGNTGLGSQNFWKLVWISVGSIFFARKTPKFEIGSSRGTLGDASNTQNKPNVGLQFNGERPRSENAFACRPSLARLVESVLLPSGDAALCAAGRREVWRALPSPPHD

SEQ ID NO: 109858 - protein, 57 aa, Oryza sativa
  unsure (1)..(57): unsure at all Xaa locations
  Clone ID: PAT_MRT4530_13977C.1.pep
MRSLRILSXXXXXXXXXXXXAXCLPLPYLCSVQXVPGIPVSHXXLPLPTGXQGSARL

SEQ ID NO: 109859 - protein, 261 aa, Oryza sativa
  unsure (1)..(261): unsure at all Xaa locations
  Clone ID: PAT_MRT4530_13978C.1.pep
MEMTSTTRIVSILVSLVLLRQGDTYGYKYKTPYEERGQSTPTTXTNNRSIYKPTYAKIRRRISTSEIGTASPLRCLRILIGETXALSLISPGTDSRRKTTLLSTTSQTYRPPSRQQLDRLPQILYCLAYILIPTIPIPCKYRNRDIKRRHTAPVRREPPHVPRRARVGGLLGVDGEDAAPGRRIPVVEVVEPARRRVAEDGHGRRHRPRRGGGARQPERRLERGVGAPAPAPRRVDGCAVAAAERVAAEDGDGLLDGHALA

SEQ ID NO: 109860 - protein, 270 aa, Oryza sativa
  Clone ID: PAT_MRT4530_13979C.1.pep
MSSAAGEPSSSSAAAAAISCSSSNDDEKPPPSLEGKELRRVEEEEPAAAARPEKLTEGSSRAAEAEEEEEVVEDEEDDDEEDEGKVAEAIDLGPRVSIKEQLEMDKEDESLRRWKEQLLGSVDLNSVGESLEPDVRITSLCILSPGRPDVLLPLPVEPSNSKEPWFTLKEGSTYRLKFTFSVSSNIVSGLRYTNTVWKAGIRVDKTKEMLGTFSPQLEPYTYVTPEETTPSGVFARGSYSAKTKFVDDDRKCYLEINYTFDIRRDWPCKS

SEQ ID NO: 109861 - protein, 677 aa, Oryza sativa
  Clone ID: PAT_MRT4530_1397C.1.pep
MARPRPRRPAPARSPDPAATTPRQAAPGSRHRTPRRGGRGRLLVQSPSLASARRAAAAAAPLPVAPPPDTPPLRWPAARGGDAVAPCGAGAGAGASVRKIAAALWRVHPPQAPPPTESREAPRRRFEPSPKQPHTPDRCNYYKALLEGRTGSKPLGNDIIQEVGAYSPSPRIEMEVATKWDRRGLNNLRGTDGALCDRYPVSADAEISALKAELLQAHNRIHELEAESRSAKKKLEHPVGSPAEEKASWRSKENDKVRNILDAVKEELNRERKNRQRAEIMNSKLVSELSELKSAAKRYLQDYEKERKARELMEEVCDELAKEIAEDKAEVEALKSESMKMRDEVEEEKKMLQMAEVWREERVQMKLVDAKLTLDSKYSQLSKLQSDLESFLSFHQGNGVNKEALRDGERLREAICSMKFHDIKEFSYKPPPPSEDIFAVFEELRERDDANEKEIGQCNGGTPKRHATKIHTVSPETDIFLEKPLNKYSNQLCDRNEEEDDSGWETVSHVDEQGSSNSPDGSEPSVNGFCGGNDASVSGTDWDDNRSNSEISEVCSTTAEKYRKKGSSFGRLWRSSNGDGHKKTGSELLNGRLSSGRMSNAALSPSLKNGEVCTVSPSVGEWSPDLLNPHVVRAMKGCIEWPRGAQKQNTHNLKSKLLEAKLDGHKVQLRQALKQKI

SEQ ID NO: 109862 - protein, 168 aa, Oryza sativa
  unsure (1)..(168): unsure at all Xaa locations
  Clone ID: PAT_MRT4530_13980C.1.pep
METIRTTRIVSILVSLVLFGQEDTYGYKYKAPXEERGHXNNRSRHKXTYKPTCAKTRRWISTSEISMASPLRCLRILSGETXALSLISSDVDSRRKATXTSQHFRPPDRQQLDRLPQILYCLAYILVPTIPILCKYRNRDIKHRQWGPKTAIQNMSQPNPSPLRQKTI

SEQ ID NO: 109863 - protein, 98 aa, Oryza sativa
  Clone ID: PAT_MRT4530_13981C.1.pep
PRAAPADGGGAVSRMGRSRRGRPPVAFFLFSLKIFLQAGGSTAYENDFCRCRWAFASLYVHALLSPAWKNYFCPPRKMFFLVMNGFPTKKKKKKKKKK

SEQ ID NO: 109864 - protein, 211 aa, Oryza sativa
  Clone ID: PAT_MRT4530_13982C.1.pep
MARWQRRIRRRARATATDPVVGRAAVEGKAAAMATAGEETDLKGVPDKERQPEFYMETTRTTHIVSILVSLVLLGQGGTYGYKYKTPREGPGASNLTADTPTTIYGTTEATTYKLTYAKTRRRISTSGIRTASSLQCLRILSGETKALSLISPGTDSRRKSTLLSTTSQNFRPPCRQQLDRLPQILYCLAYILVPMIPILCKYRNRDIKRR

SEQ ID NO: 109865 - protein, 156 aa, Oryza sativa
  unsure (1)..(156): unsure at all Xaa locations
  Clone ID: PAT_MRT4530_13983C.1.pep
METTRTTWIVSILVSLVLLGQGDTYGYKYKTPKEERGHETINTHGHNQYTRNNRSHNXKPTYAKTRRRISTSGIDTASPQRCLWILLEETKALSLISLGTDXRRKTTLLSTTSQTFRPPYRQQLDRLPQILYCLAYTLVPTIPIPCKYRNRDIKHR

SEQ ID NO: 109866 - protein, 79 aa, Oryza sativa
  unsure (1)..(79): unsure at all Xaa locations
  Clone ID: PAT_MRT4530_13984C.1.pep
NIGHMLKVWSNGIYPPTLHRVVHNSPRHRVSGPFFYESNLDAAIEPXMFSRENTGGVPRYKRCVCGEHLIKKVLNNFIK

SEQ ID NO: 109867 - protein, 149 aa, Oryza sativa
  unsure (1)..(149): unsure at all Xaa locations
  Clone ID: PAT_MRT4530_13985C.1.pep
MEMIRTTRIVFILVSLVLLGQVDTYGYKYKAPXEERGHRTIDQDTRSTYKPTXVKTRRRISTSDISMASPLRCLRILSGETXALSLISPDADSRRKATLLSTTSQHFRPPNRQQLDRLPQILYCLAYTLIPTISIPSKYHSRDIKRRHY

SEQ ID NO: 109868 - protein, 99 aa, Oryza sativa
  Clone ID: PAT_MRT4530_13986C.1.pep
RQRRGRRAGRRQRGRRACPMPPPVPVRRRRHHRARLCYRLRAPWPPPPHLGCRRRASLPSPRALAATAACLGCRRRRPPVESWRWWLLAGLKSPPPPPP

SEQ ID NO: 109869 - protein, 112 aa, Oryza sativa
  unsure (1)..(112): unsure at all Xaa locations
  Clone ID: PAT_MRT4530_13987C.1.pep
GGGKIKXGXAXTXVKXXKGKGVPGXLKXNPGXGWKXXPXXAXXXXKXLKNFKXXIXFKXVFPKXXXWGGGGXPXXAFXKRNXWEGFXFCXGEIXXXIQFLXVSFLXGGVFFY

SEQ ID NO: 109870 - protein, 102 aa, Oryza sativa
  unsure (1)..(102): unsure at all Xaa locations
  Clone ID: PAT_MRT4530_13988C.1.pep
MSLAVLLQRWDGPCLAXLNLDRPHAHPPFCGWGNRDWAGPVCPSXQFLNVNGDGAAPCTLTLGAAGVAVTPTVTVAFAMASPPFPFVLFFSFMVAGVAFPFQ

SEQ ID NO: 109871 - protein, 64 aa, Oryza sativa
  unsure (1)..(64): unsure at all Xaa locations
  Clone ID: PAT_MRT4530_13989C.1.pep
FPDENQAIEKKNRKKNKNITGKPPTPSPPPDPSTGRXRQIPLVVATAARSIRGRXRRHHRHRRD

SEQ ID NO: 109872 - protein, 62 aa, Oryza sativa
  Clone ID: PAT_MRT4530_1398C.1.pep
APRMNIQRDKNGQVCPIHPLFLFNDNPKTKLYITPTVTGHASPCFHCPHTQPANPTPEDQKK

SEQ ID NO: 109873 - protein, 93 aa, Oryza sativa
  Clone ID: PAT_MRT4530_13990C.1.pep
LLIQQSDHLFLLIYVRLLGHLGRLVVEHDQAAPPARKPQPRHPAPGGARSEAGRGTRRRPRRKVQWRAWGGGATGRRTPWRRAELGGGSRASS

SEQ ID NO: 109874 - protein, 196 aa, Oryza sativa
  Clone ID: PAT_MRT4530_13991C.1.pep
MLGRPAPRHYAISPIKPGECATVREPANHDRAHAQSQAPRGGFLARKPRPTRLTCLRKRLSPFLSFFRRRGPNCERPASQSDRTKPNPAQRLRLLPAATVRVRLWRRGAPEPTGETWTMRGSCLRCLMAGVSHDSWPWAHGWIDRSIDGPVCQKKGVTGALDATVAPSAPPVIAPAWWAPGCPLCLKALALAIATY

SEQ ID NO: 109875 - protein, 115 aa, Oryza sativa
  Clone ID: PAT_MRT4530_13992C.1.pep
VSVNLKKVRVSDKNSRLHSYQYQLYPLVNGGSQNYMGDEHQDIGKVIAKLETSKEVVANLKLQTFLRSAFLSEASHINSGEDVGKFLEANIQEGEEMFNYLANHAPVLSSRVDGS

SEQ ID NO: 109876 - protein, 396 aa, Oryza sativa
  unsure (1)..(396): unsure at all Xaa locations
  Clone ID: PAT_MRT4530_13993C.1.pep
MPGSVPLALGLDTAGVQVPWYFRCPISLELMRDPVTVSTGQTYDRASIESWVATGNTTCPVTRSPLDRAFTLIPNHTLRRLIQDWCVAHRSLGVERIPTPKQPADPDLIRSLLAQCPALPPLRKLRALARDSDKNRLVMATHETRAALVDMAFGTNAGGEEVVGRRERVXRLRELLVSEEGAATTTATLECRVNAGAVVEAVAAVSGADARAVLGAAEGVMEGLVALVEEKAHARAVRVGIRGLFALCLAKENRPRAVAAGAAAALARRVAEGGGGAGEPERALAAVERLCRTEGGRDAVVAGAGGGAAAVCALVRAMSGRSAEHAAGALVAVVGGSEPLQVEAVRAGAMSQLLLMVQGGCSERAKRKAQHLLKLLRSAWPAADSIANSDDFLQPY

SEQ ID NO: 109877 - protein, 417 aa, Oryza sativa
  Clone ID: PAT_MRT4530_13994C.1.pep
MPGSVPLALGLDTAGVQVPWYFRCPISLELMRDPVTVSTGQTYDRASIESWVATGNTTCPVTRSPLDRAFTLIPNHTLRRLIQDWCVAHRSLGVERIPTPKQPADPDLIRSLLAQCPALPPLRKLRALARDSDKNRLVMATHETRAALVDMAFGTNAGGEEVEAEAMAVLAMVGLGEAEAVEVVGRRERVARLGELLVSGEGAATTTATLECRVNAGAVVEAVAAVSGADARAVLGAAEGVMEGLVALVEEKAHARAVRVGIRGLFALCLAKENRPRAVAAGAAAALARRVAEGGGGAGEPERALAAVERLCRTEGGRDAVVAGAGGGAAAVCALVRAMSGRSAEHAAGALVAVVGGSEPLQVEAVRAGAMSQLLLMVQGGCSERAKRKAQHLLKLLRSAWPAADSIANSDDFLQPY

SEQ ID NO: 109878 - protein, 58 aa, Oryza sativa
  Clone ID: PAT_MRT4530_13995C.1.pep
MREGGDDSGRDGQGRPWQRQQTRAAMGTAAADEDGELQRRQQLVNHGEKGYGLVVMRV

SEQ ID NO: 109879 - protein, 58 aa, Oryza sativa
  Clone ID: PAT_MRT4530_13996C.1.pep
AGMASRSLKFLSIRSVDCRACFQGAAAKHHRRWMSISAEAGRRDRSPATRRSMQQQKQ

SEQ ID NO: 109880 - protein, 235 aa, Oryza sativa
  Clone ID: PAT_MRT4530_13997C.1.pep
MARGGGGGGGADADLYAVLGLSRECTDADLRLAYRKLAMIWHPDRCSVAGGSASAAGVDEAKERFQEIQGAYSVLSDSNKRFLYDVGVYDGNDGDDDDDEADLSGMGDFLGEMAQMMSQATPAESFEELQQLFVDMFQDDIDAGLCQSTPPPPSWPSPPAAANARSPAAAATSRKGVNKRCSPAAMDMDSGLSSLLGISGFCFEAPWTSQDASTAAGGGGGKRRKQRPPPASHNV

SEQ ID NO: 109881 - protein, 299 aa, Oryza sativa
  unsure (1)..(299): unsure at all Xaa locations
  Clone ID: PAT_MRT4530_13998C.1.pep
FAPRAPXPXTHIPNNSSSQAPHTLTTPHTRSHDHRTPPHTHQIPLPHSPTAPHRHXTLSXSPTSPQPWVVLHQFASPTTPHSVALATPSLSPXAPRPTTSPPPTXPNXXHTTPPPTTPPPQLPPPLRTPPTXTHTAPSPPLYAPXTTQHTPRPSNHTTPHVNIRATXSTISHAHTHPSLGGPNKHPLYXSHRPAENLFAGSVLGNATRPSQRXATGPSLRRPLLNPPTFTPTPHTNAXHPRTPPKMLPNTNGDERNTIYPIVCKRKMGAPFQKFGCGKKPRNLFGNNHNQANKKTSPPK

SEQ ID NO: 109882 - protein, 682 aa, Oryza sativa
  unsure (1)..(682): unsure at all Xaa locations
  Clone ID: PAT_MRT4530_13999C.1.pep
MEVSPVPKPPLEAALALRRSVRCLNRTRRPTYVEQEEPKESAGRRRGGKRKREEEKKEPVAQHAMKPVRMGDAASERKPSSEGKPMPAIAAEPVSCAGFARPAAEDDVLGNGKSAKLRVKETLRAFTSHYLHLVQERMLSDNALVEFQEEQKRAQAVLQEGQKRPSKRPDLKAITKMQESNAVLYPEKIIGELPGVDVGDQFYSRAEMVVLGIHSHWLNGIDYMGMKYQGKEEYANLTFPLATCIVMSGIYEDDLDKADEIIYTGQGGNDLLGNHRQIGSQQLQRGNLALKNSKDNGNPIRVIRGHISKNSYTGKVYTYDGLYKVVDDWVQNGVQGHVVFKYKLKRLEGQPSLTTSEIDYYVWSCFVYSVPFLVTLISCCMTCALLLSRLVCDDISGGQENLPIPATNLVDDPPVPPTGFVYSKSLKIPKGIKIPSYCNGCDCEGDCANNKNCSCAQRNGSDLPYVSHKNIGRLVEPKAIVFECGANCSCNNNCVNRTSQKGLQYRLEVFKTASKGWGVRTWDTILPGAPICEYTGVLRRTEEVDGLLQNNYIFDIDCLQTMKGLDGREKRAGSDMHLPSLHAENDSDPPAPEYCIDAGSIGNFARFINHSCEPNLFVQCVLSSHNDVKLAKVTLFAADTILPLQELSYDYGYVLDSVVGPDGNIVXLPCFCGAPYCRKRLY

SEQ ID NO: 109883 - protein, 92 aa, Oryza sativa
  Clone ID: PAT_MRT4530_1399C.1.pep
MYQFNNKTTTYNSNIYNGSGYTEVKAACCGLGDNNAMFQCTPASSYCANRTSYMFWDIVHPTEITAKRLTKVAFDGSPPLVYPINISQLTAS

SEQ ID NO: 109884 - protein, 148 aa, Oryza sativa
  unsure (1)..(148): unsure at all Xaa locations
  Clone ID: PAT_MRT4530_139C.1.pep
DFLRLDHVEGYHELSSKTRVYFTTAVATWDADFYVKVDDDVHVNLGMLTSRLAKYRTRPRVEGGCMKSGPVLSQKGVKYHEPEYWMFGDEGIKFLRHATGHIYAVSXDLGAYIFINQYPILLRFANDDVSLGAWLIGLEVEHVDHRSM

SEQ ID NO: 109885 - protein, 100 aa, Oryza sativa
  Clone ID: PAT_MRT4530_13C.1.pep
GGPRKGGPGLFNYQQGPRDLTIKKMGPQKEGLHRAPGGNPEAPKSPRRAHAKGKNEDSETEFTFTTSREAKKMAPTRLENRGKFNGFPQGDPKLTGLNLA

SEQ ID NO: 109886 - protein, 91 aa, Oryza sativa
  Clone ID: PAT_MRT4530_14000C.1.pep
EALCLNLMNLFQTFVIHPGCFQLGPPPRHDMPCTCHFFSRVVTHSWGGVTHSQVTADITHRTSQAHAHQRTAHCSGLGTQPSRGGHASPRL

SEQ ID NO: 109887 - protein, 550 aa, Oryza sativa
  Clone ID: PAT_MRT4530_14001C.1.pep
MGNCCVTPEGSGRGRKKQQQEQKQKQKEPKQQQQQQKKGKKPNPFSIEYNRSSAPSGHRLVVLREPTGRDIAARYELGGELGRGEFGVTYLCTERETGDAYACKSISKKKLRTAVDIEDVRREVDIMRHLPKHPNIVTLRDTYEDDNAVHLVMELCEGGELFDRIVARGHYTERAAALVTRTIVEVVQMCHKHGVMHRDLKPENFLFANKKETAALKAIDFGLSVFFTPGERFTEIVGSPYYMAPEVLKRNYGPEVDVWSAGVILYILLCGVPPFWAETEQGVAQAIIRSVIDFKRDPWPRVSDNAKDLVKGMLNPDPRRRLNAQQVLDHPWLQNIKKAPNVNLGETVKARLQQFSVMNKFKKHALRVIAEHLSVEEVAGIKDMFEKMDLNKDNMINFDELKLGLHKLGHQMADADVQILMDAADVDGNGSLDYGEFVALSVHLRKIGNDEHLHKAFAYFDRNQSGYIEIDELRESLADDLGANHEEVINAIIRDVDTDKDGKISYDEFAAMMKAGTDWRKASRQYSRERFTSLSLKLQKDGSLQLTTTQ

SEQ ID NO: 109888 - protein, 103 aa, Oryza sativa
  unsure (1)..(103): unsure at all Xaa locations
  Clone ID: PAT_MRT4530_14002C.1.pep
TLLGVVSIVPWGAKTIFHSLIWKVWXPGKCKFRAWLVIQNRVWTFDWLAIRGWQNNRLCPLCRREGETALHLVVSCRYTKRIWSMLAVWVAYQQLDPREWEAT

SEQ ID NO: 109889 - protein, 267 aa, Oryza sativa
  unsure (1)..(267): unsure at all Xaa locations
  Clone ID: PAT_MRT4530_14003C.1.pep
YNITGDVETVETSTNLHFRGARVWNAIIEDLLAKGMSKAQNALLSGCSAGGLAAILHCDXLRRRKLVNAIGRVVPRSGSIPGGLIALIPAIQPARTVMMIKQFDMKTSVXSSTVLLMSPDLCFFPQNVVPTLRTPLFILNAAYDAWQIKNVLAPSAADKKKTWAKCKLDITACSSSQLTTLQNFRTDFLAALPKPEQSPANLSIFIDSCYAHCQSGSQDTWLAQGSPVVEKTQIGKAVGDWFHDREVSRRIDCPYPCNPTCKNRDDD

SEQ ID NO: 109890 - protein, 522 aa, Oryza sativa
  unsure (1)..(522): unsure at all Xaa locations
  Clone ID: PAT_MRT4530_14004C.1.pep
SDMVHQHDESTANEVSTTTQLPSYGSSEEPRVYKVRCPPXKNFAREFRDTLRETXFHDNPLRQYKDQSGSAXFMMALQFLFPIFEWGRCYNLRKFKGDLIAGLTIASLCIPQNEVDPVKNKEEYLRLAFTATFFAGITQAALGFLRLGFLIEFLSHAAIVGFMGGAAITIALQQLKYVLGIKSFTKKTDIISVMRSVWTSAHHGWNRLTIEFGITFLAFLLLAKYIGKKNRKFFWVPAIAALTSVILAILLVFIVIDNNTSGIHAXKIYTKNLKKRDIQLILANPGSIVMEKLLSSKLNEHIGSNNIFLTVXTLCVSAQESRCKNHEEKXMREQERDDXTILYSICVSSTYDIEEXIHRQISWFSEILVIAYTIGNSCMVNMVFTNVEIGTTIYRNTDQYPEARHIPGVVIVRVDSAIYFSNSNYVRERTLRWLTEEEEKAKAEGQSKINFLIIEMSPVIDIDTSGIHALEDLYKNLKKRDIQERETARLRRTRSRGTGMKVEAVGLGVEGNIGVDKLERRS

SEQ ID NO: 109891 - protein, 168 aa, Oryza sativa
  unsure (1)..(168): unsure at all Xaa locations
  Clone ID: PAT_MRT4530_14005C.1.pep
METTRTTRIVSILVSLILLGQGDTYEYKYNAPXRRRKTPTTIYGTTEATTYKPTCAKTRHRISTSGISTTSPLRCLRILSGEMKALSLISLGTDSRRKTTMXSTTSQTFRPPYRQQLDKLPQILYCLIYILVPTISILYKYRNRDIKHGHMDHQSLHPHRADKSTHKF

SEQ ID NO: 109892 - protein, 111 aa, Oryza sativa
  Clone ID: PAT_MRT4530_14006C.1.pep
QYKPTYAKTRRQISTSGIGTASPLWCLRILSGEMKALSLISSGTDSRRKTTLLSTMSQIFRPPCRQQFDRLPQILYCFAYILAPKIPILSKYHSRDIKHRQYVKQEIHIHM

SEQ ID NO: 109893 - protein, 147 aa, Oryza sativa
  unsure (1)..(147): unsure at all Xaa locations
  Clone ID: PAT_MRT4530_14007C.1.pep
METTSTTRIVSILVSLVLLGQGDTYGYKYKAPXEERGHGTTEATTYKPTYVKTSRRISTSEIXRSNPIRYLQXAGCRDLALSLISLGTNSRRKTTLLSTTGWXSRPPCRQQLDRLPQILYYLAYILVPTIPILCKYRNRNIKCRHIL

SEQ ID NO: 109894 - protein, 150 aa, Oryza sativa
  unsure (1)..(150): unsure at all Xaa locations
  Clone ID: PAT_MRT4530_14008C.1.pep
IETTRTTRIVSILVSLVLLGQEDTYGYKYKTPXRRRGDTHHRRHGTTEATTYKPTYAKTRRRISTSGISMASPLRCLLILSGETKVLSLISPGTDSRRKTTLFSTSSQTFRPPYRQQLDRLPQILYCLAYILVPTIPILCKYRNRDIKRR

SEQ ID NO: 109895 - protein, 42 aa, Oryza sativa
  unsure (1)..(42): unsure at all Xaa locations
  Clone ID: PAT_MRT4530_14009C.1.pep
MGRNRGGKSTRKVPQLVIEIQNRPXTAKPDIRHSPTYKTGHK

SEQ ID NO: 109896 - protein, 84 aa, Oryza sativa
  Clone ID: PAT_MRT4530_1400C.1.pep
LVLHTHDLICMLLCFYGTTLCTYFACVSKHDRSCILTCLYVSRYQCVFSLYSVLCLVCSTFIIAIGTCASVVICSSSLCSGTPL

SEQ ID NO: 109897 - protein, 117 aa, Oryza sativa
  unsure (1)..(117): unsure at all Xaa locations
  Clone ID: PAT_MRT4530_14010C.1.pep
MKTTRTTRIVSILVSLVLLRQRDTYGYKYKVPXEERGHRTIDQDQDQHXKPTCAKTRRRISTSEISIASPLRCLRILSGETXTMSLISPDADSRRKATLLSTTSQHFRPPXRQQLYR

SEQ ID NO: 109898 - protein, 195 aa, Oryza sativa
  unsure (1)..(195): unsure at all Xaa locations
  Clone ID: PAT_MRT4530_14011C.1.pep
METTRTTRIVSILISLVLLGQGDTYGYKYKTPKEERGXTTSINTATIYGTIDQDRRSIXKPTYAKTRRRISTSGISMASTLRCLWILSGETKPLSLISPGTDSRRKATLLSTTSQIVRLPCRQQLDRLPQILYCLAYILAPTIPILCKYQNCDIKRRQCMISTLHWRQVNVAQTRRILAVVVSAAETPPSRASGR

SEQ ID NO: 109899 - protein, 637 aa, Oryza sativa
  unsure (1)..(637): unsure at all Xaa locations
  Clone ID: PAT_MRT4530_14012C.1.pep
MIDIVVVAAVVLVVGHDHPIVAADPDVWFNCGATNYTARSAYESNLERLIAGLAKNASTPSLFGKGAAGAAPDTVYGMALCRGDLPNASACGDCLAGAIRVAPLRFYGHDILNQNSNSTTTTTDAGDAMVLMNTDNISQPMLPGWDPGNADSAAIITYIIKVLVQETARTAAYNXSPPPAGDDDCTPDLRPGGCWRCLQSINDMTTRYFAGRRGGRILGLWCNFRYETYPFYKGQPMRRIGSSGADAVAPAVAANAVASPPGEKHKRRRRRSKVMAMATIFPLLGSFCCVIFCFGLVRRYKKGEVSLQGDMNMQTDEEALAWGREACSSEFTSFKLSQVLDATNNFSEDNKLGKGGFGPVYKGQFSDGSEIAVKRLVASHSGQGFTEFRNEIQLIAKLQHTNLVKLLGCCYQGEEKILIYEYLPNKSLDFFIFDERRRVTLNWNNRLAIIEGIAHGLLYLHKHSRLRVIHRDLKASNILLDCEMNPKISDFGLARIFSSNDKEENTKRIVGTYGYMAPEYASEGLFSIKSDVFSFGVLILEIVSGKRNSGFHQCGDFFTLLGYMMRCINIALLCVQENAADRPTMSDVVVMLSSENMTLPKPNHPAYFHIRVTKEEASTALESPSLNDVTMSILCGR

SEQ ID NO: 109900 - protein, 228 aa, Oryza sativa
  unsure (1)..(228): unsure at all Xaa locations
  Clone ID: PAT_MRT4530_14013C.1.pep
METIMTTRIVSILVSLVLLGQGDTYGYKYKPPXEERGEDXTPNIIDIEATTXKPTYAKTRRRISTSGISTASTLRCLRILSGETKALYLISPGTDSRRNATLLSTTGQIVRPPCRQXLDRLPQILYCRAYILVPTIPIPCKYRSRDIKRRHAAPRAXRSRSPIPPPSCPLHGEPEPPSPLPPLAANRCRSRPSRATPSPPSAPQGRGEPRPPLPIAENSLDVRFPVHR

SEQ ID NO: 109901 - protein, 179 aa, Oryza sativa
  Clone ID: PAT_MRT4530_14014C.1.pep
MIDIVVVAAVVLVVGHDHPIVAADPDVWFNCGATNYTARSAYESNLERLIAGLAKNASTPSLFGKGAAGAAPDTVYGVALCRGDLPNASACGDCVAGASRVARRACPLAEDVVVADDAGCQLRFSGHDILNRSSNSTTTTTNADDAMVLMNTENITQPMLPGWDPGNADSVAIITNIIK

SEQ ID NO: 109902 - protein, 147 aa, Oryza sativa
  unsure (1)..(147): unsure at all Xaa locations
  Clone ID: PAT_MRT4530_14015C.1.pep
MEMIRITRIVSILVSLVLLGQGDTYGYKYKAPXEERGHRTIDXNTRSTYKPTCAKTRRRISTSEISMASPLQCLRILSGETXALSLISPDADSRRKATLLSTTSQNFRPPCRQQLDRLSQILYCLAYILVPTIPILCKYRNRDIKRR

SEQ ID NO: 109903 - protein, 85 aa, Oryza sativa
  Clone ID: PAT_MRT4530_14016C.1.pep
GAHLADVGDAQQQAGGGRPPHLLRRRLHRKTAYYWSTAKARQSSIRLQERFKMVETGSKTCADSKARVCGSSKRLIPTGSKPRTR

SEQ ID NO: 109904 - protein, 201 aa, Oryza sativa
  unsure (1)..(201): unsure at all Xaa locations
  Clone ID: PAT_MRT4530_14017C.1.pep
LAIIGRIAHGLLYLHKHSRLRVIHRDLKASNILLDCEMNPKISDFGLARIFSSNDKEENTKRIVGTYGYMAPEYASEGLFSIKSDVFSFGVLILEIVSGKRNSGFHQCGDFFTLLGYAWQLWKEXRWVELLDASLSTELHAFQMMRCINIALLCVQENAADRPTMSDVVVMLSSENMTLPKPXHPAYFHIRVTKEEASTGL

SEQ ID NO: 109905 - protein, 161 aa, Oryza sativa
  unsure (1)..(161): unsure at all Xaa locations
  Clone ID: PAT_MRT4530_14018C.1.pep
METTRTARIIYILLFLVLLGQGNTYGNKYKAPXEERGHGQSTTTSINXTTIYGIIDQDTRSTYKPTYAKTRRRISTSGISTTSPLRCLWILSGETEALSLISPGTDSRRKTTLLSTTSQNFRPPCRQQLDRLPQILYCLAYILLTTILILCKYQNRDIKRR

SEQ ID NO: 109906 - protein, 131 aa, Oryza sativa
  unsure (1)..(131): unsure at all Xaa locations
  Clone ID: PAT_MRT4530_14019C.1.pep
METTRTTRIVSILVSLVLLRQWDTYGYKYKPPXEDRGTPTTGQSTPNTINXKPTYAKTRRRISTLGISTTSTLRCLRILSGETKALSLISLGTDSRWKATLLSTTSQIVRPPCRQQLDRLPQILYWCDYHE

SEQ ID NO: 109907 - protein, 56 aa, Oryza sativa
  Clone ID: PAT_MRT4530_1401C.1.pep
QCYSPINMSQANFLGSNIFLPRFSRKTHMEEKKPGQPQLSRIFGSILSKGEHGSGP

SEQ ID NO: 109908 - protein, 97 aa, Oryza sativa
  unsure (1)..(97): unsure at all Xaa locations
  Clone ID: PAT_MRT4530_14020C.1.pep
EERGHGTIDQDTRSTYKPTYAKTRRRISTSEIXLASPLWCLRIPSGEIXALALSLISPDADSRRKATLLSTTSQTFRPPCRQQLDRLPQILYWCDYD

SEQ ID NO: 109909 - protein, 478 aa, Oryza sativa
  Clone ID: PAT_MRT4530_14021C.1.pep
MRSRVVLYTWMVRGHLHPMTQLADRIANHGVPVTVAVADVPSSGESRKTVARLSAYYPSVSFQLLPPAAPARSGADTADPDADPFITLLADLRATNAALTAFVRSLPSVEALVIDFFCAYGLDAAAELGVPAYLFFVSCASALASYLHIPVMRSAVSFGQMGRSLLRIPGVHPIPASDLPEVLLLDRDKDQYKATIAFFEQLAKAKSVLVNTFEWLEPRAVKAIRDGIPRPGEPAPRLFCVGPLVGEERGGEEEKQECLRWLDAQPPRSVVFLCFGSASSVPAEQLKEIAVGLERSKHSFLWAVRAPVAADADSTKRLEGRGEAALESLLPEGFLDRTWGRGLVLPSWAPQVEVLRHPATGAFVTHCGWNSTLEAVTAGVPMVCWPMYAEQRMNKVFVVEEMKLGVVMDGYDDDGVVKAEEVETKVRLVMESEQGKQIRERMALAKQMATRAMEIGGSSTASFTDFLGGLKIAMDKDN

SEQ ID NO: 109910 - protein, 53 aa, Oryza sativa
  Clone ID: PAT_MRT4530_14022C.1.pep
CEISVHSIKAPRRLVHVHDLKVSLYCPGLTEHRRTSLYTPSQDITGFRTLYEL

SEQ ID NO: 109911 - protein, 36 aa, Oryza sativa
  Clone ID: PAT_MRT4530_14023C.1.pep
LVGRLAKLSVKHLWRAHDVFCLLPHVFVCYVNWYTN

SEQ ID NO: 109912 - protein, 47 aa, Oryza sativa
  Clone ID: PAT_MRT4530_14024C.1.pep
HYQLHSQAWGCRLVIVGGRMEMQHHSAELFDEFMVSEHNREEHRRSA

SEQ ID NO: 109913 - protein, 172 aa, Oryza sativa
  Clone ID: PAT_MRT4530_14025C.1.pep
MASIPCTFQLSARASSASAAAAARRSPRAAARLGWLRPSRLSAVVPASESGRVGPTCFFKFGNKDAEGAGIYGSQGRDDFDRDDVEQYFNYMGMLAVEGTYDKMEALLNQDIHPVDILLMLAASEGDKPKLEELLRAGAKYDVKDVDGRTALDRAADDTREFILGFAATLAA

SEQ ID NO: 109914 - protein, 89 aa, Oryza sativa
  Clone ID: PAT_MRT4530_14026C.1.pep
PGCDRPPANGTGGNAPTTCPVSGGVGAGEGRRWGPPEDDWPPYFRPKAWAAARPWPIKPVKEAREGACGWNTADRGYDGAEEAHSWYLL

SEQ ID NO: 109915 - protein, 60 aa, Oryza sativa
  Clone ID: PAT_MRT4530_14027C.1.pep
SKEPIISSRFSELIRMTSSVHPHEVVDGERHLLGHDEVEEVGIDEVGGDGIKWDGSHVAV

SEQ ID NO: 109916 - protein, 77 aa, Oryza sativa
  Clone ID: PAT_MRT4530_14028C.1.pep
ELQQREIFYGFRGGNKPGKPKWDIFRGSLLQKLELNHVLGLRGRPGLVQNFGGFGGGLGLGLAEQFGCFGVCRGVWV

SEQ ID NO: 109917 - protein, 108 aa, Oryza sativa
  unsure (1)..(108): unsure at all Xaa locations
  Clone ID: PAT_MRT4530_14029C.1.pep
SRGVLVHFLKISLIAALGTTVAVAPGTTVMGMEALGHRKWRGGGRLDEAAVLRATKPGRRRWRCGWQRMGRAAALRATAPXADGEGVVGKGRGGRWRCGRRGGRRRCR

SEQ ID NO: 109918 - protein, 73 aa, Oryza sativa
  Clone ID: PAT_MRT4530_1402C.1.pep
APRPRTRGRTRGRTRGRRHVSRTLSSWLYLRPCYIINSERCGRRQTLAAPIVRSTTGSWTSLSYQWMQLSLDQ

SEQ ID NO: 109919 - protein, 75 aa, Oryza sativa
  Clone ID: PAT_MRT4530_14030C.1.pep
GTRQGMQKHHAGVAGLNPVRMKASVQALMACNIASRMYTAVRQRERPSSSRDNLARASTRRAACAAPCAFSLPSS

SEQ ID NO: 109920 - protein, 179 aa, Oryza sativa
  unsure (1)..(179): unsure at all Xaa locations
  Clone ID: PAT_MRT4530_14031C.1.pep
SLGAXKGNFRAPKXXWGSKLWASRGTEXFRAFXTXVGGPSXLSPQRGLTSRRPPWXEXILXVLTKHPNPRTFPSXPXGKILGSFRFHPLPNGXEXGXNPFXNPNPXGTPGNKGAXGNLGVENLGVXKRGRSGXXPXGXXXXFSXLFHXXXXGGIPLPXAXXXFLWGXXLVXEXLPPXXX

SEQ ID NO: 109921 - protein, 83 aa, Oryza sativa
  Clone ID: PAT_MRT4530_14032C.1.pep
SRSPRRLRTLTFVQYPWQTVRSGRSIGAMVCFKNGCNTRPGHLRDLQLHKLVAIRRCIYIAEAILQHNIHLCASDTLYMPDSV

SEQ ID NO: 109922 - protein, 97 aa, Oryza sativa
  Clone ID: PAT_MRT4530_14033C.1.pep
VISASLVPSAPLLASDDEFATYFRLSSRRSMPQCLYTSPIGAYIGNISIRCIDLQFKINNGLRMFYFSYRCHCQMFVGDVTDTRAFDLHKCHGGCYL

SEQ ID NO: 109923 - protein, 66 aa, Oryza sativa
  Clone ID: PAT_MRT4530_14034C.1.pep
SKSLVNGDKYQVPLVKTSSTFDLRDLVITCDCTNLLNITSIATKFHFTVYVCDLQRRRIRESAGLG

SEQ ID NO: 109924 - protein, 239 aa, Oryza sativa
  unsure (1)..(239): unsure at all Xaa locations
  Clone ID: PAT_MRT4530_14035C.1.pep
MYMTAGWAQFIEATGLQVQEPAVFRVLSTSKMHFIIFAKDGYLRCPVPDKPRDSEPTRQSFRTSSPQGKATTITSPIQCCIKGKLKHDGTSTSASNNRRTISEMCFCTKDIRLSAEVKNYIKDIAPFLQPSDKFYVTAINATFMKEGRVYLVKEFSKKYIAPLXDEKTAQIXDWNNLHIPLLQDRSPGSNGRCLVKAICIGYNLSSSCYRQVTLPGLSKYLQPVSMFIISALYSLSIDI

SEQ ID NO: 109925 - protein, 153 aa, Oryza sativa
  unsure (1)..(153): unsure at all Xaa locations
  Clone ID: PAT_MRT4530_14036C.1.pep
MKMTRTTRIVSILVFLVLLGQGDTYGYKYKALXEERGYGTIDQDRRSTYKPTYTKTRRQISTSEIGMANPLRCRWLLSGEIXALSLISTDADSRRKTTLLSTTSQYYRPPSRQQLDRLPQILYCLAYILVPTIPILCKYRNRDIKRRHSEPFT

SEQ ID NO: 109926 - protein, 1254 aa, Oryza sativa
  Clone ID: PAT_MRT4530_14037C.1.pep
MASAAGRSARRQATPRVDPRRRRKEVRSEHGVPLLDPLQPLSPWGATYTSASAGDAEMEETDVSPRRPRRNSTSDEEDSSLASLSARLARVIDKNILMSEVVASAVVSEAVSRISTFFIDKHKWKLSEEDGMERLEIAHIRMEAALEISSRWPRVTDASLLRWRKKLKRTSDECSQIMDRCKRRAMEDDEMEQEVRQCAFPKRIAHATKSFISSFTGQKKVDSLITTSTIQRFERFANGAGEFLRFMEFGSIGRINYMPVDPLTGHLRAGKALQYENSHGNQYYLAARPMRFAERGQEAGVLLRYQNHERPEENFILGIMLRLAASTNVTAIVASCLELLPPNFKSVAEAAKQELTQLHQRGFYCFPFVDSTDPEYWSIHHAETHRARPNSACCDCEEHEHHGRSRSSDMVEPSGAFPEPVIKLAVQRYVSTSQRQKQSSSSSSSGFSGNSGPPLLQLTAVFAPHASPEQLLSGAESVTVVAIDGREEQPVHTNVGLHELEELLLPNAVNHLCHEAVDESSAHEVFWRSCHGVAYLCMENVVTEMAGCRPTHWPRSALVRQRRRRGGWWLVAAPQREGRKRGVRAPNHRLMRESYMCRQHVEEEEAEQLVRNSSFPMQIVHATKSLVLSIYNGNIHEPNRSVVRRFEWYADGANDFLRSVEFGGTPCYYLFFDPLVGHVLAGETLDYKLVQGNRDTPEDNFFFGLMLQLSASTYIVGTIIKYVQLKLLGVYASETQFFKIMINMTLKHYHEFSRKRIAVYAVHNLQSYQFKALVSVSTSLVWAAVITKNILMSEVIASAVVGEAVSRISTFLIDNHNRKSSEEDGLERLEMAHIKMEAALEVSSRWPLAMDSSLMRWRKKLKRASDECSHVMDRCKRRAMEDDETEKISRCSFPKRIALATRSFLSSFAADKNVDSLNSTSTIQRFERFADGAGEFLKFMEFGRIGSINYMLVDPLTGHLLAGKALQYESSHGNQYYLISKPMSFAERGQEAGVLLRYNNHERPEENFVLGILLRLTASTNVTGIVARCLDSLLPSFKPVAEAAKQELTQVHHRAFYCFPFVDSTDPEYWSIHHSETHRARPNPACCHGQSRSSDMVELSGTTTFPEQVIKLFVQRHVSARPSSSGHGGDGERRRSSEDSGPPPLLQVTAIFAPHASPEELPPSGSESAAVVAIDGREEPAVRTDIGLREVDEFLLPGAIDRLCHCHDVHGTVDGSSAAAAYEVFWRSGHGVAYLCVEKMGTEMARCRPTQWRE

SEQ ID NO: 109927 - protein, 583 aa, Oryza sativa
  Clone ID: PAT_MRT4530_14038C.1.pep
MGFRDSLCINFMNLDVVADRGWRRPPGGCGQGRTGSAEQRRLGIASQLRRRNSQRNCSCTHSPIATRWPTSTPLRIPLLPTDASNMSNPKAIPQLYTGLATATALSWTVFSSVHNDPMASDVIAPSPWTIFDCKNACLSEKQIDLSLCAIADDGIFFKSNMILMENRKTIGQLGEIASLAPYRTTVVRQVLRFSIKIILFLKKIPDELPDPTLRGRPPCLLAVFSSLSGGGDPARLNGSDVNNDRVWTSDPPPYTQDKDTNEAMKGLGNPCTAVARGFSSPNIFAGNNRRTISEMCFCTKDIRLSAEVKNYIKDIAPFLQPSDKFYVTAINATFMKEGRVMLQLEIGMNPFCDNQQLPDWNNLHIPLLQDRSPGSNGRCLVKAICIGYNLSSSCYRQMHCAQAARQWRAPASSAGKTQIITLPLLQVTLPLLQVCNQDLACCKKTPHAAAYRRLQPPLAIASAVAAPLRCRRWPCEVKGRLVHPAHPAVRRSPSPFVVASFRAGRTLRRAAPPSSSGTSPPAARVVGRSCRRPPPSSRRSWPSVADCRRHIAYRQVTLPGLSKYLQPVSMFIISALYSLSIDI

SEQ ID NO: 109928 - protein, 162 aa, Oryza sativa
  unsure (1)..(162): unsure at all Xaa locations
  Clone ID: PAT_MRT4530_14039C.1.pep
METTRTTRIVSILVSLVLLGQGDTYGYKYKAPXEKRGHGTIDQDIRSTYKQTYAKTRRRISTSKISMASPLQYLRILIGETXALSLISPDADSSRKATLLSTTSQYFRPPSRQQLDRLPQILYCLAYILVPTIPILCKYRNRDIKRRHNLPPQLHLLLPYFQ

SEQ ID NO: 109929 - protein, 180 aa, Oryza sativa
  Clone ID: PAT_MRT4530_1403C.1.pep
MARPAAAVTVLLAVVVLVSVAASLPSAVVGDARFVARTCKRTNHTECVKMLSADRRSARATTVHQLAGIAVDIAAATVKSSAAAVYGKFLENHGQVLELTLLECWWMYDLAAGEAQAAVDAYSSGGAYLDVVRHQLAGYYAGIMCDNMIVRRSKVSPVADIDRTTATHCNIAVDLIGLLY

SEQ ID NO: 109930 - protein, 137 aa, Oryza sativa
  Clone ID: PAT_MRT4530_14040C.1.pep
MARLGIGVAAAAAAVVAATLVVSCLRASPAEAYSGGGLGYSQLLTTAHLGAISSSSCGGRLGRQCSAAVGADGGLLRRALAARKPTNRYVSYSALDANKVPCNKRGQTYYQNCASQQAANPYRRGCSAITRCSRNMN

SEQ ID NO: 109931 - protein, 77 aa, Oryza sativa
  Clone ID: PAT_MRT4530_14041C.1.pep
MKTVVKLLLESINVLRKDCHDGEKLSERQLIKSTGMLTNLKARFWICTGVKQIFQASELHPKGGQLPEHGNFTGIKR

SEQ ID NO: 109932 - protein, 233 aa, Oryza sativa
  unsure (1)..(233): unsure at all Xaa locations
  Clone ID: PAT_MRT4530_14042C.1.pep
MEGVPDKERQPEFYMETTRTTRIVSILVSLVLLGQWDTYGYKYRAPXEERGHNQHTXTIDQDIRSTYKPTYAKTRRRISISEIGMASPLRCLRILSGEIXALSLISPDADSRRKATLLSTTSQYYRPPSRQQLDRLTXILYCLTYILVPTIPILYKYRNRDIKHRHRPPRSAWRRRRRGRRGPGGWGPCNSAPRTRPPPCRPGTGTAAAAGNPSWIDLSLSSPAIDDQQQHIR

SEQ ID NO: 109933 - protein, 144 aa, Oryza sativa
  Clone ID: PAT_MRT4530_14043C.1.pep
MEGVPDKKRQPEFNMKTIRTTRIVSILVSLVLLGQEDTSGYKYKPPRRTGGHTHHETINTITMIGMTTSSTPNTNNIQAYILQDKTPDIDFRDRHGYSPTVSPDTVRRYESAISNLAGLGFEEEGYPVVDYESDLQTAMSTTVR

SEQ ID NO: 109934 - protein, 140 aa, Oryza sativa
  unsure (1)..(140): unsure at all Xaa locations
  Clone ID: PAT_MRT4530_14044C.1.pep
METTRTTRIISILVSLVLLGQGDTYEYKYKAPXEERGHETTYKPTYAKARRRISTSEIGMASPLRXTMATVRRDIALSLISPDADSRRKATLLSTTSQYYRPPSRQQLDRLPQILYCLAYILVPTIPILRKYRNRDIKRR

SEQ ID NO: 109935 - protein, 149 aa, Oryza sativa
  unsure (1)..(149): unsure at all Xaa locations
  Clone ID: PAT_MRT4530_14045C.1.pep
MEAISTTRIVSILVSLVLLGQGDTYGYTYKTPKEERGHRTIDQDTRSTYKPTYAKTSRRISTSEISLVSPHTVPTTTVRRDLAMSLISPNMDSRRKTTLLSITGWFYXPPSRQQLDRLPQILYCLAYILVPTIPILCKYRNCDIKRRHI

SEQ ID NO: 109936 - protein, 89 aa, Oryza sativa
  Clone ID: PAT_MRT4530_14046C.1.pep
MRGPWLVSPSRALQPNPRMRGPRCRAACVVVVAPESSEGAADHLSHPAASGSGMQAKKTRLSVPLASLFQLGEDGGESEVGTGEWELGI

SEQ ID NO: 109937 - protein, 150 aa, Oryza sativa
  unsure (1)..(150): unsure at all Xaa locations
  Clone ID: PAT_MRT4530_14047C.1.pep
VETTRTTRIVSIFVSLVLLRXGDTYGYKYKAPXEERGHGTIDQDTRSIYKPTYAKTRRRISTLEISMASPLRCLRILSGETXALSLISPDADSRRKATLLSTTSQYDRPSSRXXLDRLPQILYCLAYILVLTIPILRKYRNRDINHRQSC

SEQ ID NO: 109938 - protein, 116 aa, Oryza sativa
  Clone ID: PAT_MRT4530_14048C.1.pep
RRPRRRGEKKAPPLRLMIHRSIAPCIRRRRRHDRRPRARVRCGHGRVQLNKSRGFCTYGLSMCTPRIWYVCTYKRIVSSIPIKLSVALCHCVIKSMVSHACVVVYTLTSCLVSSDV

SEQ ID NO: 109939 - protein, 165 aa, Oryza sativa
  unsure (1)..(165): unsure at all Xaa locations
  Clone ID: PAT_MRT4530_14049C.1.pep
MEMTRTTRIVSILVFLVLLGQGNTYGYKYKTPXRRGDNQHTRTIYTIYTHHRRDGTKEATTYKPTYAKTRRQISTSGISTASPLRCLRILSGETKALSLISPSTDSRRKTTLLSTTSQTFRPSCRQQLDMLPQILYCLAYTLVPTIPILCKYRNRDLKRRHNIYF

SEQ ID NO: 109940 - protein, 82 aa, Oryza sativa
  Clone ID: PAT_MRT4530_1404C.1.pep
MKEKGGIMEGSFGRRVLTAGVLITAARGREAHAATRNWHAGIGENSAAVEIGEDSAAVDAPSLLHLRTGGLYPDYGLAWLKE

SEQ ID NO: 109941 - protein, 173 aa, Oryza sativa
  unsure (1)..(173): unsure at all Xaa locations
  Clone ID: PAT_MRT4530_14050C.1.pep
METTRATRXVSILVSLVLLGQGDTYEYKYKPPRRTGGHPPWGDQHRQSTPDRINTQHNQHXKPTYAKTRRRISTSGIGMAIPLRCLRIPSGDTKALSLISSGTDSRRKTTLLSTTSQTFRPTCRQQLDRLPXILYCLTYILAPTIPILSKYRSRDIKRREHCRTAYRPAPTRC

SEQ ID NO: 109942 - protein, 455 aa, Oryza sativa
  Clone ID: PAT_MRT4530_14051C.1.pep
MTSVATRIATLVRAAAAASRPLRLHRRPGGEDTRMVVIVGATGTGKTKLSIDAAKVIGGEVVNADKIQLYDGLDVTTNKVSLADRRGVPHHLLGAIRPEAGELPPSSFRSLAAATAASIAARRLVPVIAGGSNSLIHALLADHFDASAGDPFSPAAAFRHYRPALRFPCCLLWVHVDEALLDEYLDRRVDDMVDAGMVEELREYFATTTAAERAAHSGLGKAIGVPELGDYFAGRKTFSEAIDDIKANTRVLAAAQVSKIRRMSDAWGWPIHRLDASDTVRARLTRAGSAAESASWERDVRGPGLATIRSFLADQSPPPRSEGTNDYLYAMETEPEPPPPPTLPPRLLRLPRMQYCDMVGRICVLFLGEVVIHHIALLLTAALILQSSTFACIIAAVYECQVSWIIASFASGLFCRIAVLDETVKELDIWKLKIVNGFLKITMCLKDWSGYPLGV

SEQ ID NO: 109943 - protein, 126 aa, Oryza sativa
  Clone ID: PAT_MRT4530_14052C.1.pep
MASAVALAHELPEARLGARARLRLGAKLRRRCLHELMRTISCFKLTWSFSSLGVEVDLLRLNILARLGFPVCTLDLTPKAHQLTAMVKQRFAVVPLRLRCYGDALRICEKRNRPNKVFQLGPHAIL

SEQ ID NO: 109944 - protein, 106 aa, Oryza sativa
  Clone ID: PAT_MRT4530_14053C.1.pep
VSVFSCNQLLLLYKRVDKKKLGDVLTMMEKENVKPSLFTYKLLVDTKGAARDIEDMEKVIQAMQADGIEPDLLFQATIAWPPKRVFPELLFKPCVIHLCCLIGQRT

SEQ ID NO: 109945 - protein, 178 aa, Oryza sativa
  unsure (1)..(178): unsure at all Xaa locations
  Clone ID: PAT_MRT4530_14054C.1.pep
SDGASTSNMRRGRRRSISFTPEIGDDIVRTDRNFYLLVYSAVRAMSERMRENRLSRGQMMESPHDFNDNELHVRGPDEQEGSRRQVSNQKAVSLPSSPHRLRSDGSGLRGPAEFLTADLMSTWNKVLRSSPFLNKPLLPFEEWHIEFSEITVGTRVGIGKYMXFFGEVFRGIWNGTDV

SEQ ID NO: 109946 - protein, 688 aa, Oryza sativa
  unsure (1)..(688): unsure at all Xaa locations
  Clone ID: PAT_MRT4530_14055C.1.pep
MDDLPDDQGQSDAHPSDPNWWSSHAEHKLGSISLTKQERNSGSPGSSHCGEGDHSLWAAQTLWCTGCLSSPIPNGFYSIIPDKKLKERFDTIPSPDDLYSLGIEGFKAEIILVDLEKDKKLSAIKQLCAALVKGLKSNPAAMIKKIAGLVSDFYKRPNPQLSPARTSSEEISHFMENRGVQLLGQIRHGSCRPRAILFKVLADAVGMDCKLLVGIPNEEYHEYDDSSKHMSVVVMLKSVEFLVDLMRFPGQLVPFSSKAIITSHISAAGESDSADYDSCDSPLEPNSPLCSQRQEQDDNNRSFKVPSLRNIMLKXQTLWRVNCDAHHTVNQMWPIPSVVAAGGRLWRNIKELLAQVQSTHCLEHGDALXLGDRQHGDGVAVSRSDGASTSNMRRGRRRSISFTPEIGDDIVRTDRNFYLLVYSAVRAMSERMRENRLSRGQNDGSPGQLNDSQKNESPHDFNDNELHVRGPDEQEGSRRQVSNQKAVSLPSSPHRLRSDGSGLRGPAEFLTADLMSTWNKVLRSSPFLNKPLLPFEEWHIEFSEITVGTRVGIGKYMGSLEKFSVPPHLSLVTEYMEMGSLYYLIHASGQKGTPEWMAPELIRNEPFTEKCDIFSLGVIMWELCTLSRPWEGIPSVQIIGWLKNDYAYSTIIHGPLGSLIADCWAEPDKRPGCQEILTRLLDCEYTLC

SEQ ID NO: 109947 - protein, 58 aa, Oryza sativa
  unsure (1)..(58): unsure at all Xaa locations
  Clone ID: PAT_MRT4530_14056C.1.pep
PRAVIRSRPSARALSRAISSSXLSLSLSSRAEQTRLSFXXADTHFSAVSDYVSPCHGS

SEQ ID NO: 109948 - protein, 79 aa, Oryza sativa
  unsure (1)..(79): unsure at all Xaa locations
  Clone ID: PAT_MRT4530_14057C.1.pep
MWDKCCYSDCADKSLRVTKGTIYGVIIDEVLNCHYTEGGDREENGRCKXGLCCFCTDCKCSKRSHINSSNTYASAMHLP

SEQ ID NO: 109949 - protein, 438 aa, Oryza sativa
  Clone ID: PAT_MRT4530_14058C.1.pep
MAGLAAARELRREGLDVTVLEQSADVGGQWLYDAATDGRDPLGMAGVHSSIYSSLRLNSPREVCGFSDFPFRPTNGGGGDARRYPVHGELLRYIREFCDVFGLMDAVRLDTTVVRVAMAPPRRDGSLRWTVRSKHNGDAETEEVFDAVVVATGQYSQPRLPSIDGMDKWRRRQLHSHSYRVPDSFAGEVVVIVGCNLSGKEVALELLRVAKEVHLSSKSTKEAMTPSMSKMLARTAGWCSTTARSSSPTPSSTEGKVTVDDNRVGPLYEHVFPPALAPSLSFVGIPVKVILPRFAEVQARWVAQVLSGRRTLPSPGEMLRAVEEYNRAKEAAGLPKRQTHDLFLDLEYCDEYGERHCGFPRTEQWKKELIWSSISDMCDDIENFRDDYHDSDIVRDGRRLHGWASSPPLAPRPQEKDDDHDKEEDKHLGFGPSKFSLR

SEQ ID NO: 109950 - protein, 72 aa, Oryza sativa
  unsure (1)..(72): unsure at all Xaa locations
  Clone ID: PAT_MRT4530_14059C.1.pep
SRPGSGRRPTSGPTPLXGEGYVALEGSLLHPVSGKEWPLPYLGPDSPRGRATWHRGAASSDYVTPRTNPDRN

SEQ ID NO: 109951 - protein, 76 aa, Oryza sativa
  unsure (1)..(76): unsure at all Xaa locations
  Clone ID: PAT_MRT4530_1405C.1.pep
PGXTHAVRXIPXNKVSTDFGIVHGKLEWKAVTSEVLQQCAKVVLLIIQMVSHCPVVSIFETWRQFVANFGENIIPD

SEQ ID NO: 109952 - protein, 463 aa, Oryza sativa
  unsure (1)..(463): unsure at all Xaa locations
  Clone ID: PAT_MRT4530_14060C.1.pep
MAIGSVESVAVVAVPFPAQGHLNQLMHLSLLLASRGLDVHYAAPPAHLRQARSRLHGWDPDALRSIRFHDLDVPAYESPPPDPTAPPFPSHMMPMIQSFAVAARAPFAALLERISASYSRVVVVYDRLNSFAAAQAARLPNGEAFGLQCVAMSYNIGWLDPENRLVREHGLKFHPVEACMPKEFVEFISREEQDEENATSSGMLMNTSRAIEAEFIDEIAAHPMFKEMKLFAVGPLNPLLDATARTPGQTRHECMDWLDKQPAASVLYVSFGTTSSLRGDQVAELAAALKGSKQRFIWVLRDADRADIFADSGESRHAELLSRFTAETEGVGLVITGWAPQLEILAHGATAAFMSXCGWNSTMESLSHGKPILAWPMHSDQPWDAELVCKYLKAGLLVRPLEKHSEVVPAEAIQEVIEEAMLPEKGMAIRRRAMELGEVVRASVADGGSSRKDLDDFVGYITR

SEQ ID NO: 109953 - protein, 81 aa, Oryza sativa
  unsure (1)..(81): unsure at all Xaa locations
  Clone ID: PAT_MRT4530_14061C.1.pep
RFEHPRHGSIGLLRRKRSSRHRTKDKTLPTDDVTKPCRLTFFVGYKGVMTHFAREVPMPVSKLYKKETXEAVTMIETPTID

SEQ ID NO: 109954 - protein, 82 aa, Oryza sativa
  Clone ID: PAT_MRT4530_14062C.1.pep
RMLSPGHSTGQGNIGRSKWWTRVVLTTRFFLKMSNYLFLSSLALSQFHACMHKRMRANKMHVVLLTKCVHALNLLACSKYFL

SEQ ID NO: 109955 - protein, 202 aa, Oryza sativa
  unsure (1)..(202): unsure at all Xaa locations
  Clone ID: PAT_MRT4530_14063C.1.pep
METTSTTRIVSILVFLVLLGQGDTYGXKYKAPXEERGHNTHPQSTYTEQQKPTYAKTRCQISTSEIGTVNPLRCLRILSGETKALSLISPGTNSRRKTTLLSTTSQTFRPPCRQQLDRLXPQILYCLAYTLVPTIPILCKYRNRDIKRRHYRPQVLLPSQPPPARARRRLSRPPVLLLDPAVAGPDRSQAHRRSVLPFPQPL

SEQ ID NO: 109956 - protein, 149 aa, Oryza sativa
  unsure (1)..(149): unsure at all Xaa locations
  Clone ID: PAT_MRT4530_14064C.1.pep
MKTTNIIRIVSILVSLILLGKGNTYGYKYKTPXEERGDGTIDQDTRSTYKPTCAKTRRRISNSEISMASPLRCLRILSGETXALSLISPDADSRRKATLLSTTSQHFRPPSRQQLDRLPQILYCLAYILVPTIHILCKYRNRDIKRRHI

SEQ ID NO: 109957 - protein, 139 aa, Oryza sativa
  unsure (1)..(139): unsure at all Xaa locations
  Clone ID: PAT_MRT4530_14065C.1.pep
MEMTRTTRIVSILVSLVLIXQGDTYGYKYEXPRRRGRPPQSTPTIDDAXTIDQDRRSTYKPTYTKTRRRISTSEIGTASPLRCLKILIGETXALSLITPGTNSRRNTTLLSTMSQTFRPPYRQQLDRLSQILYWCDYDE

SEQ ID NO: 109958 - protein, 47 aa, Oryza sativa
  Clone ID: PAT_MRT4530_14066C.1.pep
NREKYHQRLSYSNAERQLQSCEQKKKLPGKKTIKPSAFGTTSSLQPG

SEQ ID NO: 109959 - protein, 131 aa, Oryza sativa
  unsure (1)..(131): unsure at all Xaa locations
  Clone ID: PAT_MRT4530_14067C.1.pep
TPPNIDIRDNPRYTQSGAYRGQXEEFSTISDLDEYIFKEKDYPVVNYVLMNXEQHRLRPIEVGLLPDSDXIRGPKLYKNPCLCLFYLNLAYTMLPMIPISCKYRSRDLKCQQMCRVPHPHAGSRLHGKIKR

SEQ ID NO: 109960 - protein, 245 aa, Oryza sativa
  unsure (1)..(245): unsure at all Xaa locations
  Clone ID: PAT_MRT4530_14068C.1.pep
MSQIVRPPYRQQLERLPQILYCLAYTLAPTIPILCKYWNRDIKRRQWRTSTSPDEIGTIVINNSISRDRPSLKIRDVPKDVRSHDIERVRDKIHPACIYKENILQEQLSTRVGCGQVHRIIEDDLDKCRVVVPNLPTKTDDLSHSTGHGWTIXEKWLSYDYYLVLDQRCSDSPITSTSTKLISGKFYSTLSKTPCLYGSTPRLTKASTTNVDKAPSQTLRLLDYSRTVGGSRQGVRNEEMVYPPR

SEQ ID NO: 109961 - protein, 65 aa, Oryza sativa
  unsure (1)..(65): unsure at all Xaa locations
  Clone ID: PAT_MRT4530_14069C.1.pep
LNLGRTHHIPCPIRKQTADRGGVPDKKRQPEFYMETTRTIQIVFILVSLVLLGQXGTYGYKYKTP

SEQ ID NO: 109962 - protein, 464 aa, Oryza sativa
  Clone ID: PAT_MRT4530_1406C.1.pep
MAAGNGSPIGPPPPPLEFRRPVAVQRRVRRSPLPTTSAIDRRLCSITPLLLPPPVPVPAYHLLRSLSAVASATIPDQNHYGLSQGPVTMAEDDGGVGGGDEWSGLDPFFYDEAAARADGERALERQREKERKEAEHQAWREACDAARDKILEYDPKHGCRTYTRLWFCSSILFNLDEESPIGPLCRTVDRGQPPLHRAGDSRLRMSLNVLAVNIVSSDVGYPVLVYGTVIARDVIDRKCLYLFRRTTDNPQLITSKASVRLRFFEVNLKLKEEEDDGDVVVDDREFSKGLIEFRSLSMPRGVEDVVVGSCSTLDSRLSTVELSYAYIGGAVEAAVDVTLRLPAAAGAGRHRRCFHGQITACSSSIPDASIVLYDSSKVNATSNSSAGGAAGDVAVDLARRVMAVRAADELVLTLIAAAGDADCHIIAQMSNSLQGSVVQRALKSASAELSCSSRFPGLHFKQIY

SEQ ID NO: 109963 - protein, 70 aa, Oryza sativa
  Clone ID: PAT_MRT4530_14070C.1.pep
VKTVRKLSRFWTYFRKRNMSVGIFRKRKRIRKYFLRNDKGSFRRNSESVGNFPKIFSEFPKIFSELPEIL

SEQ ID NO: 109964 - protein, 153 aa, Oryza sativa
  unsure (1)..(153): unsure at all Xaa locations
  Clone ID: PAT_MRT4530_14071C.1.pep
MKTKRTTQIVSILVSLILLGQRNTYKHKYKAPXEERGHTHNXIYGTTEATTYKPTYAKTXRRRISTSGISTASPLRCLRILSGETKALSLISPETNSRRKTTLLSTTSQNFRPPYRQQLDRLPQTLYCLAYILVPTIPILYKYXNRDIKRRHI

SEQ ID NO: 109965 - protein, 183 aa, Oryza sativa
  Clone ID: PAT_MRT4530_14072C.1.pep
PDLVSLAKALSSAYVPIGATLVSPEISDVVHSQSNKIGFFAHGFTYSGHPVSCAVALEALKIYRERNIPAHVKQISPRFQEGIKAFAGSSIIGETRGVGLLLATEFANNKSPNDPFPVEWGVAQIFGAECKKRGMLVKVVGDEIAMSPPLIMSQREVDGLVSIYGEALKATEERVAELRSKKK

SEQ ID NO: 109966 - protein, 71 aa, Oryza sativa
  Clone ID: PAT_MRT4530_14073C.1.pep
LLSTWRSEVLTRSRQQGSLTPRIRIRQDQRQRYVSPISIRRHRRGLAMLISEVDIRRLVLTYVSLYIDLVY

SEQ ID NO: 109967 - protein, 70 aa, Oryza sativa
  Clone ID: PAT_MRT4530_14074C.1.pep
MRRGLVRHLGWGDATESYAGARADTTWWRYQAHYTKCKLAATCPLKLQLAPPAVVFQKVKCKLGTADKNY

SEQ ID NO: 109968 - protein, 411 aa, Oryza sativa
  Clone ID: PAT_MRT4530_14075C.1.pep
MGRAVGALVASASASPAPLHALNGLVASIRSPWTSSTRAASTAPLGVRPPPPLPSTPLPRVPDPLRRHATAHEHLEVLKGVTVLKDVSWEVQRGEKVRLVSVNSAGKTTHLRIAAGLEDPDTGNVVKAKKNVRIASLSQEFEVCALLTIREEFLAAFEEEMEVRSRLEKVQAALEGATEDMDLGRLLDELDLLQRRSQDVEVKIQKLMPRLGIEDPDLVLLDELINHVDLDTIVWLESHLKTQEVPMIVETVFGMSKTHKANYSEYVLAKAIWVETQYATWEKQQEEIEQTKELINRLGAGVNAGRVWSEQKINAVDLCISAICHYLLIAKWKRLFPYRTWETVCLLALTHVGIFRLVGWPSVYVKVPTILQVLYAHSPVYLVGIRLCLVGRWIPNTHLPTKPKFTGGPST

SEQ ID NO: 109969 - protein, 147 aa, Oryza sativa
  unsure (1)..(147): unsure at all Xaa locations
  Clone ID: PAT_MRT4530_14076C.1.pep
METTSTTRIVSILVSLVLLGQGDTSGYEYKAPXEERGHGTIDQDTRSTYKPTCAKTRRLISISEISMASPLRCLQILSGETXTMSLISPDADSRRKTTLLSTXDDXFSPLCRQQTDRLPQILYCLAYTLVPTILIPSKYRSRDTKRR

SEQ ID NO: 109970 - protein, 141 aa, Oryza sativa
  unsure (1)..(141): unsure at all Xaa locations
  Clone ID: PAT_MRT4530_14077C.1.pep
SHWDTEECGKELTLGDENMAGERKKGCCPSPPCSAAAHSSNPQGRGAIPPVVGWPPIRSFRRNLTNGSSFKQSPERQNDEADDKXSQSCKKRPLVKINMDGXPIGRESXPFKYTTAYQXLSSAVXGVFPWFXFEAQKIYLV

SEQ ID NO: 109971 - protein, 81 aa, Oryza sativa
  Clone ID: PAT_MRT4530_14078C.1.pep
LINFLLFAGEDKVDKNEQMPTLSRRYTDADTRNEEIYCKYIIFHPNLGKLQLFIFFSPYFLHWWPSLCGAKVSTFLMPDAW

SEQ ID NO: 109972 - protein, 150 aa, Oryza sativa
  unsure (1)..(150): unsure at all Xaa locations
  Clone ID: PAT_MRT4530_14079C.1.pep
METIRTTXIVSILVSLVLLGQGDTYGYKYKTPXKERGDGQYRRHKATSQYKPTYAKTSRRISTSEICLXDPIRYLQXAGHRDLVLSLISSGTDSRRKTTLLSTTXDTPVPLCRQQLDRLPQILYCLAYILVPTIPIPCKYRNRDIKRPHT

SEQ ID NO: 109973 - protein, 476 aa, Oryza sativa
  unsure (1)..(476): unsure at all Xaa locations
  Clone ID: PAT_MRT4530_14080C.1.pep
MLCRRRRVGAAVRWLSRLAPPAPAEADPVVVRVDGSNVARLGKPKPGPRPRQLLSLPPFPGGGDGDPLPGRKRGRRRGXVTAVSWVKHYLADVPQEVVQAHFNKRLVYSECSDHEVSVETIKSQKHHLKKIKHNDVMEPGMRIHLPVSVAEGEIKKRYETIPTATLHPNKDEIEYLRRLVIHKDSAILVLNKPPKVPMKGNLPVHNSMDVLAAAALSYGNEEGPKLVHRLDRESSGLLLFGRTKESFTRLHWLFTSVNLAKTNSQVWNAACEAYMQRYWALVIGTPKEREGIISAPLSKVLLDDGKAERVILAHPSGIDGAQEAVTAYRVMGPTIHGCSWIELRPLTGRKHQLRVHCAEALGTPIVGDYKYGWFVHQRWKQNPQPDFEPFTGEPYKLRRPEGLEIQKGSVLSKVPLLHLHCREMVIPNIAKFLSSNGEWHENGAPWSKEKPNLLRFIAPMPAHMKISWNIMSSYLV

SEQ ID NO: 109974 - protein, 98 aa, Oryza sativa
  Clone ID: PAT_MRT4530_14081C.1.pep
PGCRNSAEAEKACDICGRPMLLEKDVATLLNCKTGNLACSSRNSSGAFHLFHTSCLVHWTILCQYEMLADKIASKGKSNRGRKAKNAPKKITSILCPE

SEQ ID NO: 109975 - protein, 94 aa, Oryza sativa
  Clone ID: PAT_MRT4530_14082C.1.pep
MGEGEDAGQRRRPWRCSPAHGMEWIPVVDSDGGGVDGTARTTANATARLSTAASGDRSGDGGGGEEGDGARAIEGTGKLGKMGKKREGRVGMLK

SEQ ID NO: 109976 - protein, 81 aa, Oryza sativa
  Clone ID: PAT_MRT4530_14083C.1.pep
MSAYDEVEIEDMEWNAELGAYTYPCPCGDLFQITLADLRLGEEIARCPSCSLFLTVVYNEEDFADAKEPPHKPAPRPVAVA

SEQ ID NO: 109977 - protein, 99 aa, Oryza sativa
  Clone ID: PAT_MRT4530_14084C.1.pep
MVVEAIGDPIGGSDTLGGWPGLSVVGGQVRGPGQQWVKIIEDVNGIQSTNAGEACMLDLLARFIRRQGRKGSLRVWWSQEEEVVRIAVSLVYGEPGEGL

SEQ ID NO: 109978 - protein, 271 aa, Oryza sativa
  Clone ID: PAT_MRT4530_14085C.1.pep
MQESRQPRSLASAASHATSPFPALACESPLWPPPCLRSPPGAKLPCLPLPSQPASHHGPAASVQGVDAELADRFHHSALVHRVARPRCRCVPGDWGEVVFPYPDLNWFAPRSEDYFRSAGISSLRALRLGRLPLSPSGADRWGPPVSPFPNLRPPPRAGDSHATRAPPTFSAFPAPHPHTPRLPRVHALTPARAHPPLAAARVAAAPRRRRRRVRVAELHLVHPSSVEFRHRRPPSAVRRVSRSPSAVHRHFPGRRRRRSPSSSPAPANSW

SEQ ID NO: 109979 - protein, 251 aa, Oryza sativa
  Clone ID: PAT_MRT4530_14086C.1.pep
MSTKMKKGILRPFRYISNMMDGKEAAQDMQIGFPTDVKHVAHIGWDGPSVPNNNNNTAGAPSWMKDYHSAPLDSASFRSDRGGSAAANPWASQEIVVDGGSLGDTSFSETRSEASGSMDITAGDSPPSPDSRRSRRHRSRGSAATSSMDCTAADGGAAPEKKDKAKKSSRGKNRKKDKSDKSAAAGAGDDASGATCQDLPAVPKKSNRRKNKGGSEGTGAAAASKADGAGAGGEDAAAPEPPATEEAQDHD

SEQ ID NO: 109980 - protein, 98 aa, Oryza sativa
  Clone ID: PAT_MRT4530_14087C.1.pep
MGPAVAADLAASASRPSRRTGTGAAVTFAPRRTDMAAMLYPRRTHKGIVGSFRYSPGKSPRPVEQPPFDRKGCVELPLFDRISVELAQFDRVAFSIYL

SEQ ID NO: 109981 - protein, 100 aa, Oryza sativa
  Clone ID: PAT_MRT4530_14088C.1.pep
DITYVFTQQLDKKKRSGEVAKSTTCLMVKHQSPPQLHSVDLTDAKMIKLKLSHQIHMVLILHLRISFTTNVHHLPKKVQRKTFILVQTKRITKCCQHPIK

SEQ ID NO: 109982 - protein, 77 aa, Oryza sativa
  Clone ID: PAT_MRT4530_14089C.1.pep
LTSIHSDTQRYAQNRLLPVRPLGVAGQTGGMRPVGPPLVTRTAVVLDQRLGGDFLADASTGDTGSREDNTRLGSGYT

SEQ ID NO: 109983 - protein, 179 aa, Oryza sativa
  Clone ID: PAT_MRT4530_1408C.1.pep
PAGASPLLRVAAVLCRRRRPCLLYSSSPLCGRLSAQSLESTRFGGGNPLRRLPLVSPPPRPADFPPRPGGAVLDSAVRGLPRAQGVDVQPEESHIRRGVEIRVSLYSPPMKEKKKKKKKKRPRSHPVRRLHKSAAADVEREGTESECFAVPAAAMRAKWKKKRMRRLKRKRRKMRQRSK

SEQ ID NO: 109984 - protein, 131 aa, Oryza sativa
  Clone ID: PAT_MRT4530_14090C.1.pep
RLDPFRGPPARLAKASDGAAEKGRRGSRARDGGGRSIAIPATGCKPPRLLPNPALPVPWTPTRSIASSLPRPPSTRSSASSLTRAALPHRHLVAAGEVQHLLPMHAPPCPTADVAVWLPATATTPRPRHLS

SEQ ID NO: 109985 - protein, 43 aa, Oryza sativa
  Clone ID: PAT_MRT4530_14091C.1.pep
MAFISRPAAPGAVPHNSSAEPMSRGFIVRDCTTTDKSRNKKRI

SEQ ID NO: 109986 - protein, 71 aa, Oryza sativa
  Clone ID: PAT_MRT4530_14092C.1.pep
SCLLMHSYEGVMPSPQGHSMFPHGKTSYNGPDPGWVLTLFSQSLAPWFRSAYRSRSSSVCRRFWYPSISFH

SEQ ID NO: 109987 - protein, 109 aa, Oryza sativa
  Clone ID: PAT_MRT4530_14093C.1.pep
MAAWGSFHQGNDAIGLTPGELNRFNSSFLSSDTISISQSYAIRLAIYLQRIQQRGRMNAEEKSSFRTCSWMRRMASITDADDDGCLAIHFVSLRRTRDTFRTACLAIKS

SEQ ID NO: 109988 - protein, 685 aa, Oryza sativa
  Clone ID: PAT_MRT4530_14094C.1.pep
MTRTGVASSAKDEDDEEEDDDKEEAAAPPPNSRRTHTHHETINTITTIGTTTSSTPNTINIQAYIRQDTPPDIDFRDKHGYSPTVSPDTVRRYESAISDLAGHGFEEEGYPVVEYESDLQTAMSTTGRKRMRMSGKDWRDTLNFKMSSSVSVAGLVLALAVNPAHGAKTRHYDFFITETNYTRLCHEKSILTVNGQFPGPTIYARKGDFIIVNVHNNGNKNITIHWHGVDQPRNPWSDGPEFITQCPIRPGGNFTYQVILFEEEGTLWWHAHSDFDRATVHGAIVIHPKRGTTFLFRKLDKEIPVILGNQFCLTMDDTFKVAVQQGNTYLLRVINAGLTNDMFFAIAGHRLTVVGIDARYTKPITVDYIMIAPGQTMDVLLKANRTLGSNSRYYMAARTFITLPVDTIRFNNSTATAIVEYTDSAVARPVGPPEFPVLLPAIKDEDAAMAFVKQLRSLGNQDHPVHVPKQVDEHMLIDIDINFLPCDANNATNKLCEGPQGNRFAASLNNVSFQNPAIDVLDAYYYGSGRGVYEENFPNKLTVIVNPTGDINGGGPLMTKRGTKVKVLEYGTVVEVVFHDLSSENHPMHLHGFAFYVVGRGNGTFDESRDPATYNLVDPPFQNTVSVPRSGWAAIRFRADNPGVWFMHCHFDRHVVWGMDTVFIVKDGKTPQAQMLPRPPNMPQC

SEQ ID NO: 109989 - protein, 375 aa, Oryza sativa
  Clone ID: PAT_MRT4530_14095C.1.pep
MAYPPSSGYPITGSSLQVTPCGALVEQYNELNFRNLYLHHLYLGPNPTQSVMLAADAATGLGATTVNNWPIYDGLGSLVARARGLHVYAGDWHNSFTIVFEDQRSHNIEAYIRQDTPPDIDFRDRHGYSPTVPPDTVRRYESAISDLAGHEFEEEDYPVVDYESDLQTDIRDIKRRQVSVENGEWGIVGGTGQFAMAGGVIQKRVHQRRNDGNIIEITIHGFCPVPRGSQTLPMGPSQQYPMPTYNQSHPTKVGPWGGTGGTPHDIPIAPQRLESITIRHGWTIDSMSFSYTDQTEEATVVHIQLGLSEYVMEVSGTYGAYNSNVVVMSLRVATNLRAYGPFGRAEGTSFTASGRVVGFFGRSGELLDSIGVYTA

SEQ ID NO: 109990 - protein, 238 aa, Oryza sativa
  Clone ID: PAT_MRT4530_14096C.1.pep
SPIVSTDTVRRDIALSLISPDVDSRRKATLLSTTSQHFSSLCRQQLDRLPQILYCLAYILVPTIPILCKYRNRDIKRWQWRARIQPNQIGTIIVIDNLVYRDHPSLKLRGVPKDVRSHDIERVCNKIHPACIYKENIFQEQLNTRVGCSRVHSIIENILDKCGVIAPDLPTKTDDLSHSTGHGWTTREKWSMWSSYDYYLVLDQRCSDSPTTSTPTKLVSSTHYRQVFYPEIPYHDDT

SEQ ID NO: 109991 - protein, 169 aa, Oryza sativa
  unsure (1)..(169): unsure at all Xaa locations
  Clone ID: PAT_MRT4530_14097C.1.pep
METIRTTRIVSILVSLVLLGEGDTYGYKYRAPXEERGGQDNQHPTGSTPDRINTQHNQHXKPTYAKTRRRISTSGIGMAILLRCLRIPSGDMKALSLISPGTDSRRKTTLLSTTSQIVRPPYRQQLDRLPQILYCLAYILAPTIPIPCKYQNCDIKRRHVWFTTIFSHN

SEQ ID NO: 109992 - protein, 68 aa, Oryza sativa
  Clone ID: PAT_MRT4530_14098C.1.pep
LQSFLWAVVSLTLPSKNSMLIPSFKPFLSKWGAPLCGPSNSCCQYCNGQNPHALVVFVLDVFCPGLLL

SEQ ID NO: 109993 - protein, 101 aa, Oryza sativa
  Clone ID: PAT_MRT4530_14099C.1.pep
WTATAGSSAYHGDGGLGGSSARRRRRQREGGRCHSLHNAVSQPHASFFFAQEPVANIGHNFILVGPEVNVACGFLLCQRGRERLNASPNALRVRSTSTTVV

SEQ ID NO: 109994 - protein, 1065 aa, Oryza sativa
  Clone ID: PAT_MRT4530_1409C.1.pep
MAMALASFLLLLLSVFMSIFLHFMAVRGADGEDAAALLAFKAVAVGNGGGNGVLASWNGSAGPCSWEGVACGRHGRVVALSLPGHDLSGTLSPAVGNLTSLRKLDLSYNWLHGGIPASLGQLHRLRELDLSFNTFSGEVPSNLTSCTSLEYLALGSNKLAGHIPSELGNTLTQLQVLGLDNNSFVGHWPASLANLTSLGYLSLRMNSLEGTIPPEFGSNMPRLYFLDICSNNLSGALPSSLYNLSSLMGFDAGNNKLDGSIATDIDEKFPHLQSFAVFNNQFSGEIPSSFSNLTNLTSLQLSMNGFSGFVPHNLGRLNALQNLQLGVNMLEAGDIKGWEFVESLTNCSKLEILVLSNNNFTGQFPISIANLSKTLQKLYLGGSRISGSIPSDFGNLVGLRSLYLFSTDISGVIPESIGKLENLTTLYLNNNSLSGHVPSSVGNLTNLMKLFMQGNNLEGPIPANLGKLKSLNVLDLSRNHFNGSIPKEILELPSISQYLNLSYNSLSGPLPSEVGSLTSLNELILSGNQLSGQIPSSIKNCIVLTVLLLDSNSFQGTIPVFLGDIKGLRVLNLTMNKFSGVIPDALGSIHNLQELYLAYNNLSGPIPAVLQNLTSLSMLDLSFNDLQGEVPKEGIFKNLSYLSLAGNSELCGGISHLNLPPCSMHAVRKRSKGWLRSLKIALASIAVVLFLALVMVIIMLIRRRKPVHRKKGQSLTPVVEEQFERVSYQELSNGTKGFSQNSLLGKGSYGVVYKCTLFDEEIVVAVKVFNLERSGSTRSFLAECDALRSVRHRCLLKIITCCSSINNQGQDFKALVFEFMPNGSLNGWLHPKSDMPIADNTLSLTQRLDIAVDIVDALEYLHIHCQPPIVHCDLKPSNILLAEDMSARVGDFGISRILTESASKTQQNSSNTIGIRGSIGYVAPEYGEGSAVSTLGDVYSLGILLLEMFTGMSPTDDMFRDSLDLHSFSEAAHPDRILEIADPTLWVHVDAEDSITRSRMQECLISVIGLGLSCSKHQPKERMPIQDAALKMHAIRDDAYLMFSGSLSVDMEEETKQISSDLKQQ

SEQ ID NO: 109995 - protein, 122 aa, Oryza sativa
  unsure (1)..(122): unsure at all Xaa locations
  Clone ID: PAT_MRT4530_140C.1.pep
AAAXGYGDXGEXRRXGKAXXRNPXPXXRNHXXRFCAGGGGXMVSRKLSTREFLEPXCPXLAAXPMQXRCDALSVLVRGVVTEEGDRVSRMISEHAAPGXDSXTIAGMASAXTDYGRGNLQHT

SEQ ID NO: 109996 - protein, 61 aa, Oryza sativa
  Clone ID: PAT_MRT4530_14100C.1.pep
EQNPYLWGGIQVNKTQGYNKTRLTSGKKGSNGSCKANFGVDGSQYLYSKKTPMGTFNGAFQ

SEQ ID NO: 109997 - protein, 556 aa, Oryza sativa
  unsure (1)..(556): unsure at all Xaa locations
  Clone ID: PAT_MRT4530_14101C.1.pep
MLRPFPATAHHRCTLLLLLTVTLLPSLAAAAAAHHHHLHDHAAGDGVVISQADYQGLQAIKHDLTDPYAFLRSWNDTGLGACSGAWVGIKCVQGKVVAITLPWRGLAGTLSERIGQLTQLRRLSLHDNAISGPIPTSLGFLPDLRGVYLFNNRFSGAVPASIGNCVALQAFDASNNLLTGAIPPSLANSTKLMRLNLSHNTISGDIPSELAASPSLVFLSLSHNKLSGHIPDTFAGSRAPSSSSLKESITGTYNLAVLELSHNSLDGQIPDSLAGLQKLQVMDLSGNRLNGTIPDRLGSLADLKTLDLSGNALTGEIPASLSNLTTTLQAFNVSNNNLFGQVPLLLAQKFRPSLFAGNIQLCGYFVSVPCPELPSSGPIAPASPKRSESGGKQPTSSKAAGGGAGGAAGGGRGEKPGSGXAKVESGGEVGGKLVHFDGPMAFTADDLLCATAEIMGKSTYGTVYKATLEDGSLVAVKRLREKITKGHKDFESEAAVLGKIRHPNLLPLRAYYLGPKGEKLLVLDFMPNGSLSQFLHGQYSLTHYSSSCAFDLDTIN

SEQ ID NO: 109998 - protein, 792 aa, Oryza sativa
  Clone ID: PAT_MRT4530_14102C.1.pep
MLMLGPFPAHHRCTLFLLLTVTLLPSLAAAAAAHHHHVHAAGDGVVISQADYQGLQAIKHDLSDPYAFLRSWNDTGLGACSGAWVGIKCVQGKVVAITLPWRGLAGTLSERIGQLTQLRRLSLHDNAISGPIPTSLGFLPDLRGVYLFNNRFSGAVPASIGNCVALQAFDASNNLLTGAIPSSLANSTKLMRLNLSHNTISGDIPPELAASPSLVFLSLSHNKLSGHIPDTFAGSKAPSSSSLKESITGTYNLAVLELSHNSLDGPIPESLSGLQKLQVVDLAGNRLNGTIPNKLGSLADLKTLDLSGNALTGEIPASLSNLTTSLQAFNVSNNNLSGAVPASLAQKFGPSAFAGNIQLCGYSASVPCPTSPSPSPSAPASPAQSREATGRHRKFTTKELALIIAGIVVGILLFLALCCMLLCFLTKKRSGSGGKQTTSSKAAGGGAGAAAGGGRGEKPGSGAAEVESGGEVGGKLVHFDGPMAFTADDLLCATAEIMGKSTYGTVYKATLEDGSLVAVKRLREKITKGHKDFESEAAVLGKIRHPNLLPLRAYYLGPKGEKLLVLDFMPNGSLSQFLHARAPNTPISWETRMTIAKGTARGLAFLHDDMTIVHGNLTASNVLLDDHSNPKIADFGLSRLMTTAANSNVLAAAGALGYRAPELSKLKKASAKTDVYSLGVIILELLTGKSPAETTNGMDLPQWVASIVKEEWTSEVFDLELMRDGDNGPAGDELVDTLKLALHCVDQSPSVRPDAREVLRQLEQIRPGPEGGAGPSEEGGAGHVAAASAGNE

SEQ ID NO: 109999 - protein, 67 aa, Oryza sativa
  Clone ID: PAT_MRT4530_14103C.1.pep
MDANCICLFAAAATKSKTVFFILYISLIMQPAATYVFVADQVFIAASFDEAPFLNSDLVSLGHVPFG

SEQ ID NO: 110000 - protein, 94 aa, Oryza sativa
  Clone ID: PAT_MRT4530_14104C.1.pep
MQGMVSAEARGRLVDRGDGLPGWRQTAAVASQDSRWTRLPHMEEKGSGGRRCLLSLGGRMEEDCGRWEKRRNQMKKIDSGKIFQEVEAFAIGIS

SEQ ID NO: 110001 - protein, 82 aa, Oryza sativa
  Clone ID: PAT_MRT4530_14105C.1.pep
MGRRHAGRHAPARHLAPRDGQRRRRRRSTRGRPRPPPPPRRQQRRRRGRPTAGARVVRAAAARRRNGAPQRLRRAGGGARPR

SEQ ID NO: 110002 - protein, 69 aa, Oryza sativa
  Clone ID: PAT_MRT4530_14106C.1.pep
MLIDAYTLFVWRYSAVCHTCKRFSASILDGCLAPLRRRHLPPTYAVSSARPVEIGGGDRQRLRGPQASG

SEQ ID NO: 110003 - protein, 85 aa, Oryza sativa
  Clone ID: PAT_MRT4530_14107C.1.pep
GQGPFCWHGPRNVPPPQAALGRSPGAQAPPCGFPPAGHLVHALALGHGPAHWGPLNSPVGPKNHFSIKAGYYMLETIFALNNDFI

SEQ ID NO: 110004 - protein, 69 aa, Oryza sativa
  unsure (1)..(69): unsure at all Xaa locations
  Clone ID: PAT_MRT4530_14108C.1.pep
ALSETTSFLGSDAWRDEIGRRVGXSGGRFTLRRTGTRAPQSIWDGPXDRLSALCLFLEQTPSXLTGEIP

SEQ ID NO: 110005 - protein, 514 aa, Oryza sativa
  Clone ID: PAT_MRT4530_14109C.1.pep
MDEPTVEEPLLAIRRGGDGEDEAMASTAAAAAAEVKRLLRLAGPLMASFVLRNSVQMVSVMFVGHLGELQLAGSSLAASLANVTGFSFLFGMSSALDTLCGQAYGAGQHRLLGVYAQRAMLVLAAAAVPIALVWASAGEILLLFGQDPAIAAEAGAYARWMIPSLAAYVPLACALRFLQAQGIVVPVMASSGVAAVGHVAVCWALVHKAGMGSKGAALSGAVTYWTNLAVLALYVRLSGACETTWTGFSIDAFRELRRFTELAVPSAMMVCLEWWSFEILVLLSGILPNPQLETSVLSICLSTSSLLFMVPRGIGSSLSTRVSNELGGGHPRAARMAARVAIAMTVLVCLVLVIAMIFLRNVWGNAYSSEEEVVAYIASMLPVLAVSFFIDGINGALSGVLTGCGKQNIGAHVNLAAFYLVGIPTAVLLAFVLHLNGEGLWLGLVCGSISKVGMLLFITLRTDWGKEVRKPSPYKHFGYHGKRKGLQFKSSNSMKNSRNVGVVFSNEDVFNVVL

SEQ ID NO: 110006 - protein, 105 aa, Oryza sativa
  Clone ID: PAT_MRT4530_1410C.1.pep
MEEDFARAVEDGLKLSKRLVLPGGAPSPRPVPGMDRGLLPDAADASSLLPSAPMAYAVVVDPAAVYSLDVPSYQPHVYGRLDPPALIPFHMREGRPLRLLRPPPV

SEQ ID NO: 110007 - protein, 80 aa, Oryza sativa
  Clone ID: PAT_MRT4530_14110C.1.pep
CIPGSSNDDPREPPPPPDHPPPPAEAASISCLLSICISHFVSPVFFQHRAFCNAFLVSSCVMRLRLPTLNKSQHARAQPP

SEQ ID NO: 110008 - protein, 62 aa, Oryza sativa
  Clone ID: PAT_MRT4530_14111C.1.pep
RTVNGARCLFYHSVLVIPCLLSLFSNTIDGVYLLQISLMFSEALPAGLVWTSAARSHVKSYI

SEQ ID NO: 110009 - protein, 75 aa, Oryza sativa
  Clone ID: PAT_MRT4530_14112C.1.pep
LMCTMLSHVYMCISCLGRACKLTYSYFFLSAACLLLIEINAAWFIVICSRSGTNLENIYVLPENCIVNAELEILA

SEQ ID NO: 110010 - protein, 133 aa, Oryza sativa
  Clone ID: PAT_MRT4530_14113C.1.pep
MFSIFATFEDLASAPVDGKAGEDGIKAPPPPADAALSARTVVVAVVGSASSSSPAGVSELAPPPAGGRLLPLATSSRQPPPPVDAAIASRIVVVVGFASSSSPVRIVVSANVSELVAIVPLPVAAPAPATAPV

SEQ ID NO: 110011 - protein, 51 aa, Oryza sativa
  Clone ID: PAT_MRT4530_14114C.1.pep
HLDEHDDARLVRWFLIAAALLFFFFFDNSFSNNFNSLGCHSIAKQPMIIMC

SEQ ID NO: 110012 - protein, 221 aa, Oryza sativa
  Clone ID: PAT_MRT4530_14115C.1.pep
MAEEKGKAVMPMEVDQVEDEREAETVVEAVQKAVYDALEKVEMMEEEGEAAVAEAADKLLEEAVEKAVTEALEEAGWDAAEKALSDDLEKVSLEAESARMITLESSDGEVVKVKEASARLSKTIGNIIDDGRGDEAIPLPDVSYKTLKKVVEYCDKHADEKSDTDEQKEELKNWDKAFIDELAEDDDSLVKVIMASNYLKIDGLHNLASQCKTTREQIGKA

SEQ ID NO: 110013 - protein, 714 aa, Oryza sativa
  Clone ID: PAT_MRT4530_14116C.1.pep
MGAAPSTPRLGAVAGAAASPGAAEQMFAALVGGKAYPISSEFWRQLLELPLTQQWPRDRVLQACHAFAQNNYHTKHLAKILIHLVWCLQECMAESSHAAYRKAINAAYISSIFLKFIIENAKTDNWQELSLEIDKDEKGLENFPSEQSVEYFLMRGVLNYIGSVDVSLESCYLHHELLNLMLVLMSTQLCSGPSPEPKDVHPFIDAAMLQDSSIVSSVVQKLLLNFVKRPRIPLNSSHPAFSDDGGPGVLQRVGSVAANFVLLPYYTFNYLVSSNAEGASSQLADNSLLVLLILIHYRKCITMSESFPSSNVYTSDLNTNVKDAPAFHDNPYYKALSNAKDSQYDRADVEGNAQNGLVVRLSFASLFDALGTCLKDESSVLLLYSLVHGNCDFQEYVLVRTDLDTLLMPILEMLYNASRKTSNQIYMLLIVLLILSQDSTFNASVHKLVLPSVPWYHERLMHQTSLGSLMVVILIRTIKYNLSKLRDVYLHTNCLAILANMAPHVHRLSAYASQRLVSLFDMLSRKYTKLAELKNDKAIKVISDQIEADNISDDTSTELHIYTDFLRIVLEIINAILTYALPRNPEVVYAILHRQEVFQPFKNHPRFNELLENIYTVLDFFNSRMDMQQLDGEWSVDKVLEVINKNCRSWRGEGMKMFTQLRFTYEQESHPEEFFIPYAWRVVLSRGFSFNPGAINLFPVEIHVDDEPSGEQKV

SEQ ID NO: 110014 - protein, 443 aa, Oryza sativa
  Clone ID: PAT_MRT4530_14117C.1.pep
MAAPKPLSPRLAVPLAIALLLALGLVADFLWSSSSSSGTSGRGQLASASRTATAKKSGRARGKKPAAEGYLNATYADIPAPRWDWEEMPAAPVPRLDGYSVQIGDLLYVFAGYENLDHVHSHVDVYNFTSNTWTGRFDMPKEMANSHLGIATDGRYIYALTGQFGPQCRSPINRNFVVDTVTKEWHELPPLPVPRYAPATQLWRGRLHVMGGGKEDRHEPGLEHWSLAVKDGKALENEWRTEIAIPRGGPHRACIVANDKLFVIGGQEGDFMAKPGSPIFKCVRRHEVVYGDVYMLDDGNKWKQLSPLPKPNSHIECAWVIVNNSVIIVGGTTEKHPITKKMILVGEVFRFDLDTLTWSVIGRMPFRIKTALAGYWDGWLYFTSGQRDRGPDNPAPKKVVGCTWRTKLHLCTIILPLLAALCKIVTLLVVPWTVSAEFELKFL

SEQ ID NO: 110015 - protein, 179 aa, Oryza sativa
  Clone ID: PAT_MRT4530_14118C.1.pep
WTDPDQSPEKENAAFQQAMMLAGSEFMEWKLHLFELEEELKIDPLTKYVLYQDERSKSWRVQAVGVAPDRFESRKPLPEKWRGLRDDELSNDIGIPGCVFVHMSGFIGGNKTLQVSKEEQDPIGYLPLLVLATLRRSVLAIAAHMLSRPQVPLDLTLVNQVVIASFSDNPDTPGKINEA

SEQ ID NO: 110016 - protein, 70 aa, Oryza sativa
  Clone ID: PAT_MRT4530_14119C.1.pep
MALKAVVTSFFMVSQHALKKHPADPAVGALASTSGSSKGSSRRIQRWVLSQADPVAARALTAVAAGAIVG

SEQ ID NO: 110017 - protein, 109 aa, Oryza sativa
  Clone ID: PAT_MRT4530_1411C.1.pep
MTRIPNARDGGDPLDTEDGFWSSGDQRSKDPIEVAAARGLLLVLLGNGRFRFLYSSLNTKYYTVLRIERLLYINITERLIQVINVALYVLKCLVFVLSLSSSGVQAIDE

SEQ ID NO: 110018 - protein, 379 aa, Oryza sativa
  unsure (1)..(379): unsure at all Xaa locations
  Clone ID: PAT_MRT4530_14120C.1.pep
MLAAWRLSQRAVTFIPRVRSQTLNPLPMAAAASPKRLRVYSSVSGDGRSANGAGSGKRVGTHNGSFHCDEALGCYLIRLTSQFAGADVVRTRDPQILDTLDAVLDVGGVYDPSRHRYDHHQKGFNEVFGHGFNTKLSSAGLVYKHFGKEIIAKELEVSEDHEDVHRLYLAIYKSFVEALDAVDNGINQYDTDQPPKYVNNTHLSSRVXRLNPDWTDPDQSPEKENAAFQQAMMLAGSEFMESVRFHVKSWLPARSIVLECLLSRGKVDPSEEIMVLDRFCPWKLHLFELEEELKIDPLTKYVLYQDERSKSWRVQAVGVAPDRFESRKPLPEKWRGLRDDELSNDIGIPGCVFVHMSGFIGGNKTYEGALEMARAAIKC

SEQ ID NO: 110019 - protein, 34 aa, Oryza sativa
  Clone ID: PAT_MRT4530_14121C.1.pep
MEVDEFDDTDEIVVDIFDEISRRLGSAYFGFVNY

SEQ ID NO: 110020 - protein, 85 aa, Oryza sativa
  Clone ID: PAT_MRT4530_14122C.1.pep
MATAKAATAPPTHRASSPAAASPPYPSAARIADSDCFPQYTASLKCLEANQDKSKCQQQFDDYKECKKREREARLERNKGRSLFG

SEQ ID NO: 110021 - protein, 91 aa, Oryza sativa
  Clone ID: PAT_MRT4530_14123C.1.pep
MRDTILQINYLPDKDTYPDKEDLVKSNQLSTTYPDKEDLVKSSIYYVPGQGGLTHTSPSHARYHSVTSRLGGLTHTSPSHARYHSVTSRLS

SEQ ID NO: 110022 - protein, 56 aa, Oryza sativa
  Clone ID: PAT_MRT4530_14124C.1.pep
MGAHNLHLLYRCLLQPPPPPPVKPGELTPKPPFHMHEGRSGCLTKRQWGSSIHSWG

SEQ ID NO: 110023 - protein, 112 aa, Oryza sativa
  Clone ID: PAT_MRT4530_14125C.1.pep
MTKLATHKASPFILIRIVVVLLLLLEVGVPKLLQDGLSFAIMHPATNLSGVYEGTQHASEEEDKPSRTNREQSRKALPKNLIATFSRCRTSKAEVPETYSPDRRCTPASGME

SEQ ID NO: 110024 - protein, 121 aa, Oryza sativa
  unsure (1)..(121): unsure at all Xaa locations
  Clone ID: PAT_MRT4530_14126C.1.pep
GLVSPHGYKYVHXGHCKPSHDQYKSVHRHLLPFLLFIYHGXTWQLTRGCMGLRSPAKGXVQCSAGPGNCTGYNSVVQGCIXVHSTSRIALVWLIYLLAYLSYVFVNLVLESQFSSIGCLSL

SEQ ID NO: 110025 - protein, 99 aa, Oryza sativa
  unsure (1)..(99): unsure at all Xaa locations
  Clone ID: PAT_MRT4530_14127C.1.pep
MARKVVLFTMALMAAMVAIYATHLNEWQMRLMHRQCQHEVLDRLMDAHRQVLDRELTGRERFQAMFRRLVALGLRMHRCQQLLDVRRECRXAAIRRMVM

SEQ ID NO: 110026 - protein, 519 aa, Oryza sativa
  unsure (1)..(519): unsure at all Xaa locations
  Clone ID: PAT_MRT4530_14128C.1.pep
ALCGAWATAGGFFFIGPALALXRWLDRALLLTCVFIFRGELPILPLSIFPGTPSXDAALAAVHDDAVDTRAPDAVQAAIQRRIAGLLKKASENLHTVRVIVPVPVAKGFYDRDIDTMKHAARIEKFLRGPGGEGVEMVRTSVRMTRAMYAQLVQQNFQAPRGYPMPRREEGPEKWMEAELGMKIACGFEMMYQERRREGEEGKGSTWEVYRKSLEATGCFNGLLPGSKEYKRVMEDAMQYYKSSSLFSRTREILSAPVRRIDEILAMPYSAEEFEGSDLPPSDDDSWLYNGEDELAAELCARQQEMEEYETAKQYRKSQRKNVSGSSSSQSNEFNLGEITESMQEFVRKMSSFEGAEVPANRKDMESVDLDVNQFFKAMESVLGRSKDEPGNEAGFDGKSSSSDIDLEDDSDYGSDFGEESGEKGMDNAFMESYSDALNKELSMTTIEKSFARAPHPDTSNEGPSGAADTDGEMTPVDVDLNLVESFLNSYSSQQGLPGPASNLLGLMGVKVPPDGKKP

SEQ ID NO: 110027 - protein, 61 aa, Oryza sativa
  unsure (1)..(61): unsure at all Xaa locations
  Clone ID: PAT_MRT4530_14129C.1.pep
RSFTASSLLPDIALLRTRTGRTSVXLRAVTTSTPTSHLLWDAEQTLEINYLDTTESGALPN

SEQ ID NO: 110028 - protein, 110 aa, Oryza sativa
  unsure (1)..(110): unsure at all Xaa locations
  Clone ID: PAT_MRT4530_1412C.1.pep
EKIQNFDKIWTKVHHRSLNLYRCVISVLKLANLPFRSSNLFDCVIPVPKLADHSFSSFNLFSCVTPVSKLGFEYXLGQIGRDQADTTEQVGGPKXVTCKFRDRDNTIEQV

SEQ ID NO: 110029 - protein, 662 aa, Oryza sativa
  unsure (1)..(662): unsure at all Xaa locations
  Clone ID: PAT_MRT4530_14130C.1.pep
MATSASASTSSPFPFPARRPPDDTLFYAVYSLPLPTALPPPDLHAALRSLHLSLSSHLAPFLASHLFHRDAFALTIPPPDHTAATSPCALCASPPVPHLHGALRFGDSLADEWLGVSLLFELTRAFPSLAVRAWDSDGEFLLIEAAFALPRWLDPDTAPNRVFIFRGELHILPPSLFPGTPSLDAALAAVHDDAVDTRAPDAVQAAIQRRIAGLPEKASENLHTVRVIVPVPVAKVLKEEPCLIARAVEGFYDRDIDTMKHAARIEKFLRGPGGEGVEMVRTSVRMTRAMYAQLVQQNFQAPRGYPMPRREEGPEKWMEAEXLGMKIACGFEMMYQERRREGEEGKGSTWEVYRKSLEATGCFNGLLPGSKEYKRVMEDAMQYYKSSSLFSRTREILSAPVRRIDEILAMPYSAEEFEGSDLPPSDDDSWLYNGEDELAAELCARQQEMEEYETAKQYRKSQRKNVSGSSSSQSNEFNLGEITESMQEFVRKMSSFEGAEVPANRKDMESVDLDVNQFFKAMESVLGRSKDEPGNEAGFDGKSSSSDIDLEDDSDYGSDFGEESGEKGMDNAFMESYSDALNKELSMTTIEKSFARAPHPDTSNEGPSGAADTDGEMTPVDVDLNLVESFLNSYSSQQGLPGPASNLLGLMGVKVPPDGKKP

SEQ ID NO: 110030 - protein, 42 aa, Oryza sativa
  Clone ID: PAT_MRT4530_14131C.1.pep
CVGAVVWVLEHRINDEFRGSPREQIITIFWFSFSTLFFAHSE

SEQ ID NO: 110031 - protein, 156 aa, Oryza sativa
  unsure (1)..(156): unsure at all Xaa locations
  Clone ID: PAT_MRT4530_14132C.1.pep
HSRSLSPSLSLSFFLPVFLLLSPPASLVSPTRSTMEPLSSGRGRWIGYVAMSTDEMTWRLGRCEVVVLLXSVRLNPCDLHPNVKVDSWFLSLYTSAVGASRADPSSAATGGVDLATSSPPAWIPSSLRSPLVRIRHPRRREGESSDLCRLSTLRSC

SEQ ID NO: 110032 - protein, 1660 aa, Oryza sativa
  Clone ID: PAT_MRT4530_14133C.1.pep
MGACCCCFPVYKPARENPMRSTRESLIQHKPRPTTPYHPPPPPFITYTDKVDFPFSLSGMNAVERFKTGFENFRNTIYEYFSDALRVRRKRPELFERLKTGQSPKNQLDEIAKNLTSMAAQISDLARKMSTLEPLVPLAAKLDKLPDRVTQVQASAFEYSEQVRALNLAVERVEASQRAATTNPSGLVSRQPRDNTPPQDDADARSRRDQHGDDTAIDNSFLPRAKLEFPTYDGKGDPLPWLNRCETFRGQKTPETRKVWYASLHLIGDAQLWYYRIELNSGEPSWRRFVQLVHTRFGPPMTDSPLGELTALRRTGTVENYVNSFLALACRDVELSESQQVQLFTAGLVNPLKTDVALCRPRSLDDAIMLARAYEQRATLGPTDPSAPRTGRVPRPSLPASSAASASASTTSADVAASTAAGKQPLVSALPRKRLSPAEMAQRRSEGLCYNCDEKYVAGHRCKKSFVIEVISFPEDTGDEEDSTPEAHAITLDEPSIFLHALAGISAPKFNTIKVWARLGSQELVALLDSGSTHNFINDAIAHQASVPLQRRPGLSVAVANGDRVPSPGRCPPQRVSIGSHEFDIDFYALPLGGYDIVLGAQWLGTLGPTLWDFSRQSLAFGPAHDRVTWTSIDAAPAPALAAAIDGQPGDLMTDLLDVLKDLFTEPHGLPPERHLCHRIRLEAGVSAVAVRPYRYAHIQKDELERQCDDMLRHGVIRPSSSAFSSPALLIKKCDGSWRFCVDYRALNDKTIKDKFPIPVAEELFDELRGAKFFTKLDMRSGYHQVLMHPDDVHKTAFRTHQGLFEFLVMPFGLTNAPATFQALMNDVLLPFLRRFVLVFFDDILIYSSSWSEHLRHVRTVLQTLQDHCLHLKRSKCEFGLTSVAYLGHVISGDGVAMDRSKVQAVLDWPVPKTVRAVRGFLGLAGYYRRFIRDFGAIAAPLTALLRKEGFRWSDEAAAAFRKLQHALTAAPVLQLPDFNRDFIVECDASGTGLGAVLHQGGGPVAFFSMPIAPRHAKLAAYERELIGLVKAVRHWRPYLWGRRFIIRTDHYSLRFLLDQRLSTIPQHHWASKLLGFDFAVEYKPGTANVVADALSRRDEHLAEAFVLSAPHFSLLDDVRREVASTPSLASLRDDIIRGAKPPPWAFKDGLIVLKDRVFIPESSPLLPAVLELAHGHGHEGTQKTMFRLRADFHVPRDRVLVQDFVRACLTCQRNKTEHLQPAGLLQSLPVPSAVWADIAMDFVEGLPRVHGKTVILTVVDRFSKFAHFIPLSHPYTATTVAAAFFGDIVRLHGVPSSIVSDRDPVFTSKFWTELFRLAGVQLNLTSAFHPQSDGQSEVTNKIIAMYLRCLTGDRPRQWLRWLPWAEYCYNTSYQASLRTTPFHVVYGRSPPSLRSYEPGSTCLPAVQRSMQDRDQFLVAIRDRLEQAQQVYKQAYDKKHRELNFDVGDWVWLRLLHRPMASLDTRGRGKLGPKFYGPYQIVACIGSVAYRLRLPPGARLHDVFHVGLLKPFRGEPPSTLPPLPPTQHGQVCLEPQSVSRSRLARGVRQVLVQWKNKPAADASWLSLDEFRALYPDFQLEDELLLEGGRDYMVFSCADSRVCPTLTFGLQPGEAFTVRNIASMVPAYDKRGQCSIGSAIEYAVVVLKVTSSLRIINVLLI

SEQ ID NO: 110033 - protein, 95 aa, Oryza sativa
  unsure (1)..(95): unsure at all Xaa locations
  Clone ID: PAT_MRT4530_14134C.1.pep
MTVVTVGIVGNTLXPSLGSHLSRPGEPWIKRSYGGFGRNTMGWPNPAHLWLAASFVVLLRRLVNFGPMCRVIFEFLAHSYISLVLDIVRLIYRLS

SEQ ID NO: 110034 - protein, 133 aa, Oryza sativa
  Clone ID: PAT_MRT4530_14136C.1.pep
PTVITDEDFAPRFQPLEETSEQSRFISDYCRNPGKPSEEFAAYIKQRGYDLHDVKTYGKMLEDAGFHHVIAEDRTDQFLRVLQRELAEVEKNKEAFMADFTQEDYDDIVNGWNAKLKRSSAGEQRWGLFIATK

SEQ ID NO: 110035 - protein, 271 aa, Oryza sativa
  unsure (1)..(271): unsure at all Xaa locations
  Clone ID: PAT_MRT4530_14137C.1.pep
MDAVAANGKRARADERSECFCAFVFVFLLWRWRGIGGVLMMMGGKWFWLDGCVAGIGEVERKAQRSYWEEHSKDLTVEAMMLDSRAADLDKEERPEEFRILQSFSSPMGXLLFRVLSVLPSYKGKSVLELGAGIGRFTVGTGAKKLAHVLALDFIESVIKKNENINGHHKNITFMCADVTSPDLTIEDNSIDLIFSNWLLMYLSDEEVEKLVGRMVKWLKVGGHIFFRESCFHQSGDSKRKVNPTHYREPRFYTKIFKECHSYDKDGGFFD

SEQ ID NO: 110036 - protein, 116 aa, Oryza sativa
  Clone ID: PAT_MRT4530_14138C.1.pep
MAKPLLPATAAAAAARLPSRLAIGAAPPLRVLPFFLYPPPPSPVISKGRDVEDATVGCPVCGVFMQDADPNLPGFFKNPSRLSDDEMGEDWSPLAAELDGFIGNDEGNDVPSESDL

SEQ ID NO: 110037 - protein, 1461 aa, Oryza sativa
  Clone ID: PAT_MRT4530_14139C.1.pep
MDIEGKFDVLLKTIAENEKKRMAAEDRTREDLMELKAMVEGRLPQVEKRVEDLNSALGKLNSKVEHLEKQLPRVMNTNEEVAAASAGFRTPASAQGTHESPPDSAAPFSFDSSAQHSTFSAMSTGVCGSVPPMTCPQFNGDNPQMWRANCEVYFDIYGVLPQNWVKVATLNFCGNAAFWLQSVRNQLIGITWSDLCEKLLAYEQAVPPIYFVTKFMEGLRDDIRSMVLMQRPQDLDTACSLALLQEETAAESKPNSFKRSDSGTYLKSPPRSATPPISPNSYRSSPSQSPEDKRNIESPRVREDRISALKAYRRSKGLCFTCGERWSRDHKCATTIQLHVVEELLEAIQADPEIISNQSSVPEGDEDTLMSISSQALHGSESSKSIKLRGWVQNRELLMLVDSGSTHSFIDEQKGMAKTDSIECMVQLIQTAEQETSEVPAEVQPLLQEFQDLFTEPTGLPPKRTCDHHIPLIPGAKPVNLRPYRYKPALKNEIERQVAEMLKSGVIQPSQSPFSSPALLVKKKDGSWRLCIDYRQLNAVTVKSKYPVPIIEELLDELAGSKWFSKLDLRAGYHQIRMAEGEEFKTAFQTHSGHYEFKVMSFGLTGAPATFLGAMNTTLATVLRKFVLVFFDDILIYSPTLTAHLEHLRQVLQLLSEHNWKVKLSKCSFAQQEISYLGHIIGSEGVSTDPKKIQDVVNWAVPNTVKKLRGFLGLAGYYRKFVKGFGEISKSLTQLLRKGVPFQWTQDTDNAFQHLKKALVSAPVLALPDFTKQFTLETDASEFGIGAVLSQDNHPIAFLSRALGPKSKGLSTYEKEYMAILLAVDHWRPYLQHAEFLILTDHHSLKHLSEQRLHTPWQQKAYTKLLGLQYKICYRKGIHNSAADALSQKEDTVKAELVAISEGVPLWMQDVIQSYETDSNSTQLLAELSINPNARPHFTLKQGILMYKGRIWVGQNGDLQSKIIDALHSAPIGGHSGFPVTYRRIKALFAWAGMKRMIQTRVNTCQVCIQAKPDRAKYPGLLQPLPVPAAAWHTISMDFIEGLPRSHHFNCILVVVDKFSKYAHFVPLSHPFSAATVALEFLKHVYKLHGLPNIIISDRDRVFTSNFWEQLFARSGTKLHMSSAYHPQSDGQTERVNQCLEIYLRCFVHATPTKWSQWLYLAEFWYNTSYHSTLNKSPFEVLYGYKPSHFGISLNDCAIPDVSQWLQQRKFMQHLLQQHLNRAQQQMKHLADKKRSFREFQVGDWVYLKLQPYVQTSVSTRANHKLSFRYFGPFQISARVGSVAYKLQLPASCHIHPVFHVSQLKAAQGFSHPVHSNQPPDLNHFQIPHQFIDYRVTKRGNTPITQLLTQWTGCDASAATWEDMEDLQSRFPQAPAWGQAGFQEWGLVRPPSPPRAREDTEEMIQEGAEEEEVLEPDDKEADAQEQGGKPDFKTKKKQVPVQLGPRARRPNPRYKGDQWVQ

SEQ ID NO: 110038 - protein, 138 aa, Oryza sativa
  unsure (1)..(138): unsure at all Xaa locations
  Clone ID: PAT_MRT4530_1413C.1.pep
MAERPRRIRGGSAVLALVVLLPILAPPVPVATCRLCNKAVAHRYCLXSDDDTFVCAACVAAKHDWRFPYTPPPTTTTGDVSDAPLDIRASQRIHLRRRLLGLHLCACHFELYDVACYTVPFTSEQCIDLLVNNVLEKL

SEQ ID NO: 110039 - protein, 95 aa, Oryza sativa
  Clone ID: PAT_MRT4530_14140C.1.pep
QNGSSTLRSSIARRRPLVCSRLRPPVGAASSTPAAPTVPESAREEKRAARSTARRTAAASPARSPDPPRPPVSTRLGNAALWVRFSSPLTKLATT

SEQ ID NO: 110040 - protein, 685 aa, Oryza sativa
  Clone ID: PAT_MRT4530_14141C.1.pep
MESLLPRLASLRHYLQFHARLLTSGHLGAHPGLRARFLDRLALSPHPAALPHALLLLRSLPTPATNDLNAALRGLAASPHPARSLLLLAGRLLPALLPRPDALSLSFALKASARCSDAHTTIGLLKDGMYVHEFAKRFGLDRNVRVCNSLIDMYSKCGSLSRALDVFHSIKPEDQTLVSYNAAIQAHSMHGHGGDALRLFDEMPTRIEPDGVTYLAVLCGCNHSGLVDDGLRVFNSMRVAPNMKHYGTIVDLLGRAGRLTEAYDTVISMPFPADIVLWQTLLGAAKMHGVVELAELAANKLAELGSNVDGDYVLLSNVYASKARWMDVGRVRDTMRSNDVRKVPGFSYTEIDGVMHKFINGDKEHPRWQEIYRALEDIVSRISELGYEPETSNVLHDIGEEEKQYALCYHSEKLAIAFGLIATPPGETLRVIKNLRICGDCHVVAKLISKAYGRVIVIRDRARFHRFEDGQCSCRDYCGVWAIWFCVKLLGFQKHFIERCHVASSQGFVTFATVEGHDADFVFYTRQEIQDVDGEKDAGRAGETGMISYKIAAHAADLAKCHPYAQAWDDTLSKARFEFRWLDQFALSLDPVTAMSFHDETLPSEGAKVAHFCSMCGPKFCSMKITEDIRKYADEHGYGTVEEAVIQGMNAMSAEFSAARKTISGEQHGEAGGEIYVPESYTARK

SEQ ID NO: 110041 - protein, 96 aa, Oryza sativa
  unsure (1)..(96): unsure at all Xaa locations
  Clone ID: PAT_MRT4530_14142C.1.pep
KKRKAKEPSPSSSSSSEEEERSSTSSDEPAPAAKKAKKEKTNDNVVVEEEEEDHDEGELTVSGDEDPADPNALANFRIXESLKEKLKSKGIKALFP

SEQ ID NO: 110042 - protein, 629 aa, Oryza sativa
  unsure (1)..(629): unsure at all Xaa locations
  Clone ID: PAT_MRT4530_14143C.1.pep
QFHARLLTSGHLGAHPGLRARFLXRLALSPHPAALPHALLLLRSLPTPATNDLNAALRGLAASPHPARSLLLLAGRLLPALLPRPDALSLSFALKASARCSDAHTTVQLHALVLRLGVAADVRLLTTLLDSYAKCGDLASARKVFDEMTVRDVATWNSLLAGLAQGTEPNLALALFHRLANSFQELPSREEPNEVTIVAALSACAQIGLLKDGMYVHEFAKRFGLDRNVRVCNSLIDMYSKCGSLSRALDVFHSIKPEDQTLVSYNAAIQAHSMHGHGGDALRLFDEMPTRIEPDGVTYLAVLCGCNHSGLVDDGLRVFNSMRVAPNMKHYGTIVDLLGRAGRLTEAYDTVISMPFPADIVLWQTLLGAAKMHGVVELAELAANKLAELGSNVDGDYVLLSNVYASKARWMDVGRVRDTMRSNDVRKVPGFSYTEIDGVMHKFINGDKEHPRWQEIYRALEDIVSRISELGYEPETSNVLHDIGEEEKQYALCYHSEKLAIAFGLIATPPGETLRVIKNLRICGDCHVVAKLISKAYGRVIVIRDRARFHRFEDGQCSCRDYCGVWAIWFCVKLLGFQKHFIERCHVASSQGFVTFATVEGHDADFVFYTRQEIQDVDGEKDAGRAGGY

SEQ ID NO: 110043 - protein, 194 aa, Oryza sativa
  unsure (1)..(194): unsure at all Xaa locations
  Clone ID: PAT_MRT4530_14144C.1.pep
AKMHGVVELAELAAINLLSLXSNVDGDYVLLSNVYASKARWMDVGRVRDTMRSNDVRKVPGFSYTEIDGVMHKFINGDKEHPRWQEIYRALEDIVSRISELGYEPETSNVLHDIGEEEKQYALCYHSEKLAIAFGLIATPPGETLRVIKNLRICGDCHVVAKLISKAYGRVIVIRDRARFHRFEDGQCPCRDYW

SEQ ID NO: 110044 - protein, 148 aa, Oryza sativa
  Clone ID: PAT_MRT4530_14145C.1.pep
GRVGGRVGGRVGKISAHAADLAKGHPYAQAWDDTLSKARFEFRWLDQFALSLDPVTAMSFHDETLPSEGAKVAHFCSMCGPKFCSMKITEDIRKYADEHGYGTVEEAVIQGMNAMSAEFSAARKTISGEQHGEAGGEIYVPESYTARK

SEQ ID NO: 110045 - protein, 639 aa, Oryza sativa
  Clone ID: PAT_MRT4530_14146C.1.pep
MAALQPSFSSAMAMKSLKLPKTAVLPGFGGIARPQDVQDRSANFTCSRPRAASVTDQSTAEPAKPRQNKHTVDPSAPEFLPLPSFEECFPRSTKESREIVHEESGHVLKIPFRRIHLTGDEKHFDTYDTSGPQNISPRIGLPKIRKEWIDRREKLGGPRYTQMYYAKQGIITEEMLYCATRENLSPEFVRSEVARGRAIIPSNKRHLELEPMIVGRNFLVKVNANIGNSAVVSSIEEEVHKLQWATMWGADTVMDLSTGRHIHETREWILRNSSVPIGTVPIYQALEKVNGIAENLSWEVFRDTLIEQAEQGVDYFTIHAGVLLRYIPLTAKRMTGIVSRGGSIHAKWCLTYHKENFAYEHWDEILDICNQYDVALSIGDGLRPGSIYDANDSAQFAELLTQGELTRRAWAKDVQVMNEGPGHIPMHKIPENMEKQLEWCNEAPFYTLGPLTTDIAPGYDHITSAIGAANIGALGTALLCYVTPKEHLGLPNRDDVKTGVISYKISAHAADLAKGHPYAQAWDDTLSKARFEFRWLDQFALSLDPVTAMSFHDETLPSEGAKVAHFCSMCGPKFCSMKITEDIRKYADEHGYGTVEEAVIQGMNAMSAEFSAARKTVSGEQHGEAGGEIYVPESYTARK

SEQ ID NO: 110046 - protein, 176 aa, Oryza sativa
  Clone ID: PAT_MRT4530_14147C.1.pep
MAEPRARCRAPQSSTSPTWPRRVEALTHILTHPSHSPSLHSQLFLASRVPCPPPGSTYPPFLCPGAGDGAGLLRWALASVFLPRAARLCLPPSSWRSRCPFQLPPPVVPSAAIEPAPERWGEAELRGYARRQRAQRGPMRARPPHSIAGAVLTIVPNVVIVAAVIRELFWVRPNRI

SEQ ID NO: 110047 - protein, 102 aa, Oryza sativa
  Clone ID: PAT_MRT4530_14148C.1.pep
ITERLFGDAEGGTVRTRGKASERARGKGVGEIRVRERHHSLHAALSPFSHLDTVVRLRGDRLQRVAGRAEAGLRRAAGRAPSSPAIAVLLPVLLAWLPVLEG

SEQ ID NO: 110048 - protein, 574 aa, Oryza sativa
  unsure (1)..(574): unsure at all Xaa locations
  Clone ID: PAT_MRT4530_14149C.1.pep
MFGIYSGMFRRRRSNSMSSIARINGVPPATAEHEHEAEAKAASAPANQAHRKGGGVHDDSSLAHRPAKPLPGTNNGAQRAHAPASDRAVHATKAANGGARNAASAAPAAEYTGMAAELDKMILDHQRVKGTTQLVRATSGNMMLHRNLGNLNAGVPGASARSSLERNPANKPANERKATNGYAFSGLGNIVKEPRAPPASSELCRALSHRTDPEKLKEMGNEEYREGHYAEAVALYDQAIMVDPTRPAYWSNKAAALAALGRLIEAVGDCREAVRIXPSYGRAHHRLGGLYLRRXDKAIHHFKQSANDSTGADVSRAQSVKSRVAKCGDARKLRNWITVLQESQAAVADGADCAPQVMALQAEALVKLSRHDEADAVLGGAPRFGVDESTKFFGTVAHAYVLMIRAQVDMAAGRFEDAVATAQTACQLDPSNREIANVHRRAKVVASARLRGNDLFKASRFAEACAAYCEGLDRETGNAVLLCNRAACHARLARYEKAVEDCNGALAMRPAYSKARLRRADCNVKLERWEASLRDYQVLIQELPENEDMKKALSEVEAKLRSQRNGGIASRSQQ

SEQ ID NO: 110049 - protein, 33 aa, Oryza sativa
  Clone ID: PAT_MRT4530_1414C.1.pep
QHNSGGRHLGGERGRHSGGHERANKAQNVDAPA

SEQ ID NO: 110050 - protein, 79 aa, Oryza sativa
  unsure (1)..(79): unsure at all Xaa locations
  Clone ID: PAT_MRT4530_14150C.1.pep
VTFTKRRGXXXKKASELALLAGASIAVVVFSETNLAYAFGDPSVDAVLLSYGPVPGEDAEPAPVHSGGLGKDVDLEMLR

SEQ ID NO: 110051 - protein, 299 aa, Oryza sativa
  unsure (1)..(299): unsure at all Xaa locations
  Clone ID: PAT_MRT4530_14151C.1.pep
MAKKFSNKPHIFNGVNFYYWKKKIESYITSQGYDIWLKVAITYEILAQKIVVQKTDFENNCKTHNIILNSISRSDFDRFSHLAIATEIWKTLNDFRTGSSNIKELRKDVFKNDYIKFEMNPGESLDDYLGRLDKILSNLRSVDASYDVNYSQSEVTHHFMNGLDMKISDVKVTSIQESVDMNTLTLDIVYTKLKIYEMNILFKRTDSKSTALVYSSGSSLDTTLMSVIFAFNALSNDQLEEIREEDLVLVACKFRRRGQPNHICSQCSKLGRGTKEEDQDESKNAXQNKKQFSNPRRKH

SEQ ID NO: 110052 - protein, 352 aa, Oryza sativa
  unsure (1)..(352): unsure at all Xaa locations
  Clone ID: PAT_MRT4530_14152C.1.pep
MASYNCWTSHGELGVQMEEDEAEDENIPDWAQYGGFEGNTKGEVDGAVEDNDAADDLGQMPQDVKEDCERAQKVGGRAAAARDHGCSAGFRRREVVAKVRWDAAMPLEAVARLGEASPAGGKLMEAAWAARTRVDGGIGVSGVEMGKEAVADVRGGEEGPVXVCPLCGEAGGDGGAVRRIVADWGGNRQGGGGGTGXVAAGPKQLGNDIDVYLRPLVDDLKLLWKKEGVPMWDEDKQEQFNLRALLFVTINDWPALSNLSGQSNKGYNASTHCMEDTESTYLTHCKKVVYMSHHRFLVANHPVRKKGKHFEQKADHRVYRKSKDTLEAHNDLKHMNQRDDLHPEPTDQEAST

SEQ ID NO: 110053 - protein, 72 aa, Oryza sativa
  Clone ID: PAT_MRT4530_14153C.1.pep
MAHLTPGLVWAVNVFPRRHHLASTGCSLSGSGNTVFAQASSKSGDCGGRLNCTVPGTPPDGRLWSRAIRAMA

SEQ ID NO: 110054 - protein, 311 aa, Oryza sativa
  Clone ID: PAT_MRT4530_14154C.1.pep
MEALVGQYSPCLAKVPLKYLGNARTPLAAVNITFRAYEDISSWNRPNVTWAAHGWWAGLRTLISGIRAQGSKIMAPVGPVVEQAQCDLGGPRLVGRAAHSNDLWNDDKDWDVQKLNSLFEQEVVHKILQVHISQGSTEDKLCWKYSKKVNAIQKSAYKEFIKREEHRYSQFGKIEICLLRIKSSQSWSIEEWTAFPMETGTTFLTDNSTIADTAKRRNFLEEPGHWSLRPLWTQIISSTSIDLIQVRWVPREVNKMADKLAKEAKSGTRRNFIQNCQNIEHSAYPHRSFYARLLNDNFRSLNCTINYVLCF

SEQ ID NO: 110055 - protein, 324 aa, Oryza sativa
  unsure (1)..(324): unsure at all Xaa locations
  Clone ID: PAT_MRT4530_14155C.1.pep
GLTETKDIGKGVGWRQVAKVEVINSTTLALQFLCTLKEIQDGISFRFFHKKYTLSWEGLCTLLGFHDSCKIDLQKGISRFEKNRFWEDISNAPICKKTRTNDNHNPTLRLMHKWIAITLFPRGDLRPIRGDELIVMFVMVRKIKVAAVKCMIRQRLESIRFSTPVECTSLITRITKGLGVINNDXIAYVLAACPCIDENYLVQGNILKHGVDGSLIYFFPGCTYEILLPNAGYYLNNYHELTIPLHTIEESRAGGTYRETRNMASNEREGSSSSTPVXMYEASWEPTGDAPGWTQAPRHSIGVSSCASGSEDRWRVPHDIQWGG

SEQ ID NO: 110056 - protein, 28 aa, Oryza sativa
  Clone ID: PAT_MRT4530_14156C.1.pep
MRFGTLAKPVPLCRGFCLFIFAHAALRH

SEQ ID NO: 110057 - protein, 619 aa, Oryza sativa
  Clone ID: PAT_MRT4530_14157C.1.pep
MGTSSGANFHQQQPPPPTSSAAAAAGAAAVAQGMLPPRRPTGLQTSLSLASSEQVGSPEMQEPGSNSDQGHDSATESASSRETWPAEPNHGSAAAVVAASTAASGGGGVVGGIGVGVRIVDKEKEVGNGIPKLQVIRGSSRLDRMSLREVARERVDLVAEKMKVMPEEHLEDMKNELRSILEGTGGSHHIEEFLYLQKFVQSRGDLTQTMLSMAHHVQLEILVAIKTGIQAFLHPSVTIPQNRLVEVFLYKRCRNIACQSALPAEECRCNVCSNRNGFCNLCMCVICNKFDFEVNTCRWIGCDFCSHWTHTDCAIRDGQIGMGQSIKSGTGHAEMLFRCQACQKTSELLGWVKDVFQQCAPGWDRDALLRELEFVCKIFRLSEDSKGRKLFRKCADLIERLRNSPADAINPRMILQVLQELELDSPKSTENEEIGRLITPQEACNRIAEVVHEAVKKMELVAEEKMRLYKKARIAVEACDRELDEKARELQELKAERLRKKQQVDELESIVRLKQAEAEMFQLKANEARQEADRLQSIALAKSERAEQDYASLYLKRRLEEAEAEKQFLFEKIKYQETQRPMQASGSGAGDSSQTPMLSKIHDLLKNVRSIPPKTEGHQ

SEQ ID NO: 110058 - protein, 385 aa, Oryza sativa
  Clone ID: PAT_MRT4530_14158C.1.pep
MPPKLRSSKGVAPSPSTGEGGESHTSKKNPAPATAPTAGSVTRSRARDTTERARASGGGTALDPKKRKRTEESAASSAAAAGPVPKKMTTAGSTTLASRPLPLRYPPYPTLPPGTRPTSRQYLDPVLDRKYLDSVLEWAKERRRIAKLSKKAQCKDIPTLRHSPMDPITADAVVTSQDKAMVLRVARSVVSVSSTMPDGGGLISRCTGVVIGWDGANKRAKILTAASVVCDFHGELHNPALKLSVSMPNKTTTEGRLLFYNVHYGIALLEVMGDYKLEVPSFGSGTNYGQVIFALGRGENMSLMVSHGTISWTDYPVLLRNHNMFLSCDIPEGGSGGPVVDHGGNMIGIAFVENPGPVFISIKTIMTCMEMWDQFSPCARPLLGM

SEQ ID NO: 110059 - protein, 227 aa, Oryza sativa
  Clone ID: PAT_MRT4530_14159C.1.pep
MAGDGTGDDDDVHARVKYKGVARTADGRWRGFITNKFGRRYGVGDHGTPEEAALAHDRAILAILGAHASPAALNFRAAFSDTELRFLRGPHAPSRRAAGVVAAVMRGAAFDAALERFAARAYDAHTDPELALDVAAFRLATRDAGTPLAQPDAERAAFVAAARNKVHDAAWLRSYLRRRRLVGATFEDENRWPPVVPPAVADVGDGFAGNELVYLPYGSCHVDEMMI

SEQ ID NO: 110060 - protein, 82 aa, Oryza sativa
  Clone ID: PAT_MRT4530_1415C.1.pep
NSKCKRYFHNRLKPAKLTWTAMYRKQHKKVQHFHQIHSYIGILCPCNQQIPLFLCLRNINNMFILMVCMNLFSVASTVSRVP

SEQ ID NO: 110061 - protein, 112 aa, Oryza sativa
  unsure (1)..(112): unsure at all Xaa locations
  Clone ID: PAT_MRT4530_14160C.1.pep
APRREGTPSRLAAYGRRRDGHSALPPPPPRRRRCRTSQTPARRRRRRRRAGLPWTGSTRVRARTAGRATGGYAPRRPPPRXSCTRRPPHISSRRRSPPPPPPSLCCSSPSSS

SEQ ID NO: 110062 - protein, 91 aa, Oryza sativa
  unsure (1)..(91): unsure at all Xaa locations
  Clone ID: PAT_MRT4530_14161C.1.pep
LMXNNRGLIXAIXQTHTNHTXXGGXYXGLIKVGDSPAASVXLXVISLAALAVGAGAXGAXXAXAVLLRRGRPXWEVVXLGFNXESHXVPFC

SEQ ID NO: 110063 - protein, 149 aa, Oryza sativa
  Clone ID: PAT_MRT4530_14162C.1.pep
MMDDRRRSRPKSCRARVRTQWVAFDKKPSKLTPNLKLKTLEAAEGCRMVAPRRNDDGDDDDRAGCAPRRRSWRAALLGQSRSSGQGEPDGARHRSRTPHPSRRRRGCAADAVDGDDDGSPPAGRDRGCRSCSTSRRRSASRRCSRRRSP

SEQ ID NO: 110064 - protein, 374 aa, Oryza sativa
  unsure (1)..(374): unsure at all Xaa locations
  Clone ID: PAT_MRT4530_14163C.1.pep
LAQWGNGGGPCNPLVAWRAPALPNPGGPPPTPTPPPPPLPGHAWPELPLPAPPVASPFGRPPLPRALFKPGPFPFPSPTPPPPXPPFPPFPRIAAIVPPRPRPRAAGPSPRGPPPLRLPPXPPLPPPPLPPPPSVSPPPPPPPSVRXSPPPPRLPRSCPMPPPHRLPRAGTRASPPPQLSRAAPYTPRHPLPRRIPSTSASSALPFSPPTPSPLPPPLVTPRHHQPPRPQLPVGQAATATLPVYSARRAPLLLQPPPLSNPPSLXPPHPHVPQQPPPPLVSPPTRAREASASAATSVSESAQPPRLAAARARDVHGDDKARRPPPDTRPGVRLRPPPPRQPPPPPPQPGPPAPPXEQHRRDAPGRRPPRPPRTP

SEQ ID NO: 110065 - protein, 37 aa, Oryza sativa
  Clone ID: PAT_MRT4530_14164C.1.pep
VSAFSQVSLLAGTFEPIIILASHRVYTNHGYRAPIFL

SEQ ID NO: 110066 - protein, 152 aa, Oryza sativa
  Clone ID: PAT_MRT4530_14165C.1.pep
MAREATKALQEKQNYPSLSDNGGSSGGGIADQKSYLTIGYISRGSGEEEEERARKTAAAVGKKQDPVAAPARTWRSGGSGEELLRGCGEEERASEEKRSLRGHGWRSSEIFARGILGCEIVRWRKLARGWTVQINPDDLACSIGGGNSSFLY

SEQ ID NO: 110067 - protein, 260 aa, Oryza sativa
  Clone ID: PAT_MRT4530_14166C.1.pep
MWVPHLLSKGGCRRRQMSSRRAWPSSTAAAALMHTRSTGFGSVPLPRQRRWLEEERSPAGGVDRQSGSGGLTNRKLRTRRLVMSRRDEGRGEWRGGWRREWEALALNLDGAVGGEHRVHAGSRVTTPSTVVVVVVVVIVIDGVATLSWLWLHSLPSPSPSSRNLALQKTDMTRKLCASATRSLRRSTGSSAAAGGEGCMERRVRAGVAATRECRRVGAGVEVALGTSAGASRQWPWLPGSSAASEAVAITTGGAKRERKW

SEQ ID NO: 110068 - protein, 39 aa, Oryza sativa
  Clone ID: PAT_MRT4530_14167C.1.pep
FKKSILHRVIIRCLCLSISYASCTHIDHPIETIYLVYVL

SEQ ID NO: 110069 - protein, 341 aa, Oryza sativa
  unsure (1)..(341): unsure at all Xaa locations
  Clone ID: PAT_MRT4530_14168C.1.pep
SPLKVGRRAISPNPKSQRFAVTGAMEARFTLLRKVCSRLICRDLVEEFCMLRIFPLSQSXQIAVEQGKEVDGLPKLVLPEGTNVLTLDQADAEACMMIGDVSVVEYRQLLTEQADGRANRVYYGELPTRANPYKAHDHAGPGXNLTRILVKLAPRKLMVPVSSDFDADDEDYVKEEGEEEDEVDVPKARDEAVENRVYTPGYAPTSSTGHNDTGVESNSCGLRLKDKDGAKALIAISARIEAKGGTVKRSFMRERVVRVQLRTTYDADAYKTTLGLLIERPNLNSVRVRSLCALRAGNHCRPLCLMISATDRGQWCEDLGPFHCLREYIPRSREVRGRGRE

SEQ ID NO: 110070 - protein, 109 aa, Oryza sativa
  unsure (1)..(109): unsure at all Xaa locations
  Clone ID: PAT_MRT4530_14169C.1.pep
IPSTLRYTSHIDMVYSRVYGRFRHTLRKFIMEFLDGRSPTRTELGRHCIVPGPMSPSPTWRPVDLRYKRDPXREDLRHQISXPTHPPQPTKLKPTGAKSPGDLIEHVRL

SEQ ID NO: 110071 - protein, 106 aa, Oryza sativa
  unsure (1)..(106): unsure at all Xaa locations
  Clone ID: PAT_MRT4530_1416C.1.pep
KSRPSSLMSLCLSRTVVVAVGVVVDDEAWRGGGTFPSLAAPPRSVRVCGVEXAAAMNLVSCAVPSSTPLYMAQCDGGPPAIGLGTPDQGAGQGPLEPLGSREGRSI

SEQ ID NO: 110072 - protein, 109 aa, Oryza sativa
  unsure (1)..(109): unsure at all Xaa locations
  Clone ID: PAT_MRT4530_14170C.1.pep
GIPSTLRYMSHIDMVYLRVYGRFRHTLRKFITEFTDGRSPTRTELGRHCIVSGPMSPSPTXRPVDLRYKRNPREDLRHRILXPTHPPQATELKPTGAKSPGDLIEHVRL

SEQ ID NO: 110073 - protein, 116 aa, Oryza sativa
  unsure (1)..(116): unsure at all Xaa locations
  Clone ID: PAT_MRT4530_14171C.1.pep
GIPSTLRYTSHIDMVYLRVYGRFRHTLRKFIMEFTDGRSPTRTELGRHCIVPGPMSPSPTWRPVDLRYKRDPXREDLRHRISXPTHPPQPTELKPTGAKSPGDLIEPVRLQSRRYH

SEQ ID NO: 110074 - protein, 130 aa, Oryza sativa
  Clone ID: PAT_MRT4530_14172C.1.pep
LSSLYHQQQRRDDAMDQEEAAVWIAPPLPPEPSAGAPGRVGLESSAAARIVLRPLTAHGAASSSSDGSCRPEGGEGRTSSISSRWRRSWAWAPPIRKDGGGEAGDDDIAIVRYNLRRWRSIENSSASTAR

SEQ ID NO: 110075 - protein, 180 aa, Oryza sativa
  Clone ID: PAT_MRT4530_14173C.1.pep
ADNPSHRTESEANQPTSQSVLPEQQITISHKPIERRAVERTNATARDESPKLDPQNRTDQAVTETRNRTEPIKAPPDDQINKRAANQVRSKPMDPLPTDLPAQPTRGGGGKGKEEITRARRGRKPSMTPWPRVQRRKSSEDRAAFIEERRRRTTRGGNRVGGLGPGCEQESVVARLFFLV

SEQ ID NO: 110076 - protein, 100 aa, Oryza sativa
  unsure (1)..(100): unsure at all Xaa locations
  Clone ID: PAT_MRT4530_14174C.1.pep
LATFSKTKSSPATNQSKSIDYLARGPSTGLYAPAGAPSRRRXGGSATRRPCAGAPAXDLRXRSCRSDGDEEDEECNNWSIHGDRAVDRRRARRSSTWSSR

SEQ ID NO: 110077 - protein, 97 aa, Oryza sativa
  Clone ID: PAT_MRT4530_14175C.1.pep
EKGEKKIEGGRKKKERGMEKERKVEERERRKEKKKREKREEKERKRKRKKKKKEGRTKKEGEGERRIRKEWKGERKNEAARGEIYDNRERERKEQRK

SEQ ID NO: 110078 - protein, 92 aa, Oryza sativa
  Clone ID: PAT_MRT4530_14176C.1.pep
TSGSPGCRQKVEKIAPVYNLVTKPSVYGANRRATTVKARPATTAVAAGFAGSSNSRQPAPAPASWPHGSVVTKEFISKYIEDKKRQFNQGDE

SEQ ID NO: 110079 - protein, 149 aa, Oryza sativa
  Clone ID: PAT_MRT4530_14177C.1.pep
MMKKCPSELQLEAFIREEAGAGDRKPGVLSPGDGAQSSQQFNTAVTDNRILKSDVEALRVKVKMAEDMVARAAMSCGLGQLGLAPLLSSRKMCQALDMLSLPRNDACGFKGLNLGRQVQNSPVQSAASLESLDNRISSEVTSCSADVWP

SEQ ID NO: 110080 - protein, 242 aa, Oryza sativa
  Clone ID: PAT_MRT4530_14178C.1.pep
MMKKCPSELQLEAFIREEAGAGDRKPGVLSPGDGAHDPKPTTSANHAPESDSDSDCDSLLEAERSPRLRGTKSTETKRIRRMVSNRESARRSRRRKQAQLSELESQQSIYDQVEQLKGENSSLFKQLTESSQQFNTAVTDNRILKSDVEALRVKVKMAEDMVARAAMSCGLGQLGLAPLLSSRKMCQALDMLSLPRNDACGFKGLNLGRQVQNSPVQSAASLESLDNRISSEVTSCSADVWP

SEQ ID NO: 110081 - protein, 295 aa, Oryza sativa
  Clone ID: PAT_MRT4530_14179C.1.pep
MMKKCPSELQLEAFIREEAGAGDRKPGVLSPGDGARKSGLFSPGDGEMSVLDQSTLDGSGGGHQLWWPESVRTPPRAAAAFSATADERTPASISDDPKPTTSANHAPESDSDSDCDSLLEAERSPRLRGTKSTETKRIRRMVSNRESARRSRRRKQAQLSELESQVEQLKGENSSLFKQLTESSQQFNTAVTDNRILKSDVEALRVKVKMAEDMVARAAMSCGLGQLGLAPLLSSRKMCQALDMLSLPRNDACGFKGLNLGRQVQNSPVQSAASLESLDNRISSEVTSCSADVWP

SEQ ID NO: 110082 - protein, 765 aa, Oryza sativa
  Clone ID: PAT_MRT4530_1417C.1.pep
MQEPQRIHRDAGGYPAAAAETDPLLAHPPPPRSPAEIEDEEIEDEEIEAASAACCRICLESETEPGDELISPCMCKGTQQFVHRYCLDHWRSVKVIAAIGATRPSNAAAPPPPPPPAVAVVSAAKAMRLASRASLRRAAAMSAYYNARGSARPRRGYYSGRPTPPPHHHHDAGAELVSGDSHHSAVRASNDSLRRGGGRGPPPSLYGYAPPQPPPALYGAVPYNYGHPQQPGPPYGAVPYNYGPPPPQPQDPQYGYATPNPYVQGHPQPYWRGPTNAGFRPPYAGFRPGAPQQSPRLAEYRRRWRFTQHRPPRQAERFKVLSYNILADYLAQEHQFLYERIPSFIMDWNWRKEKLVFEFGLWSPDILCLQLRYQEDIEFNKIDLRDNVAQICVLESVIPGNVQTESRLSKSHSCSNELGNCSCAFEDDGASNEVLCSDVNADPSIFKEFSGVNEFLLEDEDQLQTTSDGSPSAQQVITSDKRYYDYDPYRWTPDEIKAATGNEDCTFVEHNLKVRSVYTDVEDFEGTKDANKEPLVTSYNRKFMGTVDYIWASEDLQTVQVLDTFPKEILKQTIGFPTKVSPSASRIHAPLLPNPPPLCSSSTLRPPPPPPPPSPSPAKMMSGGGYSALDDPKASGSVPAATGPDPPTIKFADSNLQIFPPSEAKGKISGAYRPPTDADDTFSSSKSGGGGRGGGGGGAGSDDAGQGGWFRMFSVAAYKPYFDVDTSDVVERIWESVFPFRGTFTEKTSENPDLYASPSPNSSLP

SEQ ID NO: 110083 - protein, 57 aa, Oryza sativa
  Clone ID: PAT_MRT4530_14180C.1.pep
TTVRLWQLDILLTILRLNQVGEPLVVYTIHDQLWELLGKLLRCNLCYLSSMIRECTV

SEQ ID NO: 110084 - protein, 118 aa, Oryza sativa
  unsure (1)..(118): unsure at all Xaa locations
  Clone ID: PAT_MRT4530_14181C.1.pep
SSTQVVENPWGTQTDLLPGYIPSCPMWVHIPEGARPVRPSQKLPTLKGNGAPPFRGPLSPGGGGVPPRGPVPFAGPXGPLPLVFCPSFFPLLPGFPLWVLNWGLLLGFRFWVFGPFPP

SEQ ID NO: 110085 - protein, 84 aa, Oryza sativa
  Clone ID: PAT_MRT4530_14182C.1.pep
CELGHSLRHPRHCTHLCFRLVCCAGIVTRIYSCHTGIQAMTHDYAQALIADVTIGKCWVRTAGNQVPGIARVRPTDPVFCCLKM

SEQ ID NO: 110086 - protein, 138 aa, Oryza sativa
  unsure (1)..(138): unsure at all Xaa locations
  Clone ID: PAT_MRT4530_14183C.1.pep
FLLGFNRDYKRTGITYIDGNGDWHKLSKGAPEQIIELCYMAVDAXMKVHALIYRYAXDRGLRSLGLSYQTGAGEEQGQQQRHRGRIIGLVPLFDPSRHDSTETIRPTLHMRINVKMITEDQLAIVKETMRLLRMGTNM

SEQ ID NO: 110087 - protein, 71 aa, Oryza sativa
  Clone ID: PAT_MRT4530_14184C.1.pep
LGGSPWTSRGSAPPATRCSGHGRSPAPPPGPCSRIERTPPHGKVSFDLNCGWPQKVFTFFLLLAALKISRL

SEQ ID NO: 110088 - protein, 55 aa, Oryza sativa
  Clone ID: PAT_MRT4530_14185C.1.pep
HALPGLPMEVNMRLTRGMGGVPPMFLAGDELPVMGNTSHPVDRCGWEGQRRVGLL

SEQ ID NO: 110089 - protein, 63 aa, Oryza sativa
  unsure (1)..(63): unsure at all Xaa locations
  Clone ID: PAT_MRT4530_14186C.1.pep
NLVLAAGCLQVGAFGGRSFFXVGCWNIGFFGTSCWXAAGCSPEVXWVLGGIFLLAIGKMQAET

SEQ ID NO: 110090 - protein, 45 aa, Oryza sativa
  Clone ID: PAT_MRT4530_14187C.1.pep
MGNKKARLKSESQQEQAKGTRISNVTSSPHKSKNIVLDVFGKVRK

SEQ ID NO: 110091 - protein, 527 aa, Oryza sativa
  Clone ID: PAT_MRT4530_14188C.1.pep
MNSEENLKKPGESKGSVPTCPRGNASALSHRPYLMAVVAPPSLALPQPPQNPTPKPRRRPPRDVASWTSAIARPAKQGDLPAAAAALSAMLSSPAAPVPNDVTLLTVLSACADSPSSPLARRLALSVHARVLKLFPSHLLLSTCLVRFYFASRLPHLALQLFDAMPVRSAVTYNTVISGLMRNGLVAAAFEVFDGMPAPDKVSWTALIDGCVKNGRHDEAIDCFRAMLLDGVEPDYVTLIAVISACAEVGALGLGMWVHRLVVRQGLERNVRIANSLIDMYARCGQVELARQVFSGMRKRTVVSWNSMIVGFAANGRCADAVEHFEAMRREGFKPDAVTFTGVLTACSHGGLTDEGLRYYDLMRAEYGIAARMEHYGCVVDLLGRSGQLEEAMRVVTTMPMRPNEVVLGALLAGCRMHGDVGMAEQLMQHLLELDPGGDANYVLLSNIYAAVGKWDGAGKVRSLMKARGLRKRPGYSAVEIDGDVHEFVSGDRSHPQAEEISQMLGLLMHEMAGHDYDHVIDCLDGG

SEQ ID NO: 110092 - protein, 316 aa, Oryza sativa
  Clone ID: PAT_MRT4530_14189C.1.pep
MLAASARRVAAAAAASSSHSRLANQLAHALNPQRWIHDRNKKAMELVAKGWSALQEVDRVIDYADRNDKRLIPLLRGAKENFELALEIDNMNTHARLWLAKMHFKYHVPGAFASWSFSYFLFILIPRTCKHIAKASLVTASIVVLSGAALLVEAANMGDPDAQYELGCHLRIENDYVHSDQQAFYYIEKAVDQLHPGALYLLGAVYLTGDCVKRDIASAMWCFHRASEKGHSGAAIAYGSLLLKGAEVPEVITRFNSGKSPSTGKMRKRPIQQDPVKLAKEQFQIAAEAGCDLGLRWLKRLGDYEKQQEQPKQIQQ

SEQ ID NO: 110093 - protein, 948 aa, Oryza sativa
  Clone ID: PAT_MRT4530_1418C.1.pep
MQEPQRIHRDAGGYPAAAAETDPLLAHPPPPRSPAEIEDEEIEDEEIEAASAACCRICLESETEPGDELISPCMCKGTQQFVHRYCLDHWRSVKEYVVEDLRGCYTPPKMDPEQEQRLRTLQLMTIYVISTRASNPHSDSTVERGRAATAAAARRRRRERRQSDAPCLPRLLRRAAAMSAYYNARGSARPRRGYYSGRPTPPPHHHHDAGAELVSGDSHHSAVRASNDSLRRGGGRGPPPSLYGYAPPQPPPALYGAVPYNYGHPQQPGPPYGAVPYNYGPPPPQPQDPQYGYATPNPYVQGHPQPYWRGPTNAGFRPPYAGFRPGAPQQSPRLAEYRRRWRFTQHRPPRQAERFKVLSYNILADYLAQEHQFLYERIPSFIMDWNWRKEKLVFEFGLWSPDILCLQLRYQEDIEFNKIDLRDNVAQICVLESVIPGNVQTESRLSKSHSCSNELGNCSCAFEDDGASNEVLCSDVNADPSIFKEFSGVNEFLLEDEDQLQTTSDGSPSAQQVITSDKRYYDYDPYRWTPDEIKAATGNEDCTFVEHNLKVRSVYTDVEDFEGTKDANKEPLVTSYNRKFMGTVDYIWASEDLQTVQVLDTFPKEILKQTIGFPTKVSPSASRIHAPLLPNPPPLCSSSTLRPPPPPPPPSPSPAKMMSGGGYSALDDPKASGSVPAATGPDPPTIKFADSNLQIFPPSEAKGKISGAYRPPTDADDTFSSSKSGGGGRGGGGGGAGSDDAGQGGWFRMFSVAAYKPYFDVDTSDVVERIWESVFPFRGTFTEKTSENPDLYGPFWTCTTLIFVAASIATFVTYLSHKWHKKEWNYDINLVTWSAGLFYGYVTFVPLGLYVILKYFSAPAGLVQLWCLYGYSLFIFIPASLLSIVPIEIFRWVIAGVAGFMSATFVAMNLRAHIVNSGERWFLIVAGIFLLQLGLAVLLKLYFFTITV

SEQ ID NO: 110094 - protein, 130 aa, Oryza sativa
  unsure (1)..(130): unsure at all Xaa locations
  Clone ID: PAT_MRT4530_14190C.1.pep
KKGARKKKIPPWGKPQTPWGPPPPPKTLPPHKKGKPPRGLQRQTLPPGGNXPSKVWAPPRGGSPFPQTGLNPGGPGIGPPPPFGVVPRKKVSQVLPPQIPNLVLRAHGVPSRKHLVFDHSKYPRPFFLFN

SEQ ID NO: 110095 - protein, 37 aa, Oryza sativa
  Clone ID: PAT_MRT4530_14191C.1.pep
LNNYSVHLPSIYMTAYTHSHYVVDTRIVRLHCCLSEL

SEQ ID NO: 110096 - protein, 333 aa, Oryza sativa
  Clone ID: PAT_MRT4530_14192C.1.pep
MGMELLQQLQPVNGLWEDDGEVRLQPAERDHAHEKRGSRWGKEGHWQPCAALCQASLPGSAPAKVMGNCILSTNVQRVALAASSNLALVLALASNYIANTLYYNPSLTLGTLHKLGVATEIFNLWFGMLQQVKKSGIRANFKREHDKKVCCLGLTSLISLPANHIPPEALERIFKATLELLVSYKDQVAESKWENEAAAEDLDGFDGDEEDEDIESDKEMGYDDEDGDEVSSVNLQKLREARGFQPHYDDDDDDSDDDFSDDEELQSPIDEVDPFIFFVDTIQGMQASDPARFQSLMQTLDFRYQALANGLAQHAEERKVEIEKEKLEKANAQ

SEQ ID NO: 110097 - protein, 48 aa, Oryza sativa
  Clone ID: PAT_MRT4530_14193C.1.pep
KVEEEHNRIQKKTLPAPTRSRSRRWTYRPPLPPPECLTSSDIRHCSHS

SEQ ID NO: 110098 - protein, 130 aa, Oryza sativa
  Clone ID: PAT_MRT4530_14194C.1.pep
MEKKTAQRRILLSTPAFFFLFVTPLFPHPYQARYAIPTNNDLPRHGSDTYPSLTCRDTPPRCWDMDPPVRDTGGVPLVIPGSSLVDGIFVGLRRVFRGFWMGEQYSCYTLADMLDRAMAVAGARFTCGRD

SEQ ID NO: 110099 - protein, 49 aa, Oryza sativa
  Clone ID: PAT_MRT4530_14195C.1.pep
FFIFNTNIAGISLGITETDEQNIEVYRARRHHCCRRLSLLMCTTLTSAD

SEQ ID NO: 110100 - protein, 43 aa, Oryza sativa
  Clone ID: PAT_MRT4530_14196C.1.pep
MPKTKLSLGRAGLTAMYGPIKPWPKGWSDRWQCGQSDRQRSQA

SEQ ID NO: 110101 - protein, 131 aa, Oryza sativa
  unsure (1)..(131): unsure at all Xaa locations
  Clone ID: PAT_MRT4530_14197C.1.pep
ELLWQTLSDLSTDQRALGLVVXRSLPFTAFVLLLSLALLKLVPLCALXAALCLLRFPAVRAXIEFRQHIAMNYLFAPWISWLLLLHSALFLRPDARSYHTLXWAFSLPKVVLNIEIYFFFYENEWSKFINE

SEQ ID NO: 110102 - protein, 523 aa, Oryza sativa
  Clone ID: PAT_MRT4530_14198C.1.pep
MESSAETSAAAAPNGGAAAAEQQQRRRLPDFQQSVRLKYVKLGYHYLISHGMYLLLSPLMALVAVQLSTVSPGDIADLWEQLRFNLLSVVACSTLLVFLSTLYFLTRPRPVYLLDFACYKPDPQRKCTRETFMRCSSLTGSFTDANLDFQRKILERSGLGEDTYLPPAVLRVPPNPCMDEARKEARTVMFGAIDQLLEKTGVKPKDIGVVVVNCSLFNPTPSLSAMVVNHYKLRGNVISYNLGGMGCSAGLLSVDLAKDLLQVHPNSYALVVSMENITLNWYFGNNRSMLVSNCLFRMGGAAILLSNRRSDRRRSKYELVHTVRTHKGANDKCFGCVTQEEDEIGKIGVSLSKDLMAVAGDALKTNITTLGPLVLPLSEQLLFMATLVAKKVLKMKIKPYIPDFKLAFEHFCIHAGGRAVLDELEKNLELTDWHMEPSRMTLYRFGNTSSSSLWYELAYTEAKGRIRKRDRIWQIAFGSGFKCNSAVWKALQTVNPAKEKNPWMDEIDNFPVEVPKISKVGNA

SEQ ID NO: 110103 - protein, 302 aa, Oryza sativa
  unsure (1)..(302): unsure at all Xaa locations
  Clone ID: PAT_MRT4530_14199C.1.pep
MDLERSTSNTASLKKLQDDSALPGAFVSPDLSSSCSRFTSLDSNTVGRRVGQIMISAASKADDIPIALCDKDATERAAAINALPLSDAIGPLVDHQAATSLKEGVAKEASDAVATTTSGSNILKKGRKFSSILRTHWKATNSASHEEKENLRRMARAKVAQGREMEEARAVTLSANQRAEQLARDLAEAREDLLKMRELVAGNERDVDVEDVQQRGQPDTPVVILAITLEPHVLETKLEVAELERAMVEVKEDQAVEALRGHEVWFNSYLKSYCTAMAGVCKELRVPSXDPKESAAGCISWL

SEQ ID NO: 110104 - protein, 261 aa, Oryza sativa
  Clone ID: PAT_MRT4530_1419C.1.pep
RYQTLSSAASSPGISPSVSVSSMSNATSQTTAKSTRGLSPRRTSTSIGSGALSRNIDLPENDKRPASSSASLRGNSPRRRLASDSVNAVVKNIDFAEKDSRAAISSTSSRGFSPRRRLASDGLDAISRSTDFSDKDSRPSTSSSSSTSSASLRGMSPRRRLASDGISKNITFTARSTAALRGVSPRRQLASDRVDSISKNTDFTSTSSMASRGTSPRRRLASDGVNALLKSTDFTDKDHRPSTSSAALRGMSPRNRVTSKS

SEQ ID NO: 110105 - protein, 775 aa, Oryza sativa
  Clone ID: PAT_MRT4530_141C.1.pep
MELSKVQEIEAKAQKLELELASCTALLSNIPDVSSFGDIPQKIADLQKQALTNLNKVGEVTSQLKELKVALEFADLSKQRAEGEATLAKERAESATREIKRLELLLAAISEERDRLRKDHAVSKSRDGDDASSKVTIQNMESDLSRMEKVVTELESTIRDQRELISQQHTELNLMNEKLSIESRKAKSLERDGDQLRSQVALLESKLGHGDYSASSTKVLRMVNTLAVDNEAKQTIEALQAELKKTKERLQAVEELKGQADVGTVVDVNIAEKLAQLKNQIATLEKREERYKAVFAERISVFRKACCSLFGYKIVMNDQQQSNGIPVTRFILHSVYAQSDDEKLEFDYESGSTNIVVNDYTSQHEIAQQTLSTSERQPQPEKKPPRTRPPLPGKAVAALCVASFVVGLLLSGRVVVPLLPPGSSSPASNYKTSFSTGCENKRAKLGESNPTDIMNEVSRTHHAIQSLDKAVSSLEMELAVERARSSAAVGAGTAVSSLGPQKAFVVIGINTAFSSKKRRDSLRDTWVPRGDKLRRLEKEKGIVIRFVIGRSGAAAAGDGPLDRAVDAEDAENKDFLRLDHVEGYHELSSKTRVYFTTAVATWDADFYVKVDDDVHVNLGMLTSRLAKYRTRPRVYVGCMKSGPVLSQKGVKYHEPEYWKFGDEGNRYFRHATGQIYAISKDLAAYISINQPILHRFANEDVSLGAWLIGLEVEHVDDRSMCCATPPDCEWKKRAGNVCVASFDWSCSGVCKSVDRMKHIHRACGEGQGAVWSVAT

SEQ ID NO: 110106 - protein, 79 aa, Oryza sativa
  Clone ID: PAT_MRT4530_14200C.1.pep
GPRAAPPSPRRRTAPSGAPPASSPRGGPAPRGRPASPGGTAGPRRRRPRSPPSPAPAPPPGPPPVVSLSLGLPSRSSPF

SEQ ID NO: 110107 - protein, 62 aa, Oryza sativa
  Clone ID: PAT_MRT4530_14201C.1.pep
MVPLLRDRPVDVEEEEVPAIVIVIVHLSWTAATVIVTASMVLAAMAVGGDDVAWCGGDASRH

SEQ ID NO: 110108 - protein, 62 aa, Oryza sativa
  unsure (1)..(62): unsure at all Xaa locations
  Clone ID: PAT_MRT4530_14202C.1.pep
IKITLKNQNKNLPKSKLQIFLGHQGGKQINQAFPWARMVALKCHRTSXEPRAGHCRXTGGRS

SEQ ID NO: 110109 - protein, 57 aa, Oryza sativa
  Clone ID: PAT_MRT4530_14203C.1.pep
PDDPDTFLELKLKELKNVRLAMFSMLGFFVQAMVTGKGPFDTLLVQVADPVAFNVWA

SEQ ID NO: 110110 - protein, 708 aa, Oryza sativa
  Clone ID: PAT_MRT4530_14204C.1.pep
MHFKKLSNKDWKVIAQRIEKKLSSWKDNFQSNILALILGTIIKAQGLWTAIDPCYAEYREDRAALSAILQAVPREMLRGLAKHDTAKAAWDAIKTMRVGVDRVSEAREQGFRRQFEAMRFKDGETPEEFAMRLTAIVADMRNMGGVMEDEHINKKLLRVVPKKYKPVAISLEQLLDVKTMALEELIEWLSTVDSYSDDEEASDGGKLYLTKEQWQAEANANLVQAEEEPTLLMAHVMGVSLAGEAAVGRTPCVQEVHLTEKKVVLDHEDGRKEEKTGEWFLDTGATNHLTGARSAFAELDTGVVGTSKNGDHRSLEAVYYIPKLRKNIVSVGRLDARGYDAHIWHGVFTLRDPEGMQLAKLNLATLICMAASGSELAWRWHARFGHLNFLALRRLAKGGVVRRIPQIDHIDQLCDGYLAGKQHRTPFPEEAQYRAQTALELVHGDLCGPITPATTGGKKYFLLLVDDMSHHMWIRLLSAKHEASAAIKPAWRRIAIGSSWRCALIAGQNSVVERRNQTVVAAARSMLKAANMLAYFWGEAVVAAVYVLSKSPMKSLDGVTPYEAWYGRRPTVEHLRVFECVGYVKTAKPNLRKLDDRSTRMVFIGYEQGSKAYKMYDFVTTFWDWGSNTDEEGDQDAYVEFTVENFTIPVQGSETHAQDAAATPTMLATSPTSSTGTATTLPSGVEFCSPPTDASEGTDEGPRSYRTV

SEQ ID NO: 110111 - protein, 1282 aa, Oryza sativa
  Clone ID: PAT_MRT4530_14205C.1.pep
MSYTPPGRRGGGGGGGSGNGRGSASGSGVGNCADGASLPLVPQGRDAGHTARLPILSRTNYPDWALLMRVNLQAQGLWTAIDPGYAEYREDRAALSAILQAVPREMLRGLAKHNSAKATWDAIKTMRVSVDRVREAKEQGFRRQFEAMRFKDGETPEEFAMRLTAVVADIRDMGGVMEDEHINKKLLRVVPKKYKPVAISLEQLLDVKTMALEELVGRLSTVDSYSDDEEASDGSKLYLTEEQWQARVKQREQEGSSSSNKGRAGSSNQNRRGKAGDSPKGKKMATGGHGRRDISKVKCFNCDEYGHYSKQCRKPRRQRRGEANANLVQAEEEPTLLMAHVMGVSLAGEAAIGRTPCVQEVHLTEKKVVLDREDGREEEKTSEWFLDTGATNHMTGARSAFAELDTGVVGTVKFGDGSVIDIQGHGTVVFQCKNGDHRSLEAVYYIPKLRKNIVSVGRLDARGYDAHIWHGVFTLRYPEGMLLAKFQAGVEKESNRKLMALRIDRGGEFTSVEFMEYCADTGVKRQLTAPYSPQQNGVVERRNQTVVAAARSMLKAANMPAYFWGEVVVAAVYVLNRSPTKSLDGVTPYEAWHGRRPTVEHLRVFGCVGYVKTAKPNLRKLDDHGTRMVFIGYEQGSKAYRMYDPVARRLCVSRDVIFDGTTFWDWGSNTDEEGDQDAYVEFTVENFTVPVQGGETHAQDAAVTPTMLATSPTSSTGTAITLPSGVEFCSSPTDASEGTNEGPRRYRTVANTLATTAPILDFDYSDQCLMAAEEPANFLEAEQESCWRKAMLEEMDSIEGNNTWFLCDLPSSHRAIGLEWVYKIKRDAKDAIVKYKARLVAKGYVQQHGVDFDEVFAPVARMETVRLLIAMAAHQGWEVHHMDVKSAFLNRELEKDVYVVQPPGFVVDGKEDKVLKLKKALYGLKQAPRAWYAKLDSSLVSLNFVKSGVESAVYTQGEKNSRLVVGVYVDDLIITGASLMEINKFKEQMQALFKMSDLGLLSYYLGMEVKQGKEGITVSQGAYAAKILDKAGMRDCNPCQTPMDARLKLSKEGGECVEETQFRSIIGSLRYLVNTRPDLSYSVGYVSRFMEKPTSEHWAAMKHILRYVAGTLNLGVEFRKKQHQVPQLNGYSDSDMAGDIDDRKSTTGVLFKLGDSLISWQSQKQKVVALSSCEAEYIAAATAAVQGVWLARPIGELEGQEPGCALIKVDNKSAISLCKNPVLHDRSKHIDTKFHFIRDCVDQKRVEVEYIRSEDQLADILTKPLGKIRFLELRGKLGLVPV

SEQ ID NO: 110112 - protein, 80 aa, Oryza sativa
  Clone ID: PAT_MRT4530_14206C.1.pep
PQFFRGRGPQKGTPRFRGSGCHFPRPLLFKCRMQKFGGSWLAVRGATRRKAFLSLGGAPNFPVLPLPPAWATLWGGPYIN

SEQ ID NO: 110113 - protein, 835 aa, Oryza sativa
  unsure (1)..(835): unsure at all Xaa locations
  Clone ID: PAT_MRT4530_14207C.1.pep
MPDAPPSSESPELTSSASLRQAALTRLGSWDGAAQGLWTAIDPCYAEYREDRAALSAILQAVPREMLRGLAKHDTAKAAWDAIKTMRVGVDRVSEAREQGFRRQFEAMRFKDGETPEEFAMRLTAIVADMRNMGGVMEDEHINKKLLRVVPKKYKPVAISLEQLLDVKTMALEELIEWLSTVDSYSDDEEASDGGKLYLTKEQWQAEANANLVQAEEEPTLLMAHVMGVSLAGEAAVGRTPCVQEVHLTEKKVVLDHEDGRKEEKTGEWFLDTGATNHLTGARSAFAELDTGVVGTSKNGDHRSLEAVYYIPKLRKNIVSVGRLDARGYDAHIWHGVFTLRDPEGMQLAKLNLATLICMAASGSELAWRWHARFGHLNFLALRRLAKGGVVRRIPQIDHIDQLCDGYLAGKQHRTPFPEEAQYRAQTALELVHGDLCGPITPATTGGKKYFLLLVDDMSHHMWIRLLSAKHEASAAIKPAWRXRIAIGSSWRCALIAGQNSVVERRNQTVVAAARSMLKAANMLAYFWGEAVVAAVYVLSKSPMKSLDGVTPYEAWYGRRPTVEHLRVFECVGYVKTAKPNLRKLDDRSTRMVFIGYEQGSKAYKINTDEEGDQDAYVEFTVENFTIPVQGSETHAQDAAATPTMLATSPTSSTGTATTLPSGVEFCSPPTDASEGTDEGPRSYRTVVNTLATLTPILDFNYSDQCLMAAEEPASFLEAEQESCWRKAMLEEMESIEGNNTWTLYDLPSSHRATGLKWVYKIKRDAKDVIVKYKARLVAKGYVHQQGVDFDEVFAPVTRMETVRLLIATAAHQGWEVHQMDVKLAFLNRELEEDA

SEQ ID NO: 110114 - protein, 96 aa, Oryza sativa
  Clone ID: PAT_MRT4530_14208C.1.pep
MAISEMSALFFLFSALLRSSLVHSQGLQIGFYDNNCPDAEDIVRSTVEKYYNNDATIAPGLLRLHFHDCFVQGCDASVLISGASSERTAPQNFGIR

SEQ ID NO: 110115 - protein, 893 aa, Oryza sativa
  Clone ID: PAT_MRT4530_14209C.1.pep
MRVNLQAQGLWTAIDPCYAEYREDRAALSAILQAVPREMLRGLAKHDTAKAAWDAIKTMRVGVDRVSEAREQGFRRQFEAMRFKDGETPEEFAMRLTAIVADMRNMGGVMEDEHINKKLLRVVPKKYKPVAISLEQLLDVKTMALEELIEWLSTVDSYSDDEEASDGGKLSSGRPVSSSGSRRDLAAATRAGRALATRTVEARPAIHRRERRWPPAAMAVVKCFNCDEYGHYSKQCRMPRRQCRGEANANLVQAEEEPTLLMAHVMGVSLAGEAAVGRTPCVQEVHLTEKKVVLDHEDGRKEEKTGEWFLDTGATNHLTGARSAFAELDTGVVGTGRGTVVFQSKNGDHRSLEAVYYIPKLRKNIVSVGRLDARGYDAHIWHGVFTLRDPEGMQLAKVNRDSSYLYVLKLNLATLICMAASGSELAWRWHARFGHLNFLALRRLAKGGVVRRIPQIDHIDQLCDGYLAGKQHRTPFPEEAQYRAQTALELVHGDLCGPITPATTGGKKYFLLLVDDMSHHMWIRLLSAKHEASAAIKPAWRRIAIGSSWRCALIAGQNSVVERRNQTVVAAARSMLKAANMLAYFWGEAVVAAVYVLSKSPMKSLDGVTPYEAWYGRRPTVEHLRVFECVGYVKTAKPNLRKLDDRSTRMVFIGYEQGSKAYKINTDEEGDQDAYVEFTVENFTIPVQGSETHAQDAAATPTMLATSPTSSTGTATTLPSGVEFCSPPTDASEGTDEGPRSYRTVVNTLATLTPILDFNYSDQCLMAAEEPASFLEAEQESCWRKAMLEEMESIEGNNTWTLYDLPSSHRATGLKWVYKIKRDAKDVIVKYKARLVAKGYVHQQGVDFDEVFAPVTRMETVRLLIATAAHQGWEVHQMDVKLAFLNRELEEDA

SEQ ID NO: 110116 - protein, 101 aa, Oryza sativa
  unsure (1)..(101): unsure at all Xaa locations
  Clone ID: PAT_MRT4530_1420C.1.pep
PCPLYRNWSCPLQALLHVQLGVETKGNPKHAFPSKETSRPDETEXDSDLPXRPATHRRSDRPSTGGLTAQHTAVRPAHFRGNRWTFKFRQYYRSGSPVRPA

SEQ ID NO: 110117 - protein, 93 aa, Oryza sativa
  Clone ID: PAT_MRT4530_14210C.1.pep
ATCVSQGTRRHVRPYIRTAFDSVVPGSSSTPSRCMVYAMVGADRGGRRRRRNGSSIDHPRLGLALPAAVGAAAHGVRHAHATLVWARRRRRRG

SEQ ID NO: 110118 - protein, 59 aa, Oryza sativa
  Clone ID: PAT_MRT4530_14211C.1.pep
IFVVRLSPHIRYFFLLKHEYMSTTCHMYTFMVFIIETLWGAPRYTPTRELCRCVVLHLL

SEQ ID NO: 110119 - protein, 656 aa, Oryza sativa
  Clone ID: PAT_MRT4530_14212C.1.pep
MATMKKLAARDGRAASNGRLLRLVARAALLAVVVLSLVSLRLVLSPATAVGDDGELYLPVLLAEVSDRGYLRHGSRSVFVGDAGSWAPFLERHHVAVFRAGKLRELADESVDAVLFDGDAVQLGAVNRVLKLGGVAAGFATSGSSTLQPPDNYKAVFAHRSEAAIAFAVEKTTPPTTSAAVTASPVGPHRKLLALPGSKKDDALAGLEAVLLEPPQRQHRRIIRRLRPRYLPELTGDSLEGYRRRTFIDVAPSRGGGAASWFKKHYPRGKRVFDMVRLDAADATEPAASSSAAGIAEWLEGNVREEDYVVVKAGVEAVEEILRRRAAVRRVDELFLDCDAGAGADAARRPYWECLALYGRLRDHGVAVHQWWELMNARPRHRDYWANILCGGSRGLEAKPVSIDSISARRIGGREDSEAPTAIRIKVWGARSSTSTLGLVFAGLYNQRSDVEHEQQRRRRGGAPVFRRLEDGDAGGGWCSRAQSIRGVRWLAEKVKEKAETATTRARPWQQKEWRWWLVVGAKREGKREKWVHLVEANMMAQGLGLQSCGRGDRPVAAMAATALWLARELNTPRAPLHAASQRWTGRRWWCSARAGAGCRRRRAATSWAVAAGVSAMVLTALKRSLTQTKDSAAARTLLFPHSTVTVTPFFFFVPS

SEQ ID NO: 110120 - protein, 1045 aa, Oryza sativa
  Clone ID: PAT_MRT4530_14213C.1.pep
MSYTPPGRRGGGGGGGSGNGRGSASGSGVGNCADGASLPLVPQGRDAGHTARLPILSRTNYPDWALLMRVNLQAQGLWTAIDPGYAEYREDRAALSAILQAVPREMLRGLAKHNSAKATWDAIKTMRVSVDRVREAKEQGFRRQFEAMRFKDGETPEEFAMRLTAVVADIRDMGGVMEDEHINKKLLRVVPKKYKPVAISLEQLLDVKTMALEELVGRLSTVDSYSDDEEASDGSKLYLTEEQWQARVKQREQEGSSSSNKGRAGSSNQNRRGKAGDSPKGKKMATGGHGRRDISKVKCFNCDEYGHYSKQCRKPRRQRRGEANANLVQAEEEPTLLMAHVMGVSLAGEAAIGRTPCVQEVHLTEKKVVLDREDGREEEKTSEWFLDTGATNHMTGARSAFAELDTGVVGTVKFGDGSVIDIQGHGTVVFQCKNGDHRSLEAVYYIPKLRKNIVSVGRLDARGYDAHIWHGVFTLRYPEGMLLAKALRRLAQGGMVRGLQQIDHNDQLCDGAQTALELVHGDLCGPITPATPGGKKYFLLLVDDMSRHMWIRLLSAKHEASAAIKQFQAGVEKESNRKLMALRIDRGGEFTSVEFMEYCADTGVKRQLTAPYSPQQNGVVERRNQTVVAAARSMLKAANMPAYFWGEVVVAAVYVLNRSPTKSLDGVTPYEAWHGRRPTVEHLRVFGCVGYVKTAKPNLRKLDDHGTRMVFIGYEQGSKAYRMYDPVARRLCVSRDVIFDGTTFWDWGSNTDEEGDQDAYVEFTVENFTVPVQGGETHAQDAAVTPTMLATSPTSSTGTAITLPSGVEFCSSPTDASEGTNEGPRRYRTVANTLATTAPILDFDYSDQCLMAAEEPANFLEAEQESCWRKAMLEEMDSIEGNNTWFLCDLPSSHRAIGLEWVYKIKRDAKDAIVKYKARLVAKGYVQQHGVDFDEVFAPVARMETVRLLIAMAAHQGWEVHHMDVKSAFLNRELEKDVYVVQPPGFVVDGKEDKVLKLKKALYGLKQAPRAWYAKLDSSLVSLNFVKSGVESAVYIQGEKNSRLV

SEQ ID NO: 110121 - protein, 163 aa, Oryza sativa
  unsure (1)..(163): unsure at all Xaa locations
  Clone ID: PAT_MRT4530_14214C.1.pep
GGRGDSEAPTTIRIKAWGARSSTSTLGLVYAGLYNQRXQQRRREGGAPVFRQLEDGDAGGGWCSRTPRFRGGRWLAERVKEKAGTATTRARPWQQKEWRWWLVVVAKREGKGEKWVHLVEENTMAQWLGRRGTGGGDRPVADMGRRERARFDLGKRGGMAGYL

SEQ ID NO: 110122 - protein, 259 aa, Oryza sativa
  Clone ID: PAT_MRT4530_14215C.1.pep
MAGHRDYWANILSGGSRGLEAKPVSIDNISARRIGGDAGLVGWKCYSDNRREDSEAPTAIRIKAWGARSSTSALGLVFAGLYNQRSDVEHEQQRRRRGGAPVFRRLEDGEAGGGWCSRAPRILGGRWLAERVKEKAGTATTRARPWQQKEWRWWLVVVAKREGKREKWVHLVEANMMAQGLGLQSCGRGDRPVAAMAGHEKRERERELGFSGGALGMARSGARHTSLRPPVPLHERKGAGAARCCRCYWTAGPLSTRMH

SEQ ID NO: 110123 - protein, 44 aa, Oryza sativa
  Clone ID: PAT_MRT4530_14216C.1.pep
MTWFVLSEPGAGKTAAASAGGVRQMVSRTCCSVISGGRRCPRQG

SEQ ID NO: 110124 - protein, 640 aa, Oryza sativa
  Clone ID: PAT_MRT4530_14217C.1.pep
MVGVLLLLSIMPLAAGELLAQLCGNGGNYTANGTYQSNLARLAAALPSNASSSPDHFATATAGQAPDAAYALALCRGDVANATACGDCVAASFQDARRTCPSDKSATIYYDDCLLRFAGDDFLAAPNITENATLFQAWNQQNITGDAAVAAANVRELLTVTARTAAAAARRFATGFMDGSSESKQTLYSLAQCTPDLAAGDCLACLQRLIAMVNSTTSVRLGGRVLLLRCNLRFEAFVFYAGEPTRRVSPPGSTPAPDSIAPTKNRKKSKSWVIAAIAAPVAAVVLCLIVCYYCRWSRRFRKDRVRLREKRSRRFRGDELICEMEGEISEFSVFEFREVIKATDNFSEENKLGEGGFGPVYKGLFSEGLEIAVKRLASHSGQGFLEFKNEVQLIAKLQHRNLVRLLGCCSQGEEKILVYEYLPNKSLDFYIFDERKKDLLDWNKRLVIIEGIAQGLLYLHKHSRLRVIHRDLKPSNILLDSEMNPKISDFGLAKIFGSNSNEGTTRRVVGTYGYMAPEYSSEGLFSPKSDVFSFGVIILEIISGKRNASLDQCEDFINLLGYAWKLWSEERWLELLDASLVTNWQSSCMLRCINIALLCVQENAVDRPTMSNVVAMLSSESMVLDEPKHPAYFHINENIL

SEQ ID NO: 110125 - protein, 66 aa, Oryza sativa
  Clone ID: PAT_MRT4530_14218C.1.pep
PLGVGKCLKRPIPFSGPGFSRRFGVEANGLFPPWPKPRINKRSHASVLRSPSGTPSVSLNVGCFLG

SEQ ID NO: 110126 - protein, 544 aa, Oryza sativa
  Clone ID: PAT_MRT4530_14219C.1.pep
MMNACCLCLTDGTEVKSRMPGDATYYIPAYSPISARPQLHAGVDPMRMMHRRAILRPASCYAVSGMYEAASAFRWLSQPNAHARTSSSSIAYLSARTPPPLWAIGSRARILPCRAKYFDFGICIGYDHHQTALLCFYLPDKVTTIMATCTARQLVFDVRDFGAVADGQTDNSKAFERAWAKACAAPGRAAVVVPAAGGGGGGGGGYLLHPVVFRGPCKGFVEVRVAGVVRAPAGLDAFRGYHEWINFAGIDGLLVTGGGTFDGRGASSWHLNDCPWKPDCVPPPSSIKLGSVRNATITGVTSLDSKFFHVTIVGSHDVEVSHVSIRAPRDSPNTDGVHIQGSTGVRITDTAVATGDDCVSVGPGSADVTVSGVSCGPGHGISVGSLGRSPGEADVRRLRVSNCTIAGTANGVRIKTWRGGQRSSAAAAAAAAVSGLVFEDIVMRRVRNPIIIDQEYCPYLSCHHQSERRPSVVRISDVKFRNIRGVSATQVAVKLSCSAASPCRGVELRDIDLRYVRRGVATVSRCANVAGGVAGGTLVPPPCI

SEQ ID NO: 110127 - protein, 629 aa, Oryza sativa
  Clone ID: PAT_MRT4530_1421C.1.pep
MDACGIRAPGDVLLRKSELSSAAAAAKNYGNGHDDAAVRRKAAAGSPATPRRHPSPNAGRSSAAAAEAAGSQARRSQSTERRPATPSRLSPGGSRAAAPSSRISAPTSPSSAPSSPSSSSSSSSTPVRDAVAAESQSAPRRLAGGRAPPDGLWPSMRSLSSSLQLEAKGKRSNGGSADQAKARDAGDRKRSPSRGRSAAEQQPENPHAKVIDHHRWPAMMGGRVSVSAMSRSVDLTDKISRPALSSIPSRGVSPKKATMASTTNALARSIDLADKIDRLVSLSVSSPRTPTASNGAADESKSMSVSKGTKPAAVAIPSRVSAIITATSGGIRALSKSMDLTEKDIGTLSSAASSPGISPKKSAPPKRLARTLSSPSPTKASSISSFTPRRMPSPSRNRPSTPVSPCSSTRSDSASSILSYMGDVTRGKRSPSHMEDAHQLRLLYNRSLQWRFTNAYVDEMQSVQKMSAETMLYSVWDANSSLCDSMVMKRSYVQRLRQEVKLGVVLKEQMDYLTHWAALETEHSTSLSSAIEALRASTLRLPVTGGAKADVFTVKNAVSSAVDIMQAMGSSVCYLLSKLQATHSLVTELSAVAANESSMLNEYRELLGTAAALQVLESSLRTQLIQETE

SEQ ID NO: 110128 - protein, 82 aa, Oryza sativa
  unsure (1)..(82): unsure at all Xaa locations
  Clone ID: PAT_MRT4530_14220C.1.pep
SGSCISTNPSPSPSHALRRRHFTLAKRRELAPDLESXEGSSTSLRSDAXATYTTTAEDDVQAVACAIILIAAKFPEAIRQLV

SEQ ID NO: 110129 - protein, 83 aa, Oryza sativa
  Clone ID: PAT_MRT4530_14221C.1.pep
CRLSPSPSFKLAMVHDRCASFQESVRVWTPSSVWPYVSRMLAGVLLVPVFGCCSLEGEVYSVPEVGVCFQVLPRPCVIWCGHF

SEQ ID NO: 110130 - protein, 69 aa, Oryza sativa
  Clone ID: PAT_MRT4530_14222C.1.pep
MAGRAAPLRSSGAGGRQLVVLILLLLILFLFTAPIVMRDGKGGICEERQKSRLEAGTYLLLPCCSRDEG

SEQ ID NO: 110131 - protein, 125 aa, Oryza sativa
  Clone ID: PAT_MRT4530_14223C.1.pep
MARRRRQDGGGRVNPRRAGGDKGNGGRSPPDPDDGNGNLEDDWRRCRRRRQRLATSTTMVALQRGFKMLAVVLSAAGSPTTPPRPPPCRRRRPSARAEELRRTILVHGSRCSRRWRGLGCLHHPS

SEQ ID NO: 110132 - protein, 340 aa, Oryza sativa
  Clone ID: PAT_MRT4530_14224C.1.pep
MGEDLVTTLSMENGGGGGGGGHHSLCTLLSMDPAGHLDDRAVGVMVQPRIGDGAGRAHAVSLSGAHPPDINQPWQTDLCDMLDVSLGPQIQVYDAEALAVLSSAPKAGNRKAAKRGDSIWGAWFFFTFYFKPLLADKCKGKVTRDANGVSGFDKTDLRLDMFMVQHDMENMYMWVFKERPENALGKMQLRSYMNGHSRPGEPQFPFSVDRGFVRSHRMQRKHYRGLSNPQCIHGIEVVRSPNLASITEVDRRRWVELTGRELNFAIPQEACDFGTWRTMPNTEIELDRPHPVMKGNVHQHPKKLLNGSGLNLSSPSNHSGEDGMDLSPVSSKRRKEVFPH

SEQ ID NO: 110133 - protein, 73 aa, Oryza sativa
  Clone ID: PAT_MRT4530_14225C.1.pep
MVAKLRIKEHHLSSHKFYLSIIRGMSEEQGFTYCADYHAYRGTIIAVIVLPRGGGNLGPNSVEDLYLSAEIPS

SEQ ID NO: 110134 - protein, 58 aa, Oryza sativa
  unsure (1)..(58): unsure at all Xaa locations
  Clone ID: PAT_MRT4530_14226C.1.pep
MEQSNCKNENMFDSGEDVHGHLIQRGFMKGYTYWVKHGXQESGSGAAADRSGWIRQRS

SEQ ID NO: 110135 - protein, 153 aa, Oryza sativa
  unsure (1)..(153): unsure at all Xaa locations
  Clone ID: PAT_MRT4530_14227C.1.pep
LSTVPPPPPPDPLPTPPDAPASPTPPVTPPPIAATPXYTPPDPPPPPLPXPSLPPPTPHTXPSLPRQMIMIPPYAPFGSPSSPISLPIILLRILPHTASRPVSTSSARRTSDSPGQHPTRTLQAPQTPRPPTPRNNPTRRTTKQANRNKRPEK

SEQ ID NO: 110136 - protein, 616 aa, Oryza sativa
  unsure (1)..(616): unsure at all Xaa locations
  Clone ID: PAT_MRT4530_14228C.1.pep
MENLISLVNKLQRACTALGDHGEESALPTLWDSLPAIAVVGGQSSGKSSVLESVVGKDFLPRGSGIVTRRPLVLQLHRIDGDREYAEFMHLPRKRFTDFALVRKEIADETDRETGRSKQISSVPIHLSIYSPNVVNLTLIDLPGLTKVAVDRLPANXEGQPDSIVQDIENMVRSFIEKPNCIILAVSPANQDLATSDAIKISREVDPKGERTFGVLTKIDLMDKGTDAVDILEGRSYRLQQQWIGVVNRSQQDINKNVDMIAARRREREYFSTTPEYKHLAHRMGSEHLAKSLSKHLETVIKSRIPGLQSLITKTIAELETELNRLGKPIATDAGGKLYTIMEICRMFDGIYKEHLDGVRPGGEKIYHVFDNQFPVAIKRLQFDKQLAMENVKKLITEADGYQPHLIAPEQGYRRLIESCLVSIRGPAEAAVDAVHAILKELVHKAINETHELKQFPTLRVEVGNAAFESLDRMRDESKKNTLKLVDMECSYLTVDFFRKLPQDVEKGGNPSHSIFDRYNDSYLRRIGTTVLAYINMVCSTLRNSIPKSIVYCQVREAKRSLLDHFFTELGAREIKQLSKLLDEDPAVMERRTNLAKRLELYRSAQAEIDAVAWSK

SEQ ID NO: 110137 - protein, 165 aa, Oryza sativa
  unsure (1)..(165): unsure at all Xaa locations
  Clone ID: PAT_MRT4530_14229C.1.pep
QPSCPIFRQQPSFPPAARRRQPSPAPAARRRGLLARPPPAAXGPSPPPSGLSPPPAARRRRLLARPQPSMPPXRPSASAPRPPTARRRPPVGSRLLARPPPEKSSGGGREWHGDGVSFSWPSGGLTGTATRSTAALQACSRSAMARSAFPNVHCMKSTLVSFAAQ

SEQ ID NO: 110138 - protein, 46 aa, Oryza sativa
  Clone ID: PAT_MRT4530_1422C.1.pep
DGWSSIGKKVKFEPVVCFFVQVLTLINEIRCGELFIKLACLIQGGN

SEQ ID NO: 110139 - protein, 76 aa, Oryza sativa
  Clone ID: PAT_MRT4530_14230C.1.pep
QIHLFILRKTIKHITLAWTIKLERGGQGLQNYGLGALRMIVELWRGNKSTRGIRKKSLRKGVFLMERVGHLRGLTT

SEQ ID NO: 110140 - protein, 61 aa, Oryza sativa
  unsure (1)..(61): unsure at all Xaa locations
  Clone ID: PAT_MRT4530_14231C.1.pep
LRLHRPACLRRRRLVSLHXLTYHAAISGHLRFHRRPPSSPPTGVFIVIDGRLCSHIGHFCH

SEQ ID NO: 110141 - protein, 45 aa, Oryza sativa
  Clone ID: PAT_MRT4530_14232C.1.pep
MRLIKKNLTHTEKVRSQALRVCGKIATSQKSMKHKRCIQVQAVEK

SEQ ID NO: 110142 - protein, 137 aa, Oryza sativa
  unsure (1)..(137): unsure at all Xaa locations
  Clone ID: PAT_MRT4530_14233C.1.pep
KNKKIKKKIKKKNPAQNRVLQKKKKRAPIFNPGGEHKPGLKGGTHGTKNVLLFWGGEGPPPPPGKPRKGENLGFPGDPGNFKPALTLGXKNTHPKKFFAPPLGSKKPEVGEKRPLNLPPREKPPRGGGQKKPASHNE

SEQ ID NO: 110143 - protein, 343 aa, Oryza sativa
  unsure (1)..(343): unsure at all Xaa locations
  Clone ID: PAT_MRT4530_14234C.1.pep
MGEEAAAATVTAAAAAAASGGAPHLLLICFPGQGHVNPMLRLAKRIAAKGLVVTFSSTSAIGAKLVESSGVSVGGDGVPLGGGRIRFEFLEDGFDGSDLDELMRHLGTAGPAAFAELLARQEAAGRPSCAVFSLYYHRVHGLVEFPPEDDLDARLTLPGLPAMSVADVPSFLLPSNPYMSLTEAIQQQIRTIDKGTWVCVNSFTELERHVADALTRVATSPXRPPLIPVGPLIELEGDAAVRGDMIRAADDCVGWLDEHPPRSVVYASLGSVVVLSAGEVAEMAHGLASTGRPFLWVVRPDSRALLPEGFLDAVAGRGMVVPWSPQEQVLVHPAVACFFTHWG

SEQ ID NO: 110144 - protein, 477 aa, Oryza sativa
  Clone ID: PAT_MRT4530_14235C.1.pep
MGEEAAAATVTAAAAAAASGGAPHLLLICFPGQGHVNPMLRLAKRIAAKGLVVTFSSTSAIGAKLVESSGVSVGGDGVPLGGGRIRFEFLEDGFDGSDLDELMRHLGTAGPAAFAELLARQEAAGRPVACVVGNPFIPWAVDVAAAAGILSAVLWVQSCAVFSLYYHRVHGLVEFPPEDDLDARLTLPGLPAMSVADVPSFLLPSNPYMSLTEAIQQQIRTIDKATWVFVNSFTELERDVVDALRGVATSPPPPPLIPVGPLIELEGDAAVRGDMIRAADDCVGWLDEHPPRSVVYASLGSVVVLSAGEVAEMAHGLASTGRPFLWVVRPDSRALLPEGFLDAVAGRGMVVPWSPQEQVLVHPAVACFLTHCGWNSTLETVAAGVPVVAFPQWGDQCTDAMFLVDELGMGVRLRAPLRRGAVRDAVDAAVAGPDAGAMRSSAAAWSAAARAAVAAGGSSDRHVEAFVEEVKARAAKA

SEQ ID NO: 110145 - protein, 165 aa, Oryza sativa
  Clone ID: PAT_MRT4530_14236C.1.pep
MVVGLVGETRINASREVYGTKRRRRRSHNRGCARLSPSLPKSKLQACICQGSRLACRAGHRSQVRLLPDLLARTVKEAATKGDEGEEGVEGPASTAASESEDSGCGAQTEIRSTEGQLAELAPTRWRQPPPPRRRAPLPSSSPSPPLLPLPSLPPVATPPAFVRS

SEQ ID NO: 110146 - protein, 102 aa, Oryza sativa
  Clone ID: PAT_MRT4530_14237C.1.pep
MGLPQPQPQTQSNWTTTTMLTTGTNPPSPFFSLESPVVKSEPVCSASESFSSADGEVLLTGSSHVVPEMQLLDFLEGPWDESESFLLPKYPSLEIDWDAILS

SEQ ID NO: 110147 - protein, 51 aa, Oryza sativa
  Clone ID: PAT_MRT4530_14238C.1.pep
VRKSFPLSLLNPEHPLGTPSPDPGVIGKEKCSLLSPPNITLPWNTQPLGPF

SEQ ID NO: 110148 - protein, 177 aa, Oryza sativa
  unsure (1)..(177): unsure at all Xaa locations
  Clone ID: PAT_MRT4530_14239C.1.pep
MKKVLTLLTVKNCCRNDYKDYAEICFKEFGDRVKHWITLXNEPWNFCSMGYASGTMAPGRCSSWEKGKCRVGDSGREPYTACHHQLLAHAETVRLYKEKYQFTEEAIRQSPFIRDNNLNRRSAKLSSIIQNYLLLGIQFQLGPGGGGRVFSVQTLADLPLLFLIIIYNIVKLGKRTP

SEQ ID NO: 110149 - protein, 241 aa, Oryza sativa
  Clone ID: PAT_MRT4530_1423C.1.pep
MPRPVASALFVTGRRPASTSSGQIWEGGREGSRPTMPCGHLVLRVMSACENKYPTSVLDISVIGTGPLDMSNLAFTESDGDVGSCVDKGGSIGGCMGGAILPAASSGGAKGRLAWAGAGGRGLVSLIRLAGSGIMEGQQGALEQISRAVEREGPDASTAVGAESLPPVPGGRVADDCRRWPPAPGDKTRGAAQPAGGACAKQEERGDRRWDGSNVIWGRTGAARLRGVLVWPCASPLRPYR

SEQ ID NO: 110150 - protein, 80 aa, Oryza sativa
  Clone ID: PAT_MRT4530_14240C.1.pep
WILPPRDSVRKLNRLRSGTAAASTCPATVRVDQETEQPYFRIKVSEKGESPNQSLHTSERKQRLLLTSPSTATPPLPSPS

SEQ ID NO: 110151 - protein, 170 aa, Oryza sativa
  Clone ID: PAT_MRT4530_14241C.1.pep
MATPAGGRPSQPQPQAQQLSVDFEALSYISSLVEAFQAFDSDNDGLVTAPELRGLLASLGLDKPEHEVRDMLARADADRDGKLSVEELLDVMNAGQLGLGALGALLQSAVPALESAAGPDGVLGADELARLLSVMGTASVEDCMEIIACMDGDGDGAISVEEFRLMAQLL

SEQ ID NO: 110152 - protein, 456 aa, Oryza sativa
  Clone ID: PAT_MRT4530_14242C.1.pep
MIHAAAAPAMYGGGAAAGGATTTTGSHGGGGGDWWSAAVSSCSAPAPETMQGFGGWSAAVVAVDGGGNTSRSAAGNTASSESPGSLATGSSITFQEPAGGVADPAAIAVHAQTVAGGGGGGWNQQPFLGGSGFHGYMSSSRNDHHTNHHHHQINTPSLMSNSSSNNGVMLQEHQHDQNYQFLSNLGFELLSSPTSPYGGGGGFRSSLLRSLTEPAAAAKPNDSPGFQQYHHHQPAMNLQPPAAAAGREPLQFTNSTAAPFWNPSSRFTVAAEGTALGGAGASPAQPTPASLAAKRALEGVGDSSSIITKKAKADSTPLKKSRTGTPSPLPTTFKACFHVRKEKLGDRVTALQQLVSPFGKTDTASVLHETIEYIKFLHDQVGALSAPYLKNRQQVPHLKNSTGVDNDGGGGGGEATAASKRDLTGRGLCLVPISSTFAVASETPVDFWTPFGAAFR

SEQ ID NO: 110153 - protein, 238 aa, Oryza sativa
  unsure (1)..(238): unsure at all Xaa locations
  Clone ID: PAT_MRT4530_14243C.1.pep
MAATVRFGLLVAMFQAMSRDRTAAKKRARLRALLDRAYGPGGRDDYFSALRLVLPGLDRERGSYGLKEAALASVLVDALGIAKDSPDAVRLTNWRRGGGFRNAGNFALVAAEVLQRRQGMTSGGLTIKEVNDALDRLAATENRSEKASILSSLIKKTNALEMKWLLMIILKDLKLGISEKSVFHEFHPDAEDLFNVTCDLRLVCEKLNDRSQRHKRQDIEVXGKAVRPQLSMRVNNAS

SEQ ID NO: 110154 - protein, 243 aa, Oryza sativa
  unsure (1)..(243): unsure at all Xaa locations
  Clone ID: PAT_MRT4530_14244C.1.pep
GRVLQKVVRPLKGHLEILVPTGGLNIHRPPDEPCWSILAHSLDDVEKFFKDTVDNREEGIILKDLESKWEPGDRSGKWLKLKPDYIHAGADLDVIIIGGYYGSGRRGGEVAQFLVGLAVPSDDNSYPKRFLSFCRVGTGLSDEELDALVTKLKPHFRKNEYPKKPPRFYEVTNHSKERPDVWIESPDKSVIISTTSDIRTIXSEVFAAPYSLRFPRIQRLRYDKPWHEVALMFKHFVDIVHSS

SEQ ID NO: 110155 - protein, 83 aa, Oryza sativa
  Clone ID: PAT_MRT4530_14245C.1.pep
GRRCGPRAGRCSPAASCRGKQGRRPPSSCTCTSSSSPRRPAPPPSGREPSSALASPPPPPQRSPRPRSDHLLPRAASPSGMPP

SEQ ID NO: 110156 - protein, 1217 aa, Oryza sativa
  unsure (1)..(1217): unsure at all Xaa locations
  Clone ID: PAT_MRT4530_14246C.1.pep
MAATVRFGLLVAMFQAMSRDRTAAKKRARLRALLDRAYGPGGRDDYFSALRLVLPGLDRERGSYGLKEAALASVLVDALGIAKDSPDAVRLTNWRRGGGFRNAGNFALVAAEVLQRRQGMTSGGLTIKEVNDAFDRLAATEKSVCLESEKLLLILDRSEKASILSNLIKKTKELEMXKAVXIILKDLKFVINETGEYHVVQPDAEDLFDVTCYLRLVCEKLRDDNQRHEGQYIXMGKAVMAQLYMRVNNASSAEKKLHGKQEDAECQSNGGSIKMHQNGQDIHFFSRSFLDHSEYAPGMSKVIIENILVDRCILDGEMLVWDTVLNRFAEFGSNQEIECPDVAFDILYAGDTSVIHQSLTERHEILQKVVRPLKGHLEILVPTGGLNIHRPPDEPCWSILAHSLDDVEKFFKDTVDNRFFPTSPNTDELSNLSISLMIQFRFSDYSICYVLREEGIILKDLESKWEPGDRSGKWLKLKPDYIHAGADLDVIIIGGYYGSGRRGGEVAQFLVGLAVPSDDNSYPKRFLSFCRVGTGLSDEELDALVTKLKPHFRKNEYPKKPPRFYEVTNHSKERPDVWIESPDKSVIISITSDIRTIKSEVFAAPYSLRFPRIQRLRYDKPWHECLDVQAFVDIVHSSNGTTHRAADDDNDLKNVKNGGSFSMNLNDSVTHCIAAEKKDFARHKFPEEIDSYADYFYWDIDISDLKQIFSNMDRAVVDSNMVHHYKKKYCADERFCFFQGCCVYFYHAPLVNADYNVISDLALKRVKQDLTMHGGQVCSILAPATHLIIVSVLQAYNFDMLYKSLPPAERRYLHDKRLQVVSNKWLEDSVEKQTRLPETTYSLKPDTLEEIEIERSEETVQPCNDKLEENEKADTSHVKHAPRKRGRPSSSASRTAKPAPRPVRRTRARRGNQHAKIDDVEPEESDHGETGLDDQIPDTDNISKMEVDSFDKDQFLLDQSEEQGLGEENSMPKSIMDDQRLDADYISKMEEDSSDRDQGAHPTAPRVVRRSRAQRGKWLAKIDRETGPGETGQDDKKLNADSISKMEEHAHDKDQEPPPGAQLITLDEQEPKGIKSSTTETPSSPKHERNQTVLRRDTAETTSSATCEKMEQMVDPLHAMLLDMIPSLGQMKTDVGNRVAEAKAETNPPWVGSSTSSYVAPVPQASASSASSSGVPAPHAGSSTQSTGVPAPDPTAGAPKKKKVSYKDVAGALLKDW

SEQ ID NO: 110157 - protein, 41 aa, Oryza sativa
  unsure (1)..(41): unsure at all Xaa locations
  Clone ID: PAT_MRT4530_14247C.1.pep
KNGGEKKGWEYFGYIDQLKLINVACTWIXCVPSHCQNTTPK

SEQ ID NO: 110158 - protein, 57 aa, Oryza sativa
  Clone ID: PAT_MRT4530_14248C.1.pep
MDGLAPAAMSEALLVFASGRSIGGAGPGRRPHLRRGESREFAWIYDYEDAPMSAPVW

SEQ ID NO: 110159 - protein, 541 aa, Oryza sativa
  Clone ID: PAT_MRT4530_14249C.1.pep
MSAAHLLRHSRKLRSLHNALDCERSGLVRYFSTASGSFPTKGNGAEKRIGGARFPQRKQPGKELETSKLSLGLNGSYTCRRSPNNFIPNTITGLNGSLSCGQIASARSFSSSADLPPHQEIGMPSLSPTMTEGNIARWLKKEGDKVSPGEVLCEVETDKATVEMECMEEGYLAKIIHGDGSKEIKVGEIIAVTVEEEGDIKKFKDYKPSTLAAPVAPSELKAQSEPTEPKVEEREPSKASELKAPRTEEPSRSGDRIFSSPLARKLAEDNNVPLSSVKGTGPDGRILKADIEDYLAKGCRKEALAAPGLSYTDVPNAQIRKVTANRLLSSKQTIPHYYLTVDTRVDNLIKLRGELNPLQESSGGKKISINDLVIKAAALALRKVPQCNSSWMNDFIRQYHNVNINVAVQTEHGLFVPVIRDADKKGLGMIAEEVKQLAQRARDNSLKPDDYEGGTFTISNLGGPFGIKQFCAIINPPQSAILAIGSAERRVIPGSANGQYEFGSFMSATMSCDHRVIDGAIGAEFLKAFKGYIENPTSMLL

SEQ ID NO: 110160 - protein, 720 aa, Oryza sativa
  unsure (1)..(720): unsure at all Xaa locations
  Clone ID: PAT_MRT4530_1424C.1.pep
RFRFESFWLKIPGFLEAVQDSWQRPILATNCLAIFRIKLRRLARDLKGWSRSQVGDIKLQLAVASEVVFQLDVAQETRTLSDDERLLVSNLKNRILALSTSQKKNXKKTVFSMPPEKAPGPDGFIGAFFKSAWEIIKEDLLSAVRSFFDLNTLRLKELNSAFICLLPKKEDALGAEQYRPISLIHSFSKIISKILANRLAPRLCELVSPNQSAFVRKRAIHDNFVFVKNMVQYLHRTKKTSLFIKIDIAKAFDTVCWPYLLDVLHQFGFGTRWLNWISNLLATSSSQVLLNGSPGQAENASLLSPMGGSFDRFRCSLYADDVAVFVKPHASDLSVLMRLLTFFAQTSGLHTNISKTEIYPIRCENINLVSLLANFPGMVKQFPCRYLGLPLHIRKLRKIDFLPLIEKIGLRIPGWKGRFFTSAGRKTLVQSVLSSMPIHHFTALQVPKWVIKRIDRFRRSFLWKGEDPDKTNPGSSLVNWQTVCKPKVLGGLGILDLERFSRAFRLRWLWLGWKDENKPWAGMSVPCDDTDKRLFQAATTIELGNGAKTSFWHDNWLQNSSPKDIAPLCFKLAKRKQKSVHQELHNNNWLISFRQITSVEEIHELVHFGSMLQGVLLTPRLDDISWNWNESKVYTSKSAYLFQYQGSFVSLDFSSLWKAPAEPKLKFFGWLVLHQKTLMAQNLLRRHWPCNWICSLCTSAFEDTNHLFSECPFFKEVSSL

SEQ ID NO: 110161 - protein, 555 aa, Oryza sativa
  Clone ID: PAT_MRT4530_14250C.1.pep
MWFAVSRSLAQKRQDTLRAREDRHRQRNAGHRRIPGAPNALRALVSRPMPNETILDTRRSHEKARYATAELRPYPLVGHLPQFLANRHRILDWMTEVLSRQPTRTFVLRRPGGVRGVITANPANVERFLRSGFDNYPKGERFASLLHDFLGRGIFNADGEAWRSQRKAASYEFNTRSLRAFVARCVHGELHGRLLPLLRRAAAEGRAIDLQDALERFAFDNICRVAFDHDPGQLPDASGGGALAEADDGSTASGRFADAFRDAANLSAGRFRYAVPWFWRVKKALHIGSERRLRESIAIVHDFADRIIRSRREEIRAGLEKHDLLSRFMASHDESYTEVALRDVVISFLLAGRETTSSALTWFFWLLSSRPDVERRIREEVATVRARRGDGDVDRVGFDLDELREMQYVHAAITESMRLYPPVPVDSLHAQEDDVLPDGTAVEAGWFVAYNSYAMGRMESVWGKDAAEFRAERWLEDAAAATFRPESPFRYVSFHGGPRVCLGKEMAYIQMKSIIACVLQELELAVDGAYRPRQVTSLTLRMADGLPTRVKVRGN

SEQ ID NO: 110162 - protein, 182 aa, Oryza sativa
  Clone ID: PAT_MRT4530_14251C.1.pep
MKKVFRKIILYRSVKSVPAIIHIRPHRSTIPEKIAPCWRRTKQRLSTMLARVPSILIYRISEAQTSSFLGKRHEDENTGWGSDILLPMGHATYLGRMQGVPFFFMVECYLDSVALGIQMKIMPQNIHLVETNWEYVLVIAEAFNIFNLPLTIPFLDGSKMYFHSNPEALPILAALQPKKGEE

SEQ ID NO: 110163 - protein, 696 aa, Oryza sativa
  Clone ID: PAT_MRT4530_14252C.1.pep
MVKLRELKVAQLIQVTKVGSLRMMQGVPQQKPWADMIADVMKEQFGLKPKDTGNLYRHPYPEWFERVPLPRRYKVPDFLKFSRQDNVSTYEHVSRFLAQCGEASAVDALRGLITPIKEKFSSQDFESLSHLAQKVALHEQRFAEAKKNFKKWVKSLGKEEKYDFDITKADKIFDLLLREKQIQLPAGYIIPLAEELGELGKRKYCKWHNSGSHATNDCKVFRQQIQLAIEGGKIKFDDSKKPMKVLLERRDETAIDRRLPQKRSVQRMRNMERFQEVQQEINHRLKKTKQEWRIKSKVIATDEVEANKAEWLLKGKAVASSSVNMVFMLPVEYEAKQADVDVEETSTRLILSPEQAICEKPEGTENRHLKPLYVNRFVNGKPMSKMMVDGGAAINLMPYATFRKLGRNTNDLIKTNMILKDFGGNPSETKGVLNVELTCLIQWQGDKIEIMPADSQLKMESPNYYFEDVVEGSNFYTKDTVDDLDGKLGQGFMLADNLEEVDIGPGAIGQGRHLSMSCAIGLYEWVVMTFGLKSAGATYQRAMNYIFHDLIGLLVEVYIDDILVKSKEVDDHIADLRKVFEITRKYGVKKNPTKCAFGVSARQFLGFLVHERGIEVTQRSVNAIQKIKPLEDKKQLQKLIDKALGCRDKYESPKAVKGQAIADFVVEHRDDSIGSVDIVTLKHVSREHNVEANDLA

SEQ ID NO: 110164 - protein, 414 aa, Oryza sativa
  Clone ID: PAT_MRT4530_14253C.1.pep
MTIKGCDTVIGGQIQLLMKGERILAMTRTTTKVAAVVKTVGPYGPGYPNQRAVAAGAALLARMQTRCIERARLVSKARFSRFSHPDYGDAIFTRRRSAEAMASVSGSGDGGRDCGGGGDIGGGEGVGGMTASDGYPRAWETAPSDRRGIVWWRGRRQAWRREAQPMATEAGSARETWAAEMEAGLAREARPMEEGRIGARGAAGSGGDNLDVRRSCRWVWRGLRRTKADRRGTLVQGSHMSAELVWWWSLGASAVDSQVWRLVTLSDGRSGASLLLGLCVGDVDDTIIFLEHDLQQAKNLKLILSVFEKLFSGQLIGSGFRHNYKVALSVRTGTDEVAAADVAYQTNGSTKNGAVFHHLSVRGGGPPDDVDQWHRGDLHQTPGEEVQAKISRRDRNKKSARLWAAPAAETESRE

SEQ ID NO: 110165 - protein, 223 aa, Oryza sativa
  unsure (1)..(223): unsure at all Xaa locations
  Clone ID: PAT_MRT4530_14254C.1.pep
EDLKTFSTKGTKGSTVDSGDKSGEPKDGEIEEIEEEEIEEQEALKFNNFQDQVDYAVHQALINLSGXVNTLTNIIKTVVDITIAEHXDNGPVFLPEGGFHTYRSLVTCNQQPVSNVPPGQPMASASALRPGASSSTXRPVVNPHVLTREQPRHAGKNTGCRADSIXPIRQQVVQPIRQQMVPQIPAGQRTPIIQQNQPVGAQFVPKQQIHNVQQPPQNYLGCR

SEQ ID NO: 110166 - protein, 1074 aa, Oryza sativa
  unsure (1)..(1074): unsure at all Xaa locations
  Clone ID: PAT_MRT4530_14255C.1.pep
DVTSSKHGKAKGTKGSTVDSGDKSGEPKDGEIEEIEEEEIEEQEALKFNNFQDQRPVVNPHVLTREQPRHAGKNVNRLTQEQIAAIFGPSQPVVEPIQSTPIRQQVVQPIRQQMVPQIPAGQRTPIIQQNQPVGAQFVPKQQIHNVQQPPQNYLGDVMKEQFGLKPKDTGNLYRHPYPEWFERVPLPRRYKVPDFLKFSRQDNVSTYEHVSRFLAQCGEASAVDALRGLITPIKEKFSSQDFESLSHLAQKVALHEQRFAEAKKNFKKVNHFYPYMYEYEEEYDSEWVKSLGKEEKYDFDITKADKIFDLLLREKQIQLPAGYIIPLAEELGELGKRKYCKWHNSGSHATNDCKVFRQQIQLAIEGGKIKFDDSKKPMKVLLERRDETAIDRRLPQNQKRSVQRMRNMERFQEVQQEINHRLKKTKQEWRIKSKVIATDEVEANKAEWLLKGKAVASSSVNMVFMLPVEYEAKQADVDVEETSTRLILSPEQAICEKPEGTENRHLKPLYVNRFVNGKPMSKMMVDGGAAINLMPYATFRKLGRNTNDLIKTNMILKDFGGNPSETKGVLNVELTCLIQWQGDKIEIMPADSQLKMESPNYYFEDVVEGSNFYTKDTVDDLDGKLGQGFMLADNLEEVDIGPGAIGQGRHLSQPPRRCKADMYDAIKAEITHLYYAGFIRPCRYAEWVSNIVPVIKXYNQIFMAEEDIHKTAFRCPXAIGLYEWVVMTFGLKSAGATYQRAMNYIFHDLIGLLVEVYIDDILVKSKEVDDHIADLRKVFEITRKYGVKKNPTKCAFGVSARQFLGFLVHERGIEVTQRSVNAIQKIKPLEDKKQLQKLIDKKGVPFRLYLSAREKSIGSVFIQEIEGKERAIFYLSRRLLDAETSQLAGEYECKNDVLMVYNEKCRELMDSFWQGASGYKPMAKGIEVEVATIAVDDWSADQAKVVMGEVHEGYFWPTMLEDCFRYYKGCQDCQKFGAIQRAPASAMNHIIKPWSFRGWGMDMIGQINPPLSKGHKFILVATDYFTKWVEGIPLKKVDSGDAIRFVKEHIIYRFGIPQTITTDQGSIFVSDDFV

SEQ ID NO: 110167 - protein, 405 aa, Oryza sativa
  Clone ID: PAT_MRT4530_14256C.1.pep
GLITPIKEKFSSQDFESLSHLAQKVALHEQRFAEAKKNFKKWVKSLGKEEKYDFDITKADKIFDLLLREKQIQLPAGYIIPLAEELGELGKRKYCKWHNSGSHATNDCKVFRQQIQLAIEGGKIKFDDSKKPMKVLLERRDETAIDRRLPQKRSVQRMRNMERFQEVQQEINHRLKKTKQEWRIKSKVIATDEVEANKAEWLLKGKAVASSSVNMVFMLPVEYEAKQADVDVEETSTRLILSPEQAICEKPEGTENRHLKPLYVNRFVNGKPMSKMMVDGGAAINLMPYATFRKLGRNTNDLIKTNMILKDFGGNPSETKGVLNVELTCLIQWQGDKIEIMPADSQLKMESPNYYFEDVVEGSNFYTKDTVDDLDGKLGQGFMLADNLEEVDIGPGAIGQGRHLS

SEQ ID NO: 110168 - protein, 92 aa, Oryza sativa
  unsure (1)..(92): unsure at all Xaa locations
  Clone ID: PAT_MRT4530_14257C.1.pep
WIEKEGKASTFQEVDLGNFXESVYISTKLKSYFNIFKYSVVLRPGRYRDNINAIILPTTAMPQPLDRAVKHPMYLRKSVRNWNNRANLNIFL

SEQ ID NO: 110169 - protein, 81 aa, Oryza sativa
  Clone ID: PAT_MRT4530_14258C.1.pep
MEFRHTAAAMESGRCCQNLNCNKSFLSETWSRRPVRTSKNKNRGAGPYLLLPLSRGRAGSAWLDGVVEAHGRGCGRGGERR

SEQ ID NO: 110170 - protein, 98 aa, Oryza sativa
  Clone ID: PAT_MRT4530_14259C.1.pep
YAGMCEVRRRNNILKRNRPSECRCFNLVINTESRNTASGGRTYNSGACVLCVCISIRQAGRHSGAHTYGMQWQRMRSLAGKRQGWNELEETITSYHSS

SEQ ID NO: 110171 - protein, 536 aa, Oryza sativa
  unsure (1)..(536): unsure at all Xaa locations
  Clone ID: PAT_MRT4530_1425C.1.pep
TRGREAPIGERWFNWXRSIYKLTSSSQVLLNGSPGQAINHVRGLRQGDLLSLMLFILAMEPFHRILKAAENASLLSPMGGSFDRFRCSLYADDVAVFVKPXASDLSVLIRLLTFFAQTSGLHTNISKTEIYPIRCENINLVSLLANFPGMVKQFPSRYLGLPLHIRKLRKIDFLPLIEKIGSXIPGWKGRFXTSAGRKTLVQLVLSSMPIHHFTALQVPKWVIKRIDRFRRSFLWKGEDPDKTNWKDENKXIWAGMSIPCDDTDKRLFQAATTIELGDGAKTSFWHDNWLQNSFPKDIAPLCFKLAKRKQKSVHXELHNNNWLISFRQITSVEEIHELVYLGSMLQGVLLTPRPDDISWNWNESKVYTSKSAYLFQYQGSFVSLDFSSLWKAPAEPKLNFFGWLVLHQKTLTAQNLLRRHWPCNWICSLCTSAFEDTNHLFSECPFFKEVWSLVTSWQHLPTNNVGLSVGTSDWWAQIDCVGSKEQKKAMRGALLTTWWNVWLERNRRIFINISTSERAVAYIVKQDLDLRCSAFR

SEQ ID NO: 110172 - protein, 98 aa, Oryza sativa
  unsure (1)..(98): unsure at all Xaa locations
  Clone ID: PAT_MRT4530_14260C.1.pep
RPATRRMAAAARXDGDEGAPVVDGEGERAAEIPLTTAHLTAATASGGDDGGGGATMPKTAGGGGELCARGGGATMHGRAREMGQTEEDDERKLYMSSD

SEQ ID NO: 110173 - protein, 36 aa, Oryza sativa
  Clone ID: PAT_MRT4530_14261C.1.pep
PTGTPIHINLKKRLPRQLIGAGFNTKNPGLGSVPPQ

SEQ ID NO: 110174 - protein, 449 aa, Oryza sativa
  Clone ID: PAT_MRT4530_14262C.1.pep
MVSSTRRTTSSLSATTAAAIAAAAAALMVSVAFATAQYTPATPAAPGAAAAGAAAGATPAAPYTPATPGAAGAAPSVPAGPLDIAQLGAKGDGTSDSTAFVLQAWKNACNATGTQKIVIPPGNYLTGALNLKGPCTSSIILRLDGNLLGTGDLNAYKTNWIEVEHVDNFAINGHGIIDGQGPLVWTHNQCNKNYNCKILPNSLVIDYSTNVTVRGITLKNSKFFHLNIYESKNVVIDKVTITSPGDSPNTDGIHVGDSTNITISSTTIAAGDDCISIGPGTKMVRVNGVRCGPGHGISVGSLGRYKDEKDVEDIIVTNCTIKGTTNGLRIKSYEDSKSQLRATKFLYDGITMDNVSYPIIIDQKYCPNNICSASGTSKVAVTDIVFKNIVGTSATPEAVTLNCANNLPCQGIQLHNVDLKYAGQGNTTLSVCKNVAGKSSNVAKELACV

SEQ ID NO: 110175 - protein, 55 aa, Oryza sativa
  Clone ID: PAT_MRT4530_14263C.1.pep
QRRKKKLTLSLIHPTPCTARSDPSPPFFFSPARSMLISTAPRGRRRRRRWSSRRR

SEQ ID NO: 110176 - protein, 47 aa, Oryza sativa
  Clone ID: PAT_MRT4530_14264C.1.pep
HASAHQMLMIPKLNAELHVGTSDIASVQHPALDDRHLLMLIHVHIFF

SEQ ID NO: 110177 - protein, 197 aa, Oryza sativa
  unsure (1)..(197): unsure at all Xaa locations
  Clone ID: PAT_MRT4530_14265C.1.pep
DATAEGARRSKKDWNQGRSIYQLPKMGLNLTGFALKLQSLRIAXGYPHGVDYKGKKLPEQDGDDDTPCAAWEDITVCHGRQGSFPESCKSVAYLAIGSIHQHYPNELQHSPFRYHPCHGRSHDYATFKDASSEDDTTIVHLARMVEAYDMARIDFHHLVRRALVENNVKILELRQENLQLKKELDAMEEQLRQLKIA

SEQ ID NO: 110178 - protein, 553 aa, Oryza sativa
  Clone ID: PAT_MRT4530_14266C.1.pep
MATPEDTGSWLLYLSLAAKCSGDGDGQPHRLLGFVVVCAVAGLVTCLLHWSFPGGPAWGRWWWTRRRRRGSPCGVAAVPGLRGLPVIGSMWLMTGLAHRKLAAAAEAAGAGRLMALSLGETRVVVAAHPDVAREILHGAAFADRPVKESAYGLLFHRAIGFAPHGAYWRALRRVASTHLFSPWQVAASAPQRAVIARQMVRAIKLQQRSRSGDSAAGAAVEVRRVLRRASLHNVMWSVFGRRYELQLDPGKESDEVRELRALVDEGYDLLGQLNWSDHLPWLARFDLQSTRARCSRLVPRVNRFVTRIIDEHRSSAPVAAAIDFTDVLLSLQGSDKLADSDMVAVLWEMVFRGTDTVAVLIEWVLARLVLQQDVQARVHDELGRVVGLDRDVTESDTASLVYLHAVIKETLRLHPPGPLLSWARLATSDVHVDGYLIPAGTTAMVNMWAIAHDPDVWAEPMEFRPERFIGKAAEFSVMGSDLRLAPFGSGRRSCPGKSLAMATVAFWLATLLHEFALLPSPDPAHGVDLSEVLRLSCEMATPLAVTAWPRRVV

SEQ ID NO: 110179 - protein, 60 aa, Oryza sativa
  Clone ID: PAT_MRT4530_14267C.1.pep
RGVQRPVALESLYTCKHGGSERRNRRRTYMAVSDLNCGLCLRDVVSSRQRTVYMGDRARV

SEQ ID NO: 110180 - protein, 232 aa, Oryza sativa
  Clone ID: PAT_MRT4530_14268C.1.pep
MYADDAIIFINPTRGNVKAFVDILDCFVTNLQKSQVAAIRCDSIDLAGVLDGVPAVRANFPLKYLGLPLVLGRLWKTDLQPVFDKISGRVVGWREKNMGSAGRTTLVKSVLSAQPIYLLAALEITKESLEQLDKQRRRFLWASTGDIIGGKCKVNWTKTCLPTSQGGLGVLNLDKFMRTLRLRLLWNEWKDLTKPWVGGRRPGEQRWRRLAGQPWQSGSTASLQRGSGGSSW

SEQ ID NO: 110181 - protein, 72 aa, Oryza sativa
  unsure (1)..(72): unsure at all Xaa locations
  Clone ID: PAT_MRT4530_14269C.1.pep
RTRGRTRGRTRGRTRGFFFICQVDVNGNNAAPLYKYLKSNKGGLFGDSIKWNFSKFLVDKEGSVGIXXAXTT

SEQ ID NO: 110182 - protein, 917 aa, Oryza sativa
  Clone ID: PAT_MRT4530_1426C.1.pep
MLSRQVRRLDAPAPAASSVPAATSGDSVQDLVEVSTGKVLNADLLNPGSGAAAALALSLQGHGSPKAGAQGFKRLYSEVLSAPLRPPAASTSLLTSLQPPSSPMKPTSSPAAAVKDFKILKSGRRVELSSQNLSASRQGTGGIQVNSDSWKEVRGKHWWRKSSAFNPPNNKEYLQSRRARFLQHMEGHPNGRTEEAATKIIGRKCSVQYVEEYSRRRNYSCTYDLWIWTDEPRAIPRGGTFAITSADEEGLSTDIPLPDLEPLRNPPPSDTKKGWTYNVLVHVDTLEDLLTRKAHAYKWEYDVQDDGTRYREYPLPCRAEPDPSRGPTDDDDDKDRDKPSRSHHRSRSLWDRLGRRSSSCSREPERDDGRRQGNEDRGRPRNRERSGPRSRSGRSREPSEGQGDVLSVLESHLDPMLHEASVQHSIYSPDNAPPRVASPVFVLSSFAEQGTPHTNGVATDVQTQAGLVARQGNRVEEFISALSTPLQQPLLPAPDVNARCPSYAKVTIPAISSAQRHSKRLLRKKRAGAKLETLAQEILSNKFCILDDHASFDDNIKKIYLQRYRKPLSPSSLKTIAELVEKGGCKTIRLKAAKKKVAVAPLSLGQNFVRQCVALPADGTKGGLLLACNENFFSPSDVILGQYSLSATVTMREEGLQWSITVVYGPQLEADKVVFLSEIESLQPSMKSEWLIIGDFNLIYKASDKNNDRLNRRMMQRFRGLLDKIQVKELQLPGRRFTWAGEVQDSWQRPILATNCLAIFRIKLRRLARDLKGWSRSQVGDIKLQLAVASEVVFQLDVAQETRTLSDDERLLVSNLKNRILALSVLNKIQIRQRSRQTWIKEGDVNSKFFHIKANSRRRKNFIQSLHTPSGIAISAQDKEEELLRFFKERIGTRFQRTSGINWNMMDLLSLDLGDLE

SEQ ID NO: 110183 - protein, 139 aa, Oryza sativa
  Clone ID: PAT_MRT4530_14270C.1.pep
HASAHASAHASARRTPRRRHRHRRSGGRRRRPIRCRPRRIPRSPRPHPRRSSRRPDRTPTTPSSATASSSSPTPLLGERGYRCEAPDLRGYGGTTDLAEHTCYTIFHMGRDLGSLLDALYIRQVFVLGHDWSAIVWGNL

SEQ ID NO: 110184 - protein, 116 aa, Oryza sativa
  Clone ID: PAT_MRT4530_14271C.1.pep
VQRWASGRDVVELAAPGSYYFICNVSGHCLGGMKFSVAVGEPLPLPSPPPPPPRAPFLAPPPPPPVGSGADDASSTWRRRRVALMVQVSCLALHHHRHVAIQLLIQLHDVHCIQAM

SEQ ID NO: 110185 - protein, 127 aa, Oryza sativa
  unsure (1)..(127): unsure at all Xaa locations
  Clone ID: PAT_MRT4530_14272C.1.pep
YPHQLTRHDSPPPHRPRPSPPPPSAQRVTSTAPPFXPPPPPQSSSPPPPVPPPKSPTARAPPTPSPSPPGSGEVVSPNPKPSFLSPTAPASAPPRCHKSPPLLASASSPPLAPRVHAACGCAKVQGV

SEQ ID NO: 110186 - protein, 43 aa, Oryza sativa
  Clone ID: PAT_MRT4530_14273C.1.pep
YMTLNLRMGGLCQSEPFLNLLFPAFNLWWPLLGGPVNYLTACL

SEQ ID NO: 110187 - protein, 62 aa, Oryza sativa
  Clone ID: PAT_MRT4530_14274C.1.pep
EEAIADVINVDGAELIGDGSGADELTGDEDTNAHVAWHPRGTSGPRVMCSPSSYSPGCGWDD

SEQ ID NO: 110188 - protein, 154 aa, Oryza sativa
  Clone ID: PAT_MRT4530_14275C.1.pep
VKRANISISPNQRGKRQQRTLPEPSEHYNEGHPHSALGYRSPREYLRQRACNGTNTGHPMHIRGNKRRANTSPSGPTSPEGARPRGRLCLPQTSSHDTLDPMSPTPSSTSSSAAPQRVTLIAGEFVRSASVADEFGPINVDDVGYGLLLAQRAG

SEQ ID NO: 110189 - protein, 140 aa, Oryza sativa
  unsure (1)..(140): unsure at all Xaa locations
  Clone ID: PAT_MRT4530_14276C.1.pep
WAPRKCKTFAWLILQNRVWTLDILATRGWPNGSTCPLCRQTQETAHHSALRTLYTQRIWNEIAHWTGNGHLSPHRWRATPTVYEWWEAIASTREAPKKALRTLTLLVAXEIWNERNWRTFQYKELPASNLLSKIKEEEQR

SEQ ID NO: 110190 - protein, 79 aa, Oryza sativa
  Clone ID: PAT_MRT4530_14277C.1.pep
MDCLTAGGRWRHTLQVCSSALVRHCGCGGSRPRRRTAAGYGASAAVWAAAVAKPAKAQRQQQAKASTRARGPAALALTI

SEQ ID NO: 110191 - protein, 69 aa, Oryza sativa
  Clone ID: PAT_MRT4530_14278C.1.pep
MRANVEACMAYHQVNGSKKNRIHYSGPLMPHGGNMEEILKEHERQIQQAVRRARMDNQARGTQALRTDR

SEQ ID NO: 110192 - protein, 101 aa, Oryza sativa
  Clone ID: PAT_MRT4530_14279C.1.pep
MSQASSSYGGRVKRVLCPNCDWGCQYYQWEDEMVDSAVHALHAPASMHAVPIQAVAPPGAFPTTLTGGNAQVDNRVMQQIKWLEKLVYVCIFLAMYAIFKK

SEQ ID NO: 110193 - protein, 618 aa, Oryza sativa
  Clone ID: PAT_MRT4530_1427C.1.pep
MSTSSNPSYHQLGLDAISCCFVAGGGGAEAAAPFFGFGFGDVDGEFLVASPVAAVGDELACAVPLRRPQGSVSEEEVNAAAVAAAAAGGAESCSTVHSVLGSVEFGCGTSSGVTIAQASRMGRLAGEAPCGDAGGGGWIYGGSGIAPLHGAYYLSGFSSGAGAGFLSPFAASSVAAAAPAASELSLRLGATKCSSPSSMANASSEVSCSGLTHVSSGGGLGYHQAAAAGAGAALFHPTHGDDAAAAAAGELRQAYHSRAPPHFSQVVSRSAVLAHVAQELLNGFVACLLQDVAADAASGVDGGEASQALLVGLFGEDHDGADGGCLTRERRCEVGGGGAASEEATPTGEFLAQFLVEHLRNRFLVRTNGDEMQVDEKCNQCVEEMQSTAARFNSMVRSTGGGGGGLTAAFAGRAVAAAYRRVRRRVMGQLVAAATARSSSSAAAAALEEKERSWESSFIQKHWAMQQLRRGDQQSWRPQRGLPEKSVAVLKAWMFENFLRPYPKDSEKDMLAARSGLSRSQVSNWFINARVRLWKPMIEDMYEELKKTSGGSDGAAEIEHLSSKDVLSLERSKKPSHLAVQCDGKHHDRFAVTQMEGVFEEKGIEEIGKIRKTRVVIL

SEQ ID NO: 110194 - protein, 734 aa, Oryza sativa
  Clone ID: PAT_MRT4530_14280C.1.pep
MRLTAVVADIRDMGGVMEDEHINKKLLRVVPKKYKPVAISLEQLLDVKTMALEELVGRLSTVDSYSDDEEEEGGSKLYLMEEQWQCRKPRRQRRVEANMVQTEEEPTLLMAHVTGLSLTGEAAFGRTPRVQEVHLTERKVVLDDDDVHEVENTGEWFLVTRATNHMTGARSAFAELDTGVVGTVKFGDGSVIDIQGRGTVLRKNIVSVGRLDARGYDAHIWGGVFTLRDPEGLLLAKGNMVRELPAIDHVDQLCDGCLAGKQRRLPFPEEAKFRAQEALELVHGDLCGPITPATPGGRKYFLLLVDDMSRYMWIRLLSGKHEAAAAIKQFQAGVELESGRKLRALRTGCRGGILHTAECDLPSGHKAIGLKWVFKVKKDPAGAVVKHKARLVAKGYVQQQGIDFEEVFAPVARMETVRLLIALAANKGWQIHHMDVKSAFLNGDLEEEVYVVQPPGFSKKGSEGRVLRLKKAFKILEKTGMEGCNSTQVPMEAKLKLRKDSNGEAVDSALYRSIVGSLRYLVNTRPDLAYSVGYVSRFMEKPTSEHWAAVKHILRYISGTLKIGCWFGRNKSENLELVGFSDSDMAGDMDDRKSTTGVLYRLGESLISWQSQKQMVVALSSCEAEYIAATTAACQGIWLSRLMAEILGEKPNQIVMKIDNKSAISLCKNPVLHDRSKHIDTRFHFIRECVEKKQIVVEYVRSEDQLADILTKPVGRVRFQELRKKIGLEQVIQD

SEQ ID NO: 110195 - protein, 55 aa, Oryza sativa
  Clone ID: PAT_MRT4530_14281C.1.pep
PQQLKAPSTNQKKGNNLSPLLTRRSQGPKPGCSPSCKECGQDISWETLNKAGRSR

SEQ ID NO: 110196 - protein, 219 aa, Oryza sativa
  Clone ID: PAT_MRT4530_14282C.1.pep
MASFISFLLLAALIGMASWQAIAAEPSPLQDFCVADLNSAVRVNGFACKNPTNVSADDFFKAAMLDKPRDTAVNKVGSNITLINVMEIPGLNTLGISIVRVDYAPLGLNPPHTHPRATEIFTVLEGTLYVGFVTSNPDNKLFSKVLNKGDVFVFPKGLIHFQFNLDPHKPAIATSAISSQNPGIITIANAVFRSNPPISDDILAKAFQVDKKIIDLLQA

SEQ ID NO: 110197 - protein, 95 aa, Oryza sativa
  Clone ID: PAT_MRT4530_14283C.1.pep
GNPGPKSQQKASTSRRTGGHTSNLLPETYDDTEVIGLTANGSGSRVRSFGQAQENSMEPVGLDEVCSLHPVGFQLSHVVLVGANSFGFFGTHHST

SEQ ID NO: 110198 - protein, 197 aa, Oryza sativa
  Clone ID: PAT_MRT4530_14284C.1.pep
ELFACCIEYLILESDNLSKLFPNAHLTIGTFTINAHILFAILTTLIVMPTTMCLGFHLVHSVLAGGVIASIVIVACLFWVGLVDHIEAKDEGTALNLPGIPIAVGLYGYCYSGHGVFPNIYSSMKKRSQFPAVIFTCIALSTVLFAGAAIMGYIMFGESTESQFTLNLPSNLVASKIAVWTTSSLAFSVTSGDKSNN

SEQ ID NO: 110199 - protein, 50 aa, Oryza sativa
  Clone ID: PAT_MRT4530_14285C.1.pep
MAAVASLTAAACAAANHENADVGASEIFALGGDDLYDYIELEGCKTCTLT

SEQ ID NO: 110200 - protein, 175 aa, Oryza sativa
  Clone ID: PAT_MRT4530_14286C.1.pep
MSSTSSSPPPPSKAKRRGCIHGARPQPLIVSSAPAEASRPSKKPRVSGGGGDTGPVIVYELTPRVVHVEQEEFMAVVQKLTGGKQQPAAASTLTTLPAADQVAGGDHAAAAAAAADPLVLTLGQQRQPAPAPAIDGDHPAAPPHSPPADAFLLSPSSFFLSPTTMHALQELAALF

SEQ ID NO: 110201 - protein, 90 aa, Oryza sativa
  Clone ID: PAT_MRT4530_14287C.1.pep
RVVFFFPTYLKNGPPQKKKGIFFKHPHEAPPPRLKFPFSAGFWGLQMTSHCLKAPHSLGRAYTMKTTGGRLAPPKNSFLVPGRKPTFWGA

SEQ ID NO: 110202 - protein, 825 aa, Oryza sativa
  Clone ID: PAT_MRT4530_14288C.1.pep
MEVEKPWELKEDVEIMTEEEEEDDSSNLLQARGRNKKHALINGDEQQQQQEEEEEEEVVEEHKSVFFDPTQGLWKCRHCDWTYLLSGPSRNVILNHQGYCQITTNLESLVQSESFYSSPSKAFYAQNEHVTDDGKAVSEHVTEVSGKNEVTRVEQFVAKKEKAHETSSSKGKELETQENANSQETNENSNNSSLENRSPSNGSHEVCNSGETVTVANGKAGLKVITIIDKNQNGLANSNGSLHIANVSMNKTSVHEIEAEKDEDVIKGKVNIEEYDLEKILDEQETHDLFCPNCNSCITQRVILRKRKRTVRQTSPDEPPKKTQIAEPSANTSNQTVPERQGQESPDIFRCLSCFAFFIPTGCGFNIFRIFGRTEVNQEAQVQEAAASGQMSGSDNCASWLFSCFEPGDGPKKTDAGPEKEPLLPDKQDSNNGSASSVEGSTASVHSHGISVQQQESKRPLPAESSSQLQPSNTKKEDFGTVSFSGSSSVEAPSSSSASIINPGQTATGFLQTGETHVVIGQQDIVLQQNVPLPKPGDAAHLDKQKQETPPASHTFPTPGVKIPDANPAKFIPDVVRPMVDKPSRGIVIPPEAVESQTRPEHSSVQIGPDASMPLIDTPAPEQRDDWDILKAIVYGGLVESITSLSVVSAAASSGARTSITYVGRFAVDIFILGIANLIGGLPIIFHSMAELRSIGDVDEREEQGGHYWLQLGRRSKYRLHVAMAVLSYLLFGLLPPLIYGLSFRGGDVREKKMVAVAAASLGCIALLAMGKAHVARRRSYVKSLLYYLSIGVSASGLSYVAGLLAHFALITHQTPPASSSWASY

SEQ ID NO: 110203 - protein, 316 aa, Oryza sativa
  Clone ID: PAT_MRT4530_14289C.1.pep
MMSSWLFRRSGPSGFSWASTADQVTAGLSAAGLTAIVTGASSGIGAETARVLAIRGAHVVMAVRNLAAAQPVRDAILADAPAASLDLMELDLASMDSVRAFASDFAAKGLPLNILINNAGVMATPFSLSKDGIELQFATNHVGHFLLTHLLLETMKKTSRESNVEGRIVNVSSEGHRFAYREGIRFAKINDESEYNSIGAYGQSKLANILHANELARRFKDEGVNITANSLHPGSIITNLLRHHSILDVLHRTLGKLVLKNAQQGAATTCYVALHPQVKGVSGKYFSDSNVNEASEKGNDMELAKRLWEYSIELIT

SEQ ID NO: 110204 - protein, 220 aa, Oryza sativa
  unsure (1)..(220): unsure at all Xaa locations
  Clone ID: PAT_MRT4530_1428C.1.pep
EDRGRPRNRERSGPRSRSAILQADSCFCSQGQGDVLSVLESHLDPMLHEASVQHSIYSPDNASPRAASPVFVLSSFAEQGTPHSNGVATDVQTQAGPMARQGNRVEEFFSALSTPLQQPLLPAPDVNVCRPSRAKVTIPAISSAQCHSERLLCKKRAGAKPETLAQEILSNKFGILDDHASFDDNIKKIYLQRYKKPLSPSSLKTIAELVEXGGCKTIRL

SEQ ID NO: 110205 - protein, 108 aa, Oryza sativa
  Clone ID: PAT_MRT4530_14290C.1.pep
MDSSFSGPESKKAPNSVSFTSKVNKVYEDKSMGILCYTDESGELICEGFDEGPRLTWQDMEKINREKELKAEEDRRERMMRIGVAGIDWSSLRTAVSKPVSVGEELKK

SEQ ID NO: 110206 - protein, 216 aa, Oryza sativa
  Clone ID: PAT_MRT4530_14291C.1.pep
MHADYIHTHALPASCKVAHRSPICVDPNNVVISTLVYSIVLTLFPKHPPPPLALVAIPCPVENFYLVSLSDSEFFDRHKAGSRRPTASASSRRSPGAPRERQVALRKVGEHDSCDIEGVEEEPKDEAREDDIEAGALKHGDRDLMAEARITALEFDLVKNNADPLTPRRIINLASTTFCAELTFKVELQLIDTSSSSMLLSSQMSDEDSRRRLTKC

SEQ ID NO: 110207 - protein, 115 aa, Oryza sativa
  Clone ID: PAT_MRT4530_14292C.1.pep
MGHAAAADPAASASRPHQEAAAGEQGKQGAGEQEIVSVEELAELDSGDHNRSLAAMPVRMKAEKEKEKEDFPVMAMVAGLPMRMGPRGSTRRGTSPTMRRCWADLGGGTPRGGIK

SEQ ID NO: 110208 - protein, 50 aa, Oryza sativa
  Clone ID: PAT_MRT4530_14293C.1.pep
MACSVHSYLEAAAADAKDWAGLLFAELYVTGHLLFFGFFLNRLQIPNIDG

SEQ ID NO: 110209 - protein, 249 aa, Oryza sativa
  Clone ID: PAT_MRT4530_14294C.1.pep
MVAMRGASPVVVLVLVASVLAPGAMSAKFVFTNNCHEVLYPGVLTPATAQAFPTTGFELQPGASAAYDGVPDNWSGNIWARRLCSTDASGRFSCESGDCGTGRVECDGRGNGPPSTLSEFTLRGGSARDTDFYDISNVDGFNVPVQVAPSGAGCSAVACAADIDASCPAELAVKGAGGAVVGCKSGCLAFGRDDLCCRGAYGTPDKCPPSQYSKFFKDKCPQAYSYAYDDKSSTFTCTSGASYQITFCP

SEQ ID NO: 110210 - protein, 83 aa, Oryza sativa
  Clone ID: PAT_MRT4530_14295C.1.pep
PIVAVVIKQLWGNPWSSAVSLCATFVIRSTNSPHQHYCMPVHSHQHVVTHALCGLPSHCSSSLNSTISIAYWSSTCACFPPVW

SEQ ID NO: 110211 - protein, 792 aa, Oryza sativa
  Clone ID: PAT_MRT4530_14296C.1.pep
MSAGTAPAAPRYAPDDPSLPKPWRGLVDGTTGYLYYWNPETNITQYEKPLPPEDQLPPPPPLPPPPPRSGRGDRDRDRRDRSRSRTPPRRDHRDRDRDRDRRHDDHRSAPSHHHPLPAAAAIAADDPSTEAYRHRHEITVVGDNVPAPITSFETGGFPPEILKEIQRAGFSSPTPIQAQSWPIALQCQDVVAIAKTGSGKTLGYLLPGFMHIKRLQNNPRSGPTVLVLAPTRELATQILEEAVKFGRSSRISSTCLYGGAPKGPQLRDLDRGVDVVVATPGRLNDILEMRRISLKQVSYLVLDEADRMLDMGFEPQIRKIVKEIPPRRQTLMYTATWPKEVRRIAEDLLVHPVQVTIGSVDELVANSAITQNVELITPSEKLRRLEQILRSQDSGSKVLIFCTTKRMCDQLARTLTRQFGASAIHGDKSQSEREKVLSHFRSGRSPILVATDVAARGLDIKDIRVVINYDFPTGIEDYVHRIGRTGRAGATGVAYTFFCDQDSKYAADLIKILEGANQRVPRDLADMASRGGRGGRKRNRWATRSDRGGSHSELDSRYGGRDGLSGSSGRLDSSRSSRRHDYGDDGRSRRSGRGRSRSRSRSDSDRYSRSPKRSRRHSRSRTRSRSRSRSRSYTRNRRASRSRSRSPGASRRHERSATGSGSALPDSGHGERKRTPEADPSRNHTNHSDPKDDRHPEDGKVGKVDLDRSPTPQDKSGPYSPAYNGKTSRSVSPGNQVEGNNKAAEVSKNPDPSSPPHHGKTREDEEEGMIDEDGEIADDPRANATVQNGGDN

SEQ ID NO: 110212 - protein, 463 aa, Oryza sativa
  Clone ID: PAT_MRT4530_14297C.1.pep
MASVSPLLLLLLCSYHSVVAHAGDGQSYKVLELNSEAVCSERNAISSSLSGTTVALNHRHGPCSPVPSSKKRPTEEELLKRDQLRAEHIQRKFAMNAAVDGAGDLQQSKVSSSVPTKLGSSLDTLEYVISVGLGTPAVTQTVTIDTGSDVSWVQCNPCPNPPCYAQTGALFDPAKSSTYRAVSCAAAECAQLEQQGNGCGATNYECQYGVQYGDGSTTNGTYSRDTLTLSGASDAVKGFQFGCSHVESGFSDQTDGLMGLGGGAQSLVSQTAAAYGNSFSYCLPPTSGSSGFLTLGGGGGVSGFVTTRMLRSRQIPTFYGARLQDIAVGGKQLGLSPSVFAAGSVVDSGTIITRLPPTAYSALSSAFKAGMKQYRSAPARSILDTCFDFAGQTQISIPTVALVFSGGAAIDLDPNGIMYGNCLAFAATGDDGTTGIIGNVQQRTFEVLYDVGSSTLGFRSGAC

SEQ ID NO: 110213 - protein, 122 aa, Oryza sativa
  unsure (1)..(122): unsure at all Xaa locations
  Clone ID: PAT_MRT4530_14298C.1.pep
APIPSSSHAPRLGLLASILPCRGLIRWHYAGSHTGDLSILGASXQRCLLPGSLDRFSAEPYCYVTDACTDEPIQXAVDAKYTKXLINGNCTDALSGKTLSTVDALTAYGIVPTTIGYTYDYN

SEQ ID NO: 110214 - protein, 146 aa, Oryza sativa
  Clone ID: PAT_MRT4530_14299C.1.pep
QITRCRAPRSPSSSTSSQPPPPSARRRRPQRSRHRQSHRRARQLPPLQRHPPSHRHRGRPDQLPRRRPPWLPPRLLVATRCPSPLRRSPPWCLPSPMDLPMRLTPISPVPVLSRGALPLPVSRLPLPPSPSTKMPDAEMWSVMVSC

SEQ ID NO: 110215 - protein, 1012 aa, Oryza sativa
  Clone ID: PAT_MRT4530_1429C.1.pep
GLNSKAKQDAVKIILQQYGATIVCLQETKIASLNDRVVLNSLGQNFMRQYVALPADGTKGGLLLACNENFFSLSDVVLGQYSLSATVTMREEGLQWSITVVYGPQLEADKVVFLSEIESLQPSMKSEWLIIGDFNLIYRASDKNSDRLNRRMMQRFRGLLDKIQVKELQLPVRRFTWAGEGANPTQTKIDRSFVTTDWDLMFESSNLYLLSSACSDHAPLFLVGNEQRSKFPSFRFESFWLKIPGFLEAVQDSWQRPILATNCLAIFRIKLRCLARDLKRWSRSQVGDIKLQLAVASKVVFQLDIAQETRTLSDDERLLVSNLKNRILALSVLNKIQIRQRSRQTWLKEGDVNSNFFHIKANSRRRKNYIQSLHTPSGIAISAQDKEEELLRFFKERIGSRFQRTSGINWNMMDLPSLDLGDLEEDITEEELKKTVFSMPPEKAPGPDGFIGAFFKSAWEIINEDLLSTVRSFFDLNTLQIKDLNSAFICLLPKKEDALGAEHYRPISLIHSFSKIISKILANRLAPRLCELVSTNQSAFVRKRAIHDNFVFVKNMVQYLHRTKKTSLFIKIDIAKAFDTVCWPYLLEVLRQFGFGIRWLNWISNLLATSSSQMLLNGSSGQSINHVRGLRQGDPLSPMLFILAMEPFHRIIKAVENASLLFPMGGSFDRFRCSLYVDDVAVFVKPQASDLSVLMRLLTFFAQTSGLHTNISKTEIYPIRCENINLVSLLANFPGMVKQFPCRYLGLPLHIRKLRKIDFLPLIEKIGSRIPGWKGRFFTSAGTKTQVQSILSSMPIHHFTALQVPKWVIKRIDRFRRSFLCKGEDPDKTNPGSSLVNWQTVCKPKILGGLGILDLERFSRALRLRWLWLGWKDENKPWAGMSVPCDDTDKRLFQAATTIELGNGTKTSFWHDNWLRNNCPKDIAPLCFKLAKRKQKSVQQELHNNNWLISFRQITSVEEIHELVHLGSMLQGVLLIPRPDDISWNWNESKVYTSKSAYLFQYQGSFVSLDFS

SEQ ID NO: 110216 - protein, 292 aa, Oryza sativa
  Clone ID: PAT_MRT4530_142C.1.pep
MSASDLPDELWARVLELGAGAGAASSALGFRDLCALAIASRRLRRLSLHPSLWSALLSRDFPTQSSQPSSASSSSSQQQLHPKSVYKTKFERHKVRMAEARRRVVFEAEGRVLACRRRLTQLEESLQEEGEKMKTAAQELDNLERVRRASVALNVWQPQVVRGRQKQLVQQCTVPVDSRLSDVNMELKVCKQQIATYKNIYNKEKEKLNEYEEALKRAIYHPLQSSHTSSIANEPQAKRKKRKYLLRGPILLKRSSMHATDITMANAKRLKREEKRSSIGLFLARQVDRKLH

SEQ ID NO: 110217 - protein, 67 aa, Oryza sativa
  Clone ID: PAT_MRT4530_14300C.1.pep
MAPWTPPAHMAGRRAPPPACIWLVTHFTGHGPPGAPPSVRGRPASSLPSTWLASEFLYHVRPTNSFF

SEQ ID NO: 110218 - protein, 854 aa, Oryza sativa
  unsure (1)..(854): unsure at all Xaa locations
  Clone ID: PAT_MRT4530_14301C.1.pep
PRQGPILLLHVASSTLHGRYASAIRRTEESAVVLRKWTAFRVAIGERQQEVQHRNFAKLLFIHMLVYPTHSGQKECIKMLAVLCYLVKRIGYLCLILRHVEQQEGFVHSFFCFKQDLNRSNQFLVGLALCTLVKWCCAXMARDLSPEVERLLRSREPNTKKKAALCSIRIVRKVPDLAENFMGSAVSLLKEKHHGVLISAVQLCAELCKASKEALEYLRKNCLDGLVRILRDVSNSSYAPEYDIAGITDPFLHIRVLKLMRILGQGDADCSEFVNDILAQVATKTESNKNAGNAILYECVETIMGIEATSGLRVLAINILGRFLSNRDNNIRYVALNMLMKAMEVDTQAVQRHRATILECVKDADVSIRKRALELVYLLVNDANAKSLTKELVDYLEVSDQDFKDDLTAKICSIVEKFSQDKLWYLDQMFKVLSLAGNYVKDDVWHALIVLISNASELQGYSVRSLYKALLACGEQESLVRVAVWCIGEYGEMLVNNVGMLDIEEPITVTESDAVDAVEVSLKRYSADVTTRAMCLVSLLKLSSRFPPTSERIKEIVAQNKGNTVLELQQRSSLLERMPVIDEASYLAKRAASTQATISSDKLAAAATPGSSLKLPNGVAKPPPAPLADLLDLSSDDAPATTSAPTTAPNDFLQDLLGIGLTDTSTAGGAPSASTDILMDLLSIGSSPVQNGPPTVSNFSLPGQAETKVAPVTPQVVDLLDGLSSSTSLSDENTAYPPITAFQSAALKITFNFKKQSGKPQETTIHASFTNLTSNTFTDFIFQAAVPKFIQLRLDPASSNTLPASGNDSVTQSLSVTNNQHGQKPLAMRIRITYKVNGEDRLEQGQINNFPAGL

SEQ ID NO: 110219 - protein, 277 aa, Oryza sativa
  unsure (1)..(277): unsure at all Xaa locations
  Clone ID: PAT_MRT4530_14302C.1.pep
MVLSLAGNYVKDDVWHALIVLISNASELQGYSVRSLYKALLACGEQESLVRVAVWCIGEYGEMLVNNVGMLDIEEPITLGFFVXPVQVTESDAVDAVEVSLKRYSADVTTRAMCLVSLLKLSSRFPPTSERIKEIVAQNKGNTVLELQQRSIEFNSIIQRHQSIKSSLLERMPVIDEASYLAKRAASTQATISSDKLAAAATPGSSLKLXNGVAKPPPAPLADLLDLSSDDAPATTXAPTTAPNDFLQDLLGIGLTDTSTAGGAPSASTDILMDLLS

SEQ ID NO: 110220 - protein, 76 aa, Oryza sativa
  Clone ID: PAT_MRT4530_14303C.1.pep
QWWRRGRRGPTSRLAGQYGWGGGRGSRGGGGRGVGGSGGGRRRGGRACRQERSGRGWCRWGAGGKPPKGGRWSAWR

SEQ ID NO: 110221 - protein, 113 aa, Oryza sativa
  Clone ID: PAT_MRT4530_14304C.1.pep
PTTSLGRFSSCSPPAPTSSAPFLSAGPSSASPSSTASTNSTTPSSSTASSTTPAILTSQPRCWSPSPPPPPLLLGLVMSGMATSPFASFSAMVGWRRWHWHRGSYRTVTMATS

SEQ ID NO: 110222 - protein, 50 aa, Oryza sativa
  Clone ID: PAT_MRT4530_14305C.1.pep
LVRFACFVPGFGTRYLTRFCLILPSALCCLDSPFRVRFRLVRRVRYPFNF

SEQ ID NO: 110223 - protein, 140 aa, Oryza sativa
  Clone ID: PAT_MRT4530_14306C.1.pep
SGSAMECSSFEAICNESEMIAHLQSLFWSSSDADPCFGSSSFSLISSEGYDTMTTEFVNSSTNVCFDYQDDSFVSAEETTIGNKRKVQMDTENELMTNRSKEVRTKMSVSKACKHSVSAESSQSYYAKNRRQRINERLRI

SEQ ID NO: 110224 - protein, 83 aa, Oryza sativa
  Clone ID: PAT_MRT4530_14307C.1.pep
MPEEFMLVVEEEVRIASRDAPARCHASDGNHRRLDESTAASWLPGSPAVEGRFTVVISPAQADSLAPLAGSVWILCVCVRRIF

SEQ ID NO: 110225 - protein, 97 aa, Oryza sativa
  Clone ID: PAT_MRT4530_14308C.1.pep
LVSSVLTNKYYFTIKKEVEESHEARKQQLEDIEILKKSPKETNDLRRLIGLNTLVVSLMLIHAEMTSFVVGVIWTCDFVFVGECKRLFGQVTSFWSQ

SEQ ID NO: 110226 - protein, 200 aa, Oryza sativa
  unsure (1)..(200): unsure at all Xaa locations
  Clone ID: PAT_MRT4530_14309C.1.pep
NQPFYVKSKCFDYYFVMNNWHMXLLVLIFGDYWRSGFGDDWILQMXKQELLXLGPVRPGMGCQLEXMHVVGEDSIWHTMEALCAYGIRSRIWKESKFGMIGXVKFVSCTGRFPKWIRTSSMSLVHGFRLPTSCINREGASDQXHCGGQTGGYTTVRLATAXRRQRRFSGGRTGLSTPVKPTASRRLGRRITYGQITIHRI

SEQ ID NO: 110227 - protein, 108 aa, Oryza sativa
  Clone ID: PAT_MRT4530_1430C.1.pep
WSACRYRALHIWLVAPRLSACPLDPLLLLLHLCLCVCVCERIKGEKWWWWAWRRMDIGHDFTSSSGLPLSASKTLPNRFHPLFIILGIHPTFLFLIAKVPAGITFWWV

SEQ ID NO: 110228 - protein, 106 aa, Oryza sativa
  Clone ID: PAT_MRT4530_14310C.1.pep
SDLSLSLSLFLPRNLTPSFLLLLHLNLIPPPPPRKKMKSRYHGWGFRSLVSGMGFDYHGRRRRTPPWGTGPGSSWRPWLLLLLLVGDFAALFAALLGSGGEEGEYF

SEQ ID NO: 110229 - protein, 356 aa, Oryza sativa
  unsure (1)..(356): unsure at all Xaa locations
  Clone ID: PAT_MRT4530_14311C.1.pep
LQGVDRSLIEHNLAVKPDQNSKKQKLRRMSTDRQQATKIELVKLLNTKVIREVIHPEWPANPVLVKKVNRKXRMCIDFTDLNKACPKDDFPLPRIDQLVDATTXCELMSFLDSYSGYHQVFMVKEDEEKTSFITLFGTYFFIRMPFGLKNAGTTFARLIGKVLARQLGRNVEAYVDDIVVKSKQAFTHGKDLQETFENLRKYSVKLNPEKCVFGIRAGKLLGFLVSKRGIEANPDKIAAIHQMEPRKNIREMQRLTGRMASLSRFLSKSAEKGLPFFKTLRGANTFEWTNECQQTFDELKKYLQDMPTLASPQKGQPLLMYVAATPVTVNAVLVLEEENRQCRRAHAHAAATHSFV

SEQ ID NO: 110230 - protein, 88 aa, Oryza sativa
  unsure (1)..(88): unsure at all Xaa locations
  Clone ID: PAT_MRT4530_14312C.1.pep
GRERREPPVSLSPPLLAPLPRRVAAERGRGGDLHLASRAWEGILVSIHILFLIHLSLTPPGLLMSGICLRSLTLLXFSSRSGRSSSPP

SEQ ID NO: 110231 - protein, 167 aa, Oryza sativa
  unsure (1)..(167): unsure at all Xaa locations
  Clone ID: PAT_MRT4530_14313C.1.pep
NFYKRYVIHIKAGAYMENVEVGKSKKNLMFIGDGIGKTVIKASRNVVDGSTTFRSATVAVVGNNFLARDLTIENSAGPSKHQAVALRVGADLSAFYRCSFVGYQDTLYVHSLRQFFRECDIYGTIDFIFGNSAVVFQSCNLYAXPPLPNQSNVYTAQGREDPNQNTG

SEQ ID NO: 110232 - protein, 750 aa, Oryza sativa
  Clone ID: PAT_MRT4530_14314C.1.pep
MPPLHAGRPGPLLVLLAVTLAAAAATAVGASSDTAPFYPSAEEAAAAHCEGTLYPELCLSTLADIPDLHTKSLPDVICGTVNRTKDAVAATSYNCSHYINSKYLTPRDRLAISDCMELLDTTMDELQATTSDLESPAVAGGNNGSASMAAKRVTMDHVMTELSAAMTNQYTCLDGFDYKDGERVRHYMESSIHHVSRMVSNSLAMAKKLPGAGGGGMTPSSSSPDTATQSESSETTQRQPFMGYGQMANGFPKWVRPGDRRLLQAPASSITPDAVVAKDGSGGYTTVSAAVAAAPANSNKRYVIHIKAGAYMENVEVGKSKKNLMFIGDGIGKTVIKASRNVVDGSTTFRSATVGVLIVISIAGHFVAKKLPAVVGNNFLARDLTIENSAGPSKHQAVALRVGADLSAFYRCSFVGYQDTLYVHSLRQFFRECDIYGTIDFIFGNSAVVFQSCNLYARRPLPNQSNVYTAQGREDPNQNTGISIQKCKVAAASDLLAVQSSFKTYLGRPWKQYSRTVFMQSELDSVVNPAGWLEWSGNFALDTLYYGEYQNTGPGASTSNRVKWKGYRVITSASEASTFTVGNFIDGDVWLAGTSVPFTVGLWRTREQWQVAAVVSGGRRRGKGDCHRQAPSGIVFVVVAVVVIVDLHGARRLAGGAAEHMPEPLGLRSVDYQLESAHPIIKTRQCSSIPLEMKTNAALARELWLNARAQDLSSAGKVGSEVEREHEEAWLKRRNADNGAGEEEKATMTG

SEQ ID NO: 110233 - protein, 53 aa, Oryza sativa
  Clone ID: PAT_MRT4530_14315C.1.pep
AYPLPSLFCYISIYRNHIRLDKYSMRHSSWPQIQQSIVGQATVCILFIMYLPV

SEQ ID NO: 110234 - protein, 299 aa, Oryza sativa
  Clone ID: PAT_MRT4530_14316C.1.pep
MALQCSVAARSPPLPWLTLLHGTFLSISDGKIHRMPLPNDASCHGSIDNWLFLRDSNGGCSLMNLFSKVTLHLPKLASIWHDKMERAYRGSGILLCNEYTLLSYKFAVPLPLDSSPVPLVAVLINDPLHLYALSASGKLYILEISEGHEGKPEVSCINSMVDLAEEPVIRLFGYPFPLSHDDVLEDPRTLSFVVYEADLSNGSRMWRRVESLGGQALFVGTHGSKSVPAVECGAQEDCIYFISDYNRPYSANPLGDSGIYNMRNEMITPLVRLVSGNRHSGVYYQWRHPRWFFPADGAI

SEQ ID NO: 110235 - protein, 1342 aa, Oryza sativa
  Clone ID: PAT_MRT4530_14317C.1.pep
MAMARSILLLLLLAAAASASADAPFLVAHKKVSLSRPKPGVERLAVSLDLYNQGSATAYDVSINDDTWPKEAFELVSGEMSKTLERLDPGVTASHAFVLETKVQGRFQGSPAVITYRVPTKAALQEAYSTPILALDVLAERPPEKKFEWAKVTSSMEDDDDDQRLLHSLGVTSADIHDIERRIISQATTDPADSSGPTINGGHQPDDALAKLHHKLRSVQIEIDAVASTIKGAKLKQPSGNKPHEHKGKDQPDHHGAGHLQQALAADRLTSLRKAKAQIQKEILQSHPSPSASNRKDKMLAMLVQDEPRHKKPPVGPKNIVKRPMKTVTYDDDNNFDAVLDGASAGFMETEREELIRKGLLTPFHKLKGFEKRVELPEPSHRQDDSAGQTEEAMEASRIARVAQSLKQIAQNRPATKLLDSESLPKLDAPAAPFQRLGKPLKRPVSPSSDEQEKKRPRNKTKRPLPGKKWRKANSIKESSLDDNDVGEAAVSVSDDDEDQVTEGSDELTDVTLEGGLRIPGTLYTQLFDYQKVGVQWLWELHCQRAGGIIGDEMGLGKTVQVLSFLGSLHNSGLYKPSIVVCPVTLLQQWRREASRWYPKFKVEILHDSANSSSKKSKRSSDSDSEASWDSDQEEAVTCSKPAKKWDDLISRVVSSGSGLLLTTYEQLRILGEKLLDIEWGYAVLDEGHRIRNPNAEITLVCKQLQTVHRIIMTGAPIQNKLSELWSLFDFVFPGKLGVLPVFEAEFSVPITVGGYANATPLQVSTAYRCAVVLRDLVMPYLLRRMKADVNAQLPKKTEHVLFCSLTTEQRATYRAFLASSEVEQIFDGNRNSLYGIDVLRKICNHPDLLEREHAAQNPDYGNPERSGKMKVVEQVLKVWKEQGHRVLLFTQTQQMLDIMENFLTACEYQYRRMDGLTPAKQRMALIDEFNNTDEIFIFILTTKVGGLGTNLTGANRIIIYDPDWNPSTDMQARERAWRIGQTRDVTVYRLITRGTIEEKVYHRQIYKHFLTNKVLKDPQQRRFFKARDMKDLFTLQDDDNNGSTETSNIFSQLSEDVNIGVPSDKQQDQLYAASATPTTSGTEPSSSRHGQGKEDHCPDQADEECNILKSLFDAQGIHSAINHDAIMNANDDQKLRLEAEATQVAQRAAEALRQSRMLRSHESFSVPTWTGRAGAAGAPSSVRRKFGSTLNTQLVNSSQPSETSNGRGQSLQVGALNGKALSSAELLARIRGTREGAASDALEHQLNLGSASNHTSSSSGNGRASSSSTRSMIVQPEVLIRQLCTFIQQHGGSASSTSITEHFKNRILSKDMLLFKNLLKEIATLQRGANGATWVLKPDYQ

SEQ ID NO: 110236 - protein, 44 aa, Oryza sativa
  Clone ID: PAT_MRT4530_14318C.1.pep
SNISIAHYMGKSTSAQQNGGKHYNRSTNIYRLKFIEPTATHYPN

SEQ ID NO: 110237 - protein, 155 aa, Oryza sativa
  unsure (1)..(155): unsure at all Xaa locations
  Clone ID: PAT_MRT4530_14319C.1.pep
MGTRRRRHQHHGRWVVPAVAPAAAAFTAAGLLLVVVAFHCFLSPPLGGGGGGGGGHRVVRRPNPPFLLNKPSELRRNVVGTVDFAVPSGGSKLGEELWASKLASNFFGCSNATKAFADAKAVTEPNRYLMIATSGGLNQQRTGIIDAXGAARILN

SEQ ID NO: 110238 - protein, 87 aa, Oryza sativa
  unsure (1)..(87): unsure at all Xaa locations
  Clone ID: PAT_MRT4530_1431C.1.pep
CVKKAPRXGCAYLAFKTHPNFMVSXLHGKSSIFRALPNDVXLANAYRISREEAQRLNXHYRGDEFGAFTPIPYQSYPDVXYNAAESS

SEQ ID NO: 110239 - protein, 119 aa, Oryza sativa
  unsure (1)..(119): unsure at all Xaa locations
  Clone ID: PAT_MRT4530_14320C.1.pep
GFXXXXIXLRXLXXGNPPXXQNQXXNXSXXSXILFPSSGSAXASXAPPPXXYXXAPPGWQSXDQFGIEKQNPXVLKAXSSCCLLVLVVXVVGNFGLCAARRGGESSCRIXHELGRIRKG

SEQ ID NO: 110240 - protein, 165 aa, Oryza sativa
  unsure (1)..(165): unsure at all Xaa locations
  Clone ID: PAT_MRT4530_14321C.1.pep
ERVFEHTEVYDLNLLSKAGMDSKFDTVFNVVGWLGFCRVQEFECRLLTIEFLCSVXTYQKEVTFRMFKQEYTLTWGQVSVVLCFDVRCYLNLEQAXMVKVEFWEAITGHDDYGYPRLNEIHNPTLCFLHHXIGMFLFPRSNIRPIRNDELXLLYAMVHKIHVSPV

SEQ ID NO: 110241 - protein, 301 aa, Oryza sativa
  unsure (1)..(301): unsure at all Xaa locations
  Clone ID: PAT_MRT4530_14322C.1.pep
FNALVLVKPITAVAIIDRIRWSAGLILVSVLFHLFIFSSKKIEWITFDVGQGLSQAFVYXQNGQNKAIFYDTGVSWGASGNSMASLEILPYLRRHNIEVEAIFLSHDDRDHAGGISDLLAVYPNVRLISSSAMPYANKMPEACIVGKQWQFNQLIFRTIYPPKLTPRSKNADSCIIIVEIDRFRILLTGDATAQQESIIAPSLPRIDFLQVPHHGSKTSSSQALLAKIKPYLAIASVGRWNPWRMPHPRVVERFEQYNIPLVTTATDGMIKVIFEHNTWEVITNRNKFSAWYRQLYATSAK

SEQ ID NO: 110242 - protein, 89 aa, Oryza sativa
  Clone ID: PAT_MRT4530_14323C.1.pep
VFAYTITLCHDDDIRVVSGSLGVVSRLRDIIIWGYMLRMRGGPLMVTTQYGYSFVFSPGCMVMTGCRKELGSQGWLLEVPGGHRIEGIN

SEQ ID NO: 110243 - protein, 85 aa, Oryza sativa
  Clone ID: PAT_MRT4530_14324C.1.pep
MRGTRTGCRSRCGKRGPRAASTAPGAASPPPEVLPRKGRHRQRRSPPCCRRPPLRRSRRGCCRRKRARGRSRRRRRSPRGCRSPA

SEQ ID NO: 110244 - protein, 224 aa, Oryza sativa
  Clone ID: PAT_MRT4530_14325C.1.pep
MAEALLPLPRRLVVTASTPACSSASSSTSPSPHCLLSRANPRPPRLAAPSPPRHRRLKDFIYVLATAHAAVSDKSEQPKWWEKNAGPNMIDIHSTQEFLDALRDAAGRLVIVEFYGTWCGSCRALFPRLCRTAVENPDILFLKVNFDENKPMCKRLNVKVLPYFHFYRGADGPLEAFSCSLAKFQKLKDAIAVHNTARCSIGPPVGVGDVLDSPEEKPAEASPR

SEQ ID NO: 110245 - protein, 83 aa, Oryza sativa
  unsure (1)..(83): unsure at all Xaa locations
  Clone ID: PAT_MRT4530_14326C.1.pep
MSFVISFTLLTIVNDAXIGNNLISSWFGMEYSWCGDRTVQPGWLFRMVGPIQQGMLYSVGLILFNYLTVLSNSQMFAKCCFCK

SEQ ID NO: 110246 - protein, 87 aa, Oryza sativa
  Clone ID: PAT_MRT4530_14327C.1.pep
TTVVTVGMVGNTLQPSLGLHLNRPAKTWIQRRRGRFGRTWGRPNPAQFRLAAFSIVLLRRLVNFGPMCHVISEFLAHSYISLVLDIV

SEQ ID NO: 110247 - protein, 123 aa, Oryza sativa
  Clone ID: PAT_MRT4530_14328C.1.pep
GSGTGSASGRCRTAVDACRRCSTGATGGEVQRCSAPALAGCRLRLRREPECVPLAMGAQEHASLSRWRAREYYGEGRATGLRRGRERLSQTHSGMTGSDGRNAHCAWRWPQDISRGRLAYWLL

SEQ ID NO: 110248 - protein, 56 aa, Oryza sativa
  Clone ID: PAT_MRT4530_14329C.1.pep
INSIDHISYGNKICGYIFFIHSYICKNVTNCVSMNQLERGAALWYKINSLVVIIIF

SEQ ID NO: 110249 - protein, 104 aa, Oryza sativa
  unsure (1)..(104): unsure at all Xaa locations
  Clone ID: PAT_MRT4530_1432C.1.pep
LLRLATVRNVLDLLLPHDTSSADYRHNLLEMLLPRRRAPFPVGLXSPKTLTXIGRGLSASAFGVEPLPTWIHRWRGVSANAFGVDSRIPVVHIGAWNSRKGCDL

SEQ ID NO: 110250 - protein, 220 aa, Oryza sativa
  Clone ID: PAT_MRT4530_14330C.1.pep
MGKHNHHDVEAPAAGGSSFPPPPPAVGVAGVACTYMIERPELRWAFIRKVYAIVATQLVVTVAIAAAVYSVPAIRRFFLARTPASLAAFVLVIVAPLIAGIAIIEAASLTFGLVFGLTLYTFWAAKRGHDFSFLRPFLVAAFLVLVLYGLIQMLVPTGKVATTVYGCVAALVFSGFIIYDTDNLIKRHAYDEYVTAAISLYLDTVNIFIAIFTALDASDS

SEQ ID NO: 110251 - protein, 66 aa, Oryza sativa
  unsure (1)..(66): unsure at all Xaa locations
  Clone ID: PAT_MRT4530_14331C.1.pep
IRPNSGKEFHPRSDEXEXERLMXGPGGGAMAAXYFPSGRXRYVTGHNLXVDGGYTVXKGXDTPAAR

SEQ ID NO: 110252 - protein, 208 aa, Oryza sativa
  unsure (1)..(208): unsure at all Xaa locations
  Clone ID: PAT_MRT4530_14332C.1.pep
MAGSPPKPWERAGAEGTSGPAPFKPPSGGTTSDVVEASGTAKPGETVTATERNLSANVNNPVSRPMPQRPWQQTSGYGNTYGGYGSNMYSSYGGFGNTYGSGGLYGNSMYSSYGGGYGGSLYGGSGMYGGGMYNSGLGGSYGGYGMGGMGGMGGMGGXGMGPYGNQDPNSFGPPAPPPSVWVSFLRVMHGVVNFFXGRVAFLVEHNTQ

SEQ ID NO: 110253 - protein, 45 aa, Oryza sativa
  Clone ID: PAT_MRT4530_14333C.1.pep
LGLGGLGGSPRASAASAALAHGPDEDRPAAGYEFAQFGAGCFLGV

SEQ ID NO: 110254 - protein, 64 aa, Oryza sativa
  Clone ID: PAT_MRT4530_14334C.1.pep
GKSLFPKRVFRVYWIPNPFLVSKVHFFLVGGETPPLFFFPFILFKGFPLKPNFFPVFKKGSFSP

SEQ ID NO: 110255 - protein, 102 aa, Oryza sativa
  Clone ID: PAT_MRT4530_14335C.1.pep
MPPAEGRIQQPPMSRQPDPARYGEEDGGARPPPLLRCAASPPAGSIGEEGVAPSAGPSSPPGRRYCHSAGRERAREIKRIRPLYRLGAGFLRSQPAEVGKCL

SEQ ID NO: 110256 - protein, 87 aa, Oryza sativa
  Clone ID: PAT_MRT4530_14336C.1.pep
AIPFTICTSIYSFLYCSYPRDRERARMQSLIESELQQMEQESFCLEDGDCRFQVFDSANGELELTYDVKDLRDTEKDTANLLLNRES

SEQ ID NO: 110257 - protein, 116 aa, Oryza sativa
  unsure (1)..(116): unsure at all Xaa locations
  Clone ID: PAT_MRT4530_14337C.1.pep
PRLDRHRPPPFPPPXPDLPAPTPGXPRRPPPAPWPSPWTSCRRRPPLAEPLALRPSCSPSSLRPLSRHPVPILPSARPPAXLPPPPPLAXRPPRPACPLRSPTRGPPPSARRLSLA

SEQ ID NO: 110258 - protein, 204 aa, Oryza sativa
  unsure (1)..(204): unsure at all Xaa locations
  Clone ID: PAT_MRT4530_14338C.1.pep
MADPVKLIGAFGSPFVHRAEVALRLKGVAYEFIHEDLDNKSDLLLAKNPIHKKVPVLLHGDRAICESLVIVEYADEPXSRSSWLALWLDGEEQEGLLKETKENLALLEAQLHGKRFFAGDSVGYLDIVASGLAHWISVVEEVTGVSLMGGADEDDEYPALRRWAKEYTTDETVMQCLPSREHLAAFFAAKKDKLKMVAKAMLHQ

SEQ ID NO: 110259 - protein, 165 aa, Oryza sativa
  Clone ID: PAT_MRT4530_14339C.1.pep
MADPVKLIGAFGSPFVHRAEVALRLKGVAYEFIHEDLDNKSDLLLAKNPIHKKVPVLLHGDRAICESLVIVEYADEVFDGRPILPTDPYDRAMARFWAHFIEHKCSRSSWLALWLDGEEQEGLLKETKENLALLEAQLHGKRFFAGDSVGYLDIVASGLAHWISV

SEQ ID NO: 110260 - protein, 62 aa, Oryza sativa
  Clone ID: PAT_MRT4530_1433C.1.pep
MNSGMHKMSYPDKHCSVAAVNCVSAVAKISELNVSCRFLAWSSRSLIVYLCVTTQKKKKKKK

SEQ ID NO: 110261 - protein, 1007 aa, Oryza sativa
  Clone ID: PAT_MRT4530_14340C.1.pep
MAETALSMARSMLGGAISAASAAAGEEMSLLMGVQKEIWFMNDELKTMQAFLIAAETMKKKDLLLKVWAEQVRSLSYDIEDCLEEFMVHVGNQSLLQQLTNLKDRHRIAVKIRNLKSRLEEVSSRNTRYNSIKMEANNTFDEIESMEDVRNHSRSNIDEAKLVGFDTPKKELLDKINMDANDDDHCRVLCVVGMGGLGKTTLVRKIFESKEDIINNFPHRAWIVVSQSFSMIEMLKDMISQLLGHESLKRFEGKPIRAHDLGTHLRDGLKELRYFVVFDDLWNTDHWEWIREFALPSKNNKRSRVIVTTRLDGVANACTTEPFVYRLKLLETECAIDLLLRKMGESKEDMKNDNNLKSIVTQLVKKCGCLPLAIVTIGAMFANKPSSKWEEMCRQLPSELENNPSPGVEAIRRVVTLSYGHLPSHLKPCYLYLSIFPEDIEIKRRHLVNRWVAEGLVRARVGMTISDVGESYFDELISRSMIQPSRVNMEGHVKSCRVHDIMRDIIVSISKEENFVYSTGDNVSTVIVEKFRHLSCHGGNYPIVGMDFSRVRSLTVFGEFDQRPMLVGSSICSAQFTMLRVLDLENAVFSVTQKDINKIGLLRHLRYLNTHTRRRSTIYALPSSIGKLQNLQVLDIRESEISTLPTDISKLLMLRILRCSKGPWYFYFYFDPDEPIKCLKHTLRMPLMLTPLVGSAARNYTIAELHRAYSSHWSETPGVRVPTGISKLKELQVLEVVDLKLTKSKAIEELGELRWLQKLRVSTKGAQDKKRKTLCEAIEKLSSLQSLCVYEGYYFITGTLEWLGPCNFSPPPLLRKLELHGRIRVMPDSFRNLKQLRKIFLRLSELDGRAIEILGTLPNLMLLNLDGRAYVGNELAFKKHEFPNLKELRISMLSELRGIRFEKDALPHMERMEIECCQLRSGIVGIKHLEQLNEISLGCDVAGLDLLEQEVKAHPKTPALRLLQDRSKIDLGLPVVLTKDEGSNVEEEAKESVHDDAGESSQVISSP

SEQ ID NO: 110262 - protein, 117 aa, Oryza sativa
  Clone ID: PAT_MRT4530_14341C.1.pep
MAFAEGYRKNMNLLRDTQKMWENFHNMGDLPLGPISTKSFVFFTNQVPGALMEWSPCVIVSRRERAVAEAEPCRLALLHGDADSEWQLLGRCGQIEKDVQASCEPDGGRLLAGGGQN

SEQ ID NO: 110263 - protein, 173 aa, Oryza sativa
  unsure (1)..(173): unsure at all Xaa locations
  Clone ID: PAT_MRT4530_14342C.1.pep
CIDIIGDLPPNVIVHDMSFDWTGRRLAAVCSDKTIRTFIKRGEKWMKEEVLTIQGAAAWKVKWARPEFGTIIATCSLDTQIRIYELKKVDKGEGEKSSWVSXTTFNRTRLFXDIKFIPSKIYGLCLAIVSSDGYLKVLMAEDPLKLXEWGNHYSLHVSELGLSCLSLSKNLVK

SEQ ID NO: 110264 - protein, 91 aa, Oryza sativa
  Clone ID: PAT_MRT4530_14343C.1.pep
CSKSKDPVQVIIIILNELVYFCISFFYYLTKFRRCSLCLTENMNGQDFTLFVVQKGREKKSGKELDLNNTHWLAGKIIICNLKQLFSHPCE

SEQ ID NO: 110265 - protein, 95 aa, Oryza sativa
  Clone ID: PAT_MRT4530_14344C.1.pep
MFPSPGRAVMALGHHGAARQPPTTMAAAASSSTNSAADAPATDTTTVAFSVQHPTPTPSHQQHHHGVLGYSPLVLEHHHPTTDAASSHAPSPPTL

SEQ ID NO: 110266 - protein, 555 aa, Oryza sativa
  Clone ID: PAT_MRT4530_14345C.1.pep
MEAAAKIPGELVLTPSSSSFADVLVSSIRNPMFFNNATARPLCIVTPADASHVQAAVLCGRAEGVRLRARSGGHDYEGLSYRSARRGEVFAVVDLGARLRAVSVSGGGDATAWVESGASLGELYYTVAKSNPGLAFPAGVCPTIGVGGHLSGGGISMMSRKYGLAADNILDAKLVNANGELVDRAAMGEDLFWAIRGGGGESFGIVVSWKVRLVQVPTTVTVFVVGRNVDQGAADVVARWQDVAPSLPPELTIRVIVRGQRATFQSLYLGSCADLVPTMSSMFPELGMTSADCREMSWLQSAALIQFWNPSTPVEALLNRRTSLSTFTKAKSDYVRRAIPSDVWKNILPWFTMNGSGQMLLEPMGGFVGGVPAAATPYPHRSGVLYNIQYIAYWSGDGTAANRWISGLYAFMEPYVSSDPREAYVNFRDLDIGENAVAPNDVSTFESGKVWGEKYFAGNFERLAAVKAAMDPTDYFRNEQSIPPFVGPKQKKEIIGRRGSDLQAGSMPAVVISKPNLARPALTTNDAVLASRQHLLNGLANFATDRSTSINTVIY

SEQ ID NO: 110267 - protein, 69 aa, Oryza sativa
  unsure (1)..(69): unsure at all Xaa locations
  Clone ID: PAT_MRT4530_14346C.1.pep
FFFFFFFFFFLKTNXXXXKXXXXXXTYXKKKXYXXXXXQMXXSIXHHXXYXTGXXXDXXPQXKXXKKKG

SEQ ID NO: 110268 - protein, 177 aa, Oryza sativa
  Clone ID: PAT_MRT4530_14347C.1.pep
RVDSYNRGTILLMLWRAWYLRNNVVHDKGNLTITGSVSFLQSYAESLLLVRQKVCDPKGKQVDQQHNQAPPRSVTNQVKENNMRWRAPPVGWAKINVDGAFNPEDGLGGLGIIIRDSSGKVLLSSWRFIRRCSSALESELLACLEGLKLAVEWIKMPWRECQARNMTDLNGLFCSER

SEQ ID NO: 110269 - protein, 203 aa, Oryza sativa
  unsure (1)..(203): unsure at all Xaa locations
  Clone ID: PAT_MRT4530_14348C.1.pep
AEGYCWARTXERQASRMRARYLRAVLRQDVEYFDLKKGSTAEVITSVSNDSLVVQDVLSEKVPNFVMNAAMFAGSYAVGFALLWRLTLVALPSVVLLIIPGFMYGRILVGLARRIREQYTRPGAIAEQAVSSARTVYSFVAERTTMAQFSAALEESARLGLKQGLAKGIAVGSNGITFAIWAFNVWYGSRLVMYHADAWADAW

SEQ ID NO: 110270 - protein, 164 aa, Oryza sativa
  Clone ID: PAT_MRT4530_14349C.1.pep
RRLPAGFSAKERVAGVELDLAGPREVAALTGDGRGDGARQLERLPELVALWEAVRNVHLDVGEPDQIIWKFTNNGHYTASSAYHVQCCGTPSTNFNSLIWKAWAPGKCKFHAWLIIQNRVWTSDRLATRGWQNNGCCPLCRRETETALHLVATCRYTKRIWHLV

SEQ ID NO: 110271 - protein, 184 aa, Oryza sativa
  unsure (1)..(184): unsure at all Xaa locations
  Clone ID: PAT_MRT4530_1434C.1.pep
RRTAAAPPTAAHGRSCPLPPHGRLPRGRXFAPTAPRGRLAPPPPHSRGPTSRRRAVASLRRRHLAPSPPPGRSREGKKEEEAGIERGSREGKEEGEGPGEEGDIEEALEADTERLKEERKKRGLKGRDSMGIFTPDCGTETIVDFGXPTKDGFSTSSSVGIIFHVGITLLSLLRIVITMGRGFI

SEQ ID NO: 110272 - protein, 65 aa, Oryza sativa
  Clone ID: PAT_MRT4530_14350C.1.pep
CLALECEDAGNNTLKVHLVTDIPIPRRYCWILNWPYAQLFIITLQTSWIHSYSWRLSWTNIHEQL

SEQ ID NO: 110273 - protein, 391 aa, Oryza sativa
  Clone ID: PAT_MRT4530_14351C.1.pep
MRKLPPRGVAASAAVCRGWRGCARRVWRAADELRLRAAGVRPVGALLPRCPALSRLVLRMESDIDATMLACVAFSCPNLQYLEISMVGSAANRMTGDELTRFVSEKRSLSVLKLDGCSNLNFLNISSSSLSTLWLSDLSSLSKSVINCPNLNELSLGFTQQNNDSTDLISLMDSLGRTCSNLRNLHISSIHLCNEAVFSLESANLRGLCMLSLILGSKITDAAVASIVRSYASLDLLDLSGSSITDNGLGMICKAFPHTLTRLLLALCPNITSCGVQVATSQLPLLQLMDCGKSLCANSQPEAERSYFERLLLQCPSLKDVHASGCRDMLIGAIRNQVLNEFASAEPRVPCKRLADGSKRVQVPHFMLEQQFEEEKWGSGSKRSQCTVHLS

SEQ ID NO: 110274 - protein, 1058 aa, Oryza sativa
  Clone ID: PAT_MRT4530_14352C.1.pep
MASSSTGATPTINGNTVSEKLTKSNYVLWRAQVLAALRGAQMAGFLDGSTKAPEATTVITKDDGKTTEKVANPALPQWVAQEQQSRARVINTRLALSNTKKGNRSVAEYVGKMKALADEMASAGKALDDEELVSYILAGLDFDYNSVVTTVTGRTDPISVNELYGLLVGFESRLELLQNALQASANAMSRGGCGGGHGQGGNNNRGGGSGRGRGDGKPKPTCQLCGKVGHTVAKCWKRFDPSFTREEKSANTAATSSSYGIDTNWYVDSNATDHITGEMEKLSVKDKYHGSEQVHNAGGTGHEDANPARQPNLRPYNHRKLEFRSKQCAFLGYSTLHKGFKCLDISTGRVYISRDVVFDEQIYPFANLHPNAGARLRSEVLVLPPDLLPPTQFDQGGAIVNDQPMIDDPNHTNQTAETDADRGAVQNSEPTGENNASNGGETEPGGHDFMHGTESGSGGQHTGSHPEDDALAASDASVAESGNDTGTSPGAGPTAAGHAEESGQESSSISAPHDSPSASTPGSDASSDGVAESGGEQQQPMLGPATRSRHGIHKPKKYTDGTIRYAALVSTEEPGNLHEALKNKHWKLAMDKEFEALVHNKTWHLVPPQKGVNIIDCKWVYKVKRKADESIDRYKARLVAKGFKQRYGIDYEDTFSPIVKAATIRLVLSLAVSQGWSLRQLDVQNAFLHGFLEEDVYMRQPPGYEEPKAPQYLCKLDKALYGLKQAPRAWYSRLIYVDDIIVASSSAQAVTALLRSLEKEFALKDLGELHYFLGIEVKKASGNILLNQERYASEIVKRVSMENCKSVGTPLSTVEKLSAYEGEKLGEKDATQYRSVVGALQYLTLTRPDISFSVNKVCQFLQNPTTVHWATVKRILRYVKGTLGLGLKVEKSSSNIVSAYSDADWADCLDDKRSTGGFAVFLGSNLISWNARKQATVSRSSTEAEYKALANATAEIMWVRKLLEELGISHPGPSQLWCDNIGATYLSVNPVFHARTKHIEIDYHFVREQVAQKQLALQFVPSQDQVADGFTKALPVRQLQMFRNNLNLVDLRLRGSVR

SEQ ID NO: 110275 - protein, 160 aa, Oryza sativa
  Clone ID: PAT_MRT4530_14353C.1.pep
RQPEAERSYFGEIYGGIKFCSKLPIQRKQQPNYQKLIIKHANLKKLSLWGCSALDALYVNCPELSDLNLNCCTNLHPERLLLQCPSLKDVHASGCRDMLIGAIRNQVLNEFASAEPRVPCKRLADGSKRVQVPHFMLEQQFEEEKWGSGSKRSQCTVHLS

SEQ ID NO: 110276 - protein, 51 aa, Oryza sativa
  Clone ID: PAT_MRT4530_14354C.1.pep
RGQLPYAARCTSAKSKCSSSCTTGRKLLLAHHTCIMYILIFLYSKAYMLPC

SEQ ID NO: 110277 - protein, 399 aa, Oryza sativa
  Clone ID: PAT_MRT4530_14355C.1.pep
RMESDIDATMLACVAFSCPNLEYLEISMVGSAANRMTGDELTRFVSEKRSLSVLKLDGCSNLNFLNISSSSLSTLWLSDLSSLSKSVINCPNLNELSLGFTQQNNDSTDLISLMDSLGRTCSNLRNLHISSIHLCNEAVFSLESANLRGLCMLSLILGSKITDAAVASIVRSYASLDLLDLSGSSITDNGLGMICKAFPHTLTRLLLALCPNITSCGVQVATSQLPLLQLMDCGMTLYHILVKFMEGLDFVQNYLSREKQSTNQKLIIKHANLKKLSLWGCSALDALYVNCPELSDLNLNCCTNLHPGAMSLPENAERLLLQCPSLKDVHASGCRDMLIGAIRNQVLNEFASAEPRVPCKRLADGSKRVQVPHFMLEQQFEEEKWGSGSKRSQCTVHLS

SEQ ID NO: 110278 - protein, 356 aa, Oryza sativa
  unsure (1)..(356): unsure at all Xaa locations
  Clone ID: PAT_MRT4530_14356C.1.pep
MAHERGGAASSAAAPATEEDALFIDLLHEAPLSGHREPRSIVGGTLYCILLAGYAAVAVSAPWIFYLVPDMIPPLLCSSNVILLILTGIFQQYWVHQVRKVRLQGYYDFSEKLKRLARLPFATVASGVASMLLIIVWQPLVHILSVSLLLRIAIVVEAIXAGCFMSLYLWHIHKYNSLNGHPDILRSLYSALQLQPSSSLEERRYYDGRFSDQQMALLQYQRENIHYLSEEVLRLQECLSKYQRTDVGSTPQADLAHLLASRDQELRALSAEMNQVHSELQLARSLIDEKDSEIQRIRVSNNQYIEENDRLRAILGEWSARAAKLERALEAEQISSIELRKNIAKLRGQTYKDQNT

SEQ ID NO: 110279 - protein, 432 aa, Oryza sativa
  Clone ID: PAT_MRT4530_14357C.1.pep
RSPRFAVVDVAALRAVRVDAARGVARAEAGATLGELYYAVAEGSGGRLGFPAGICPTVCVGGHLSGGGFGPMMRKYGLAADNVVDAEVVDAEGRLLDRAAMGEGLFWAIRGGGGGSVGIVVSWTVNLVPVPAVVSAFTVHRLLLRRGGHDEQSLLRLLTKWQAVAHALPDNLFVKMSWRPRPQRRRRLNCHPLVTFKSLFLGNCSDMITQIDHHLPELGIKPTDCREMNWLQSMLYSYGYTNGQPAEVLLDRTLQPKDYYKIKLDYLTSPIPTPGLIELLTKIVEDEDGSIDIDPQGGEMSRIPESGTPYAHRSGYLYNLQYFVKWGGDKNVSYEDDHLSWVRGLHELMTPYVSKNPRAAYINYRDLDLGQNVEGNTSYEEARVWGEKYFRGNFRRLAMVKGEVDPDQLFWSEQSIPPLVVSTRDAGLVSDS

SEQ ID NO: 110280 - protein, 337 aa, Oryza sativa
  unsure (1)..(337): unsure at all Xaa locations
  Clone ID: PAT_MRT4530_14358C.1.pep
FFREGMIPSTLPQLGTKFXDEMEAWEFWKSYGGNIGLEVRKRYANKRKSDGKVRSFRYVCSKEGHRKQDKRYHXIKCPRAETRTGCQVRIGLILDQKVGNYEVTDLVLDHNHILYPPETFHLMSSEMNISDLQAFEIKTXTDDSGIGPKAAHELASRQVGGSFNLSYTLRDQKKIIRXTKQQREVAYGXVGSMLKYFQDKIAENPSFKYALQMDCDEQIANIFWTDAKIIIDYAHFDDVVIFYTTFGTNKESRSFSVFVSVIFXETFESFKWLFETFVKAHNGXQPQTIYTNQDSAMGKVVEEVFTEEWHGLCTFHIMQNAIKHLSQPENREMPGSS

SEQ ID NO: 110281 - protein, 67 aa, Oryza sativa
  Clone ID: PAT_MRT4530_14359C.1.pep
APPIHHRARFSLIPVQAWVWGDRQARVAPLLETSFARARDAQGSIGVQVQCPVGWLPDRACFAAVRR

SEQ ID NO: 110282 - protein, 74 aa, Oryza sativa
  Clone ID: PAT_MRT4530_1435C.1.pep
MRKGLAWARRVDAAIDGNRRKEEEEEAAMHTRTSDRDADNGGAEEVTELKDRLPLPVPSPLEPNSNVALFTYGH

SEQ ID NO: 110283 - protein, 102 aa, Oryza sativa
  Clone ID: PAT_MRT4530_14360C.1.pep
HFFMVYFKKLKYKLGFGHKRNNNICVANQIQFIDHYFGQIANVIHNTRITVGMINFNERKLQTYNTVLHKQMAEQLQMITMYTLCGIVDIHLHKFMVSECAR

SEQ ID NO: 110284 - protein, 221 aa, Oryza sativa
  Clone ID: PAT_MRT4530_14361C.1.pep
MVNTGESSKIKEHIGHIIPCKVYSHHKTLALMRKHTKKRDTIRPGVTRFALAFLTLQSLIEKKRELRAMALSVEWDCGNNAPALKKAKGKIATSTLMSRTFWNDVSQCLKVFEPLVKVLHMVNSDEAKKEIMVAAKNLENTYNPIFEHIAKKMEGLPFSLIYEASGATKAMQPRRSARVRELHEDDFNSGEEDEANEEGIDFESDKDEIVPTKVYDQEDED

SEQ ID NO: 110285 - protein, 79 aa, Oryza sativa
  unsure (1)..(79): unsure at all Xaa locations
  Clone ID: PAT_MRT4530_14362C.1.pep
KKNSRGGXVPXXXYXESYXNXLXVVLXRXDWENPGVTQXNRHAXHXFFXMWGXNKKARXDXPSQQXSXLNGEWCKRLKP

SEQ ID NO: 110286 - protein, 107 aa, Oryza sativa
  Clone ID: PAT_MRT4530_14363C.1.pep
KKFIVFPNKKGGGHGPAQAKGNGDQKMLRTGLKKGPPLGGGKGVYPQPGNFFKQARRVCPEEKKKKARCKKNQKSEPGDLFSDPGRVGHKKKKKGGGPQTKTPPAPP

SEQ ID NO: 110287 - protein, 188 aa, Oryza sativa
  unsure (1)..(188): unsure at all Xaa locations
  Clone ID: PAT_MRT4530_14364C.1.pep
MAPLRTLVIFLLLLLALVPALSRPDGGGGGFYDPARVTQLSWRPRAFLYSGFLSHDECDHLVNLGRMEKSMVADNDSGKSIMSQVRTSSGTFLSKHEDDIVSGIEKRVAAWTFLPEENAGSIQILHYELGQKYDAHFDYFHDKNNLKHGGHRVATVLMYLTDVKKGGETVFPNAAGRHLQLXDETWSD

SEQ ID NO: 110288 - protein, 95 aa, Oryza sativa
  Clone ID: PAT_MRT4530_14365C.1.pep
LRPPCPAHAVRRRRSSRRRQSGKSPSWSPSRRRPRPSLRRRCQPPEHRRRRRPDRLRRLFLIAGAVRCSSAATLVTGDCAGPPLPVRPGALGEVL

SEQ ID NO: 110289 - protein, 46 aa, Oryza sativa
  unsure (1)..(46): unsure at all Xaa locations
  Clone ID: PAT_MRT4530_14366C.1.pep
LINYSGWPEXTGNKCRWNXKGGVRTYVSTPMFVGGHISVLITLVLY

SEQ ID NO: 110290 - protein, 103 aa, Oryza sativa
  unsure (1)..(103): unsure at all Xaa locations
  Clone ID: PAT_MRT4530_14367C.1.pep
QVWVTPYTKSKKXVSGLYAEQSTGDDNLAAWSKRNRRIKDEDIVLWYTVGLHHVPCQEDFPVMPMISGAFELRPFNFFERNPLIRTRPPGNSPNCSCSFGRSG

SEQ ID NO: 110291 - protein, 1080 aa, Oryza sativa
  Clone ID: PAT_MRT4530_14368C.1.pep
MVVRRTAVLLLLLHLVFVIAAAAAAVDRRRPAEAIVGGWRQRRRLQALMQEKATLLALKRGLTLLSPKLLADWNDSNTDVCGFTGVACDRRRQHVVGLQLSNMSINGSIPLALAQLPHLRYLDLSDNHISGAVPSFLSNLTQLLMLDMSENQLSGAIPPSFGNLTQLRKLDISKNQLSGAIPPSFGNLTNLEILDMSINVLTGRIPEELSNIGKLEGLNLGQNNLVGSIPASFTQLKNLFYLSLEKNSLSGSIPATIFTNCTQMGVFDLGDNNITGEIPGDASDSLSDRFAVLNLYSNSLTGRLPRWLANCTILYLLDVENNSLADDLPTSIISGLRNLRYLHLSNNVHFASGDGNTNLGPFFAAVSNCTSILEIEAGALGIGGRLPSLLGSLLPPNMSHLNLELNAIEGPIPADIGDVINITLMNLSSNLLNGTIPTSICWLPNLQQLDLSRNSLTGAVPACISNATSLGELDLSSNALSGSIPSSIGSLKLSYLSLHRNQLSGEIPASLGQHLGIVRLDLSSNRLTGEIPDAVAGIVQMSLNLSRNLLGGRLPRGLSRLQMAEVIDLSWNNLTGAIFPELGACAELQVLDLSHNSLTGVLPSSLDGLESIERLDVSDNSLTGEIPQTLTKCTTLTYLNLSYNDLAGVVPTAGVFANFTSTSYLGNPRLCGAVLGRRCGRRHRWYQSRKFLVVMCICAAVLAFVLTILCAVSIRKIRERLAAVREEFRRGRRRGGGGSSPVMKYKFPRITYRELVEATEEFSPDRLIGTGSYGRVYRGTLRDGTMVAVKVLQLQSGNSTKSFNRECQVLKRIRHRNLMRIVTACSLPDFKALVLPFMANGSLERCLYAGPPAGELSLVQRVNICSDIAEGMAYLHHHSPVKVIHCDLKPSNVLINDDMTALVSDFGISRLVMSVGGVANAADVGASTANMLCGSIGYIPPEYGYGSNPTTKGDVYSFGVLVLEMVTRKKPIDDMFDAGLSLHKWVKNHYHGRADAVVDPALARMVRDQTPEVRRMSDVAIGELLELGILCTQESAAVRPTMMDAADDLDRLKRYIGGETTATFASSLGFSSSTFEDLDD

SEQ ID NO: 110292 - protein, 157 aa, Oryza sativa
  Clone ID: PAT_MRT4530_14369C.1.pep
WYLPSSTLCLNFSFSSSDSPTTASFVSCIVSFVFSLTSSVFSLATLRNCSAVDLAFSPISVTVFSSFPVERNLERRASLQSAGLTGDLPNKPLDGEENSPRTSNLFISSTVSTCPKKHSRYCIQLCSNSTQEGTHGREDGREDGDGVFFWTAHRSAA

SEQ ID NO: 110293 - protein, 48 aa, Oryza sativa
  unsure (1)..(48): unsure at all Xaa locations
  Clone ID: PAT_MRT4530_1436C.1.pep
MVREIYYDRNLTEPQAMLCCNASCTYGMSPRYXYGAPSTITTLGGVTR

SEQ ID NO: 110294 - protein, 500 aa, Oryza sativa
  Clone ID: PAT_MRT4530_14371C.1.pep
MVPVNFGDSSSIPPVDAVVPMAMAPRLLCFLFLLLQLLLFPRVAAIVLAATPVLLLAAFLLALVLVYSEPNNNNEPDHLIPIRIRSRNPHAHDHASSCTASGSSDDDDDAQDSDSESVSEPADDEKAAVWTAEDEKSIQNIGSLELERNAAVEKLMSSRSMHRYYAADRDLIDLDLDGDGHQLPPGSAPSMHRNPFFFHDDQQAAASTAKLFSRHESFRPYFVADKTQQPVVLESSGGGGSSSSLSSSSSASGDRAGQHMKQEAVADFSSSSKAMVVTVDAELPNPKSMVTVDVELISDSSDDDDDDIMSLPGQQITKVASSMSDDDDGESSFEVESITRQLRPQKRRLQHQQQLLIVGNNGAITIGKQEFVLKPVQATLGPNSTGGRGGSPLPDVIQQFYSSLNEKDSKRLENLIAPDCIIDDNAYYKLLDIKSTQTYFRRLMDAMGKNFKFAIDEVSQGVEPTFAVMWHLEWNGKTIPFTKGCSFYICSRKEAALVIR

SEQ ID NO: 110295 - protein, 450 aa, Oryza sativa
  unsure (1)..(450): unsure at all Xaa locations
  Clone ID: PAT_MRT4530_14372C.1.pep
MVPILEHPNGSRDGYVASMSGFLLDWAGASGDCPKCVASGGQCTYGDGLRFACNCTDGLHPEKCGARSNLKKIAIAQEEKQTRDLKDLMRSSSSMQSYSKYLELGGSPHIFTYEELEEATAGFSATRELGDGGFGTVYKGKLRDGRVVAVKRLYKNNYRRVEQFLNEVDILSRLLHQNIVTLYGCTSRSSRDLLVVYEYIPNGTVADHLHGPRAGERGLTWPVRMTIAIETAEALAYLHAVEIIHRDVKTKNILLDNNFHVKVADFGLSRLFPFEVTHVSTVPQGTPGYVDPVYHQCYKLTDKSDVYSFGVVLIELISSKPAVDMSRSHSDINLANMALNRIQNHEVELVDPEIGCETDSETKRMXLVAELAFQCLQMDXIKSRPPIKEVVEVLNCIKNGECPAEKMNKNASPKEDSHLLKDSLQYSPDSVIHRFHSQSTNHSVASNSSG

SEQ ID NO: 110296 - protein, 63 aa, Oryza sativa
  unsure (1)..(63): unsure at all Xaa locations
  Clone ID: PAT_MRT4530_14373C.1.pep
SIGXNNMLRPRWKLYSMVKGXXQXXPRQVXSFGPLTHXVXADASEXXSEQXLAXVGLQGGFXV

SEQ ID NO: 110297 - protein, 94 aa, Oryza sativa
  Clone ID: PAT_MRT4530_14374C.1.pep
TVNGYLLGGGSGCVTQHHFCLLPKIIGLLTNFFFFLQQKKNLIELLFAFAMGGLANWGEKSRELSKKKFNSLALSIRTAQKGGSLSQDKSFTFF

SEQ ID NO: 110298 - protein, 77 aa, Oryza sativa
  Clone ID: PAT_MRT4530_14375C.1.pep
HMNQTAYTGYPLMTNLIEMVLKILMRTKLTHHYKFTILKIMHEVAHKKSEQPLRTCFFSNSSMCTSFKPTTPIIFGS

SEQ ID NO: 110299 - protein, 71 aa, Oryza sativa
  Clone ID: PAT_MRT4530_14376C.1.pep
MRIEESGRLALVVGAKRTCSYKVSTKDSGPNRIGHLSVTGLRRRKEKRRQGGTCQRHWHLLASCQGWAVVS

SEQ ID NO: 110300 - protein, 439 aa, Oryza sativa
  Clone ID: PAT_MRT4530_14377C.1.pep
MEPPPPPHRHKKCRTAEAAVPGGEEEEEAKDALISLPPDVLDGVLTRLGLRDAVRTSALSRAWRRRRARRWPPSTASSSAACPGRVRSFSAYVDKLTTRRAHDWILVLARRGVESLDLASPIHNHLAVHSSVFSCDRLAYLNLFACDIPPLPPGFAGFPNLRSLTLDHVWLRAGGEYQLEEIIENSPLLEMLVLSGIFIDGDDIINWVIRAPNLQHLTICSPNDYGWNLLDLPRLRSAVIDLWDYLGGRDFAEFLGKLLHVRKLHLFVSYQPSNGAKILETLPCTFDSLKSLKSLKLYMDFCELPAILTIFCLLRNAPNLEKLKIMITDNEQKVEANGVFQNAEWTGGMCANLQIVQITRISWLPNEMSFIELILSKASLLRTISVTHGDKCLMSNEDALSELLKYKRASPQAQILFKEPDNCDEHGGMVRIQSLNMGI

SEQ ID NO: 110301 - protein, 145 aa, Oryza sativa
  Clone ID: PAT_MRT4530_14378C.1.pep
MAVAARRQKGIRQRRPGDSDSGAAAAAPSSPSDDGGSGGDVSGGSGGGGHASLVTNLSDIKDPKSQIWYSVVVPRLASRCFFASCEIRRLFNFVFNFVFLISPTINIPGRLPGKAGSVPVLFHWLPNMISSKKQCAYFLMPPIPK

SEQ ID NO: 110302 - protein, 625 aa, Oryza sativa
  Clone ID: PAT_MRT4530_14379C.1.pep
VVACGTVADDAAAAAGAGDAAGVVVAAWEEEFESTVTLAAASHREHAAFQPWELAFSVFTAANRGPKIKPSILGTASLNLADYASAAEENIEIILPLSVPNGSAESAPSLHLTLGMVELRAFQETSDASQRSAMAAPLSPSSGDSAPVGKDEVSVIRAGLRKVKILTDLVSTRRSKKTSQDDESSEEKCYVNSDGAEYPCDIESLDDDLDDRAQQDEVGDSTKEEVEFAITEGKGEPLLKKAYGEEGGDDIDYDRRLLTSSDGSVSEGSRGEDGSINGMVSEFGDDNFVVGNWELKEIVSRDGHLKLSSHVFFASIDQRSERAAGESACTALVAVIADWFQSNQDIMPIQSQFDSLIREGSLEWRNLCENLMYRERFPDKHFDLETVLQAKIRPLTVSSSKSFIGFFQPEGADDMHRFDFLDGAMSFDSIWDEISKAAEYSSSDNPNLYIVSWNDHFFLLKVERDARHVVDTLGERLYEGCNQAYILRCDNDTMIHKLPEKAPSSPNSSGPLKDSSRSSSVEQDSEDGTEENILVSKGKESCKEYIKSFLAAIPIRELQVDIKKGLMASTPLHRRLQIEFHYTASSPKEITSAPQILTIEAPFEFSWPEPPPAMEIALAPAVAVV

SEQ ID NO: 110303 - protein, 126 aa, Oryza sativa
  unsure (1)..(126): unsure at all Xaa locations
  Clone ID: PAT_MRT4530_1437C.1.pep
IRYEXGAXWISLLQALXXXPXGPPTVXITGIDXXVXAXXPSSRLXLVXKXAVXXPLPXQGXLKFXPLXISXXKVXXXHXXIIPGESLAXNXTLXLHHXPDDXVSXANXXDXXLMIXXXLSPKVPTL

SEQ ID NO: 110304 - protein, 110 aa, Oryza sativa
  unsure (1)..(110): unsure at all Xaa locations
  Clone ID: PAT_MRT4530_14380C.1.pep
SEARRQQRRPGDGKLHQHGQIDGAVDVEWRAGMPRTSTPSPRSLCPLFFSPLVPTAAIVLIGGAXRGGAPYRRERTELRARVVRWSARPLSEPPLARRRTRPPLAAAALA

SEQ ID NO: 110305 - protein, 219 aa, Oryza sativa
  Clone ID: PAT_MRT4530_14381C.1.pep
ETGPGYIPFILLFLWDNRSMSSEAPKSIAPMSDSEYDSDATLTDNPFVGIDADSEDEENTSAMTLPLGNQPLNVVPLSAIPFSQVQVLNRKVISGKEEVFVPHWLKVHKLYKDGDWKVSISIRANGHKDWFYNHREYKKTFRSKPEVELFMERTLLHGTDIFNGRKLHKKKAMGSYGEGSGGSTSSMGEKKNTNTKRQKPSSIGDDPMMLKPTLPHGFV

SEQ ID NO: 110306 - protein, 89 aa, Oryza sativa
  Clone ID: PAT_MRT4530_14382C.1.pep
AHSALSPQPFLPKGVTVNTNSSVNKTLSTLLSSNVKIKFSFRSSELTSFNNTPFQAFGNIYSTINQSLPFTMDNATTPTIQSIDDRSLS

SEQ ID NO: 110307 - protein, 734 aa, Oryza sativa
  unsure (1)..(734): unsure at all Xaa locations
  Clone ID: PAT_MRT4530_14383C.1.pep
MDACFSTQLIDGDGVFNVSGLENFMKEVKMGECGLSYAVVSIMGPQSSGVTXLPKDDTAFEKQSALFALAVSDIVLINMWCHDIGREQAANKPLLKTVFQTPLENLEPILREDIQKIWDGVPKPHAHKETPLSEFFNVEVVALSSYEEKEELFKEQVASLRDRFQQSIAPGGLAGDRRGVVPASGFSFSSQQFWKVIKENKDLDLPAHKVMVATVRCEEIGNEKIASFTADEEWQQFEEAVQHDYVPGFGKKISNLLDRCLSEYDMEAIYFDEGVRTSKRHQLESKLLQLVNPAYQNILDHLRTRTLEVFKESFDKSLEKEGFAVAARDCTKVFLEKFDKGSEDAAIQQVKWDPSKIKDKLKRDIEAHVASVRAKKLSELCSKYEGQLTKALAEPVEALLDSASEETWPAIRKLLQRETKSAVSGFESAMASFELDEVTQKELLSKLESHGKSVVESKAKEEAARVLIRMKDRFSTLFSRDADSMPRVWTGKEDIKAITKTARSASMKLLSTMAAIRLDEDGDNIENTLSLALVDTARPGTTDRSIQSFDPLASSSWERVPEEKTLITPVQCKSLWRQFKAETEYTVTQAIAAQEANKRNNNWLPPPWALAAMAILGFNEFMTLLKNPLYLGVIFVVFLVGKAMWVQLDIAKEFQNGFLPAVLSLSTKFVPTIMNILKRLADEGQRPAAPERQREMELQPKSTRNGSHSNVTSAGSSSITSSESGPEYSSPIAH

SEQ ID NO: 110308 - protein, 80 aa, Oryza sativa
  Clone ID: PAT_MRT4530_14384C.1.pep
RTTYHSSRPGSSCSHSPRNHSSPRPRACDGSRSRSSPHHAASLLRLRTQIHSRSCRCSPPRPGSEAIGGLGPRSVVIGAV

SEQ ID NO: 110309 - protein, 164 aa, Oryza sativa
  unsure (1)..(164): unsure at all Xaa locations
  Clone ID: PAT_MRT4530_14385C.1.pep
MDACFSTQLIDGDGVFNVSGLENFMKEVKMGECGLSYAVVSIMGPQSSGKSTLLNHLFRTNFREMDAFKGRSQTTKGIWMAKAHNIEPCTLVMDLEGTDGRERGEDDTAFEKQSALFALAVSDIVLINMWCHDIGREQAANKPVLKTVFKVMMRMXSARXTTLG

SEQ ID NO: 110310 - protein, 87 aa, Oryza sativa
  Clone ID: PAT_MRT4530_14386C.1.pep
VCTQERMGGFALECSSSKGSKHRIRNQWAVKHVEKTNHERSHTAGQSPHGLLIGGGDAEQQAANPNRTLHSSQPQTKRRIKAVGRTS

SEQ ID NO: 110311 - protein, 336 aa, Oryza sativa
  unsure (1)..(336): unsure at all Xaa locations
  Clone ID: PAT_MRT4530_14387C.1.pep
MRPILMKGHERPLTFLRYNRDGDLLFSCAKDHTPNVWFADNGDRLGTYRGHNGAVWSCDVSRDSTRLITGSADQTAKLXWDVQTGRELFTFRFDAPARSVEFAIGDGLAVITTDNFMENVPTAQVKRIAEDPDDQSEESLLVITGIKGRINRAVWGPLNRTIITAGEDATIRIWDTEECDNLLITVTGTCLKESDKEQHQKTITSLSKSSADWSHFLTGSLDKSAKLWDTRTLTLIKTYVTERPVNAVDISPLLDHVVIGGGQDAMNVTMTDRRAGKFEAKFFHKILQEEIGGVKGHFGPINALAFNPDGRSFSSGGEDGYVRLHHFDSDYFNIKI

SEQ ID NO: 110312 - protein, 190 aa, Oryza sativa
  Clone ID: PAT_MRT4530_14388C.1.pep
MEDADVPQRLLSDANLELVSDFERQAYLMPKDRDYAHTQKNRFWEDISGAPICKKPRMNDIHNPTLRLMHKWIAMTLFSRGDLRPTREDGLIIMFAMVRKIKIAPVKCMIRQWLESIRFTAPVEYTSLITRIAKGLGVITNDQIAYISTACPCVDESYLVQGHILKHGVDGSLIYHFPGSTNEIPLPNAG

SEQ ID NO: 110313 - protein, 50 aa, Oryza sativa
  Clone ID: PAT_MRT4530_14389C.1.pep
PFTIVDSIGLFSALPWYRVSSMSVELTPIYPCSCVIAGVGLRHGEGGEAP

SEQ ID NO: 110314 - protein, 94 aa, Oryza sativa
  Clone ID: PAT_MRT4530_1438C.1.pep
DDIRVVSGSLDVVSRLRDIIIWGYILRIRGGPLMATAQYGYSSAPIYNPKLISWGGYSSVFSPGCMVMTGCRKELGSQGCLLEVPGGHRIKGIS

SEQ ID NO: 110315 - protein, 380 aa, Oryza sativa
  Clone ID: PAT_MRT4530_14390C.1.pep
CPRQICFLGWWCGSLFTNVLSSRCQNRFRLRRRWIDADDVQWGEVQIIEEDTPQRTPRDAFGQLATNYIFNQCGTSLLSLGTSCFRQDDHVNSDQDWDSLSSTSTSSEHSVTDARTYCSSNEDEDLMLEQSWQKYDSVKRNAELENPVKHSNTRGKGEPCFQSPKSLPTKNKGAEQRRRFCAAYSSKLALQAPLSFWPRWAYEMYDSYSLARRVADLWRQIVVNPSMDDYVRKPDILSYHIGSKLPMSCSVRQELLEIDGISYRLQKEIQLLKAFNIIRCRNCLALISRRSDGPVGAYVKQFSCGQEMMTVYNATGLALRGAPSKAHSLFPGYTWTIALCAACESNIGWLFRAEKTNLLPKSFWGLRSSQVSDDTQSGHN

SEQ ID NO: 110316 - protein, 210 aa, Oryza sativa
  Clone ID: PAT_MRT4530_14391C.1.pep
SASLRISYTYTKVEQARELRLRGREATGFRGSFVGKSLLSYPSAAGAADDMVSLSGLADNLNLQFCVLKKPPFVPEWMEETMFELQMLSVGTLVGRYPPQFQGRFGMLVELLGGIIHGVGKQQQVLNVSAELTASRNFFTSIPVMSLEGVYNPEDGRMHLMGCRSVHAPWRVLSKMSDLEDGMDCSVEAPVEYPPTTTRWLMMMISQTAK

SEQ ID NO: 110317 - protein, 113 aa, Oryza sativa
  Clone ID: PAT_MRT4530_14392C.1.pep
KLTQAHFFFFLSTTGADNGIRIENFASFRTRLGSTKHNSQHILVAEPVGNVTSPSSSSSTRSWRPLPPSPPAPPPCPRPPPPGPPPRRAPRRPCPPGQRSSPRRGRARGRCCG

SEQ ID NO: 110318 - protein, 566 aa, Oryza sativa
  Clone ID: PAT_MRT4530_14393C.1.pep
MPVGWNDTNIVLIPKVKSPSVLKELRPSSLCNVVYKIISKVLANRLKSILPEIILDTQSAFVPGRLITDNVLIAYEATHFLQNKRNGKDGYAAIKLDMSKAYDRVEWPFLLHMLRRLGFDEKWNRLIMNCVTTVNYKIKVNGDYTEVIKPDRGLRQGDPLSPYLFVICAEAFSAAIQAAEDDSLLLLKATESVANEMKQIILDYERCSGQIVNRDKSVVMFSSNMDEEEKKDKIMKPKSQGGLGFRDLHSFNIAMLARQGWRLIQNPDSLCSRLLKAKYFPNCNVLDAQSRKQMSYSWRSILKGIQLLRKGVIWRVGNGEHINIWSDPWLPRDMRFVTTRRGASLITRVCELIDPTTGQWDIELIQQIFNENDAKIITRIPLREGQEDFIAWQPDTKGIFSVKSAYKLHEKILNELQGQIGEGGWGVVARDTDGCPLMMAAGNLQNLHNANQAEALACIQALKLANDMGMGHIIVETDAQALKAALLDETHDRSVNAVIIREAKFLLAMNFNVHQVMYCPRECNRAAHELAKIGASLGPRSQFVWLEGFPDDVCNLVASDSAGLPA

SEQ ID NO: 110319 - protein, 55 aa, Oryza sativa
  Clone ID: PAT_MRT4530_14394C.1.pep
HLNVYDGCSLTGRRLPCPVTGGDLMTAPFLFFYSRRCPPNRGHSGDLTAVSSRCG

SEQ ID NO: 110320 - protein, 68 aa, Oryza sativa
  Clone ID: PAT_MRT4530_14395C.1.pep
NVPYGLSGNMTISNNTYIPLDSNKTETYNWRNTSLAYNSTNKTEDYSWRNNTAVILNNRTNVTIAVNF

SEQ ID NO: 110321 - protein, 167 aa, Oryza sativa
  Clone ID: PAT_MRT4530_14396C.1.pep
MAENSRRSPMESADAIVFLVGGALAGDLAGANTSAGGGFPTRCAMRGRRRSSTIVHARIDSAWAQGDPSGGAQFTVILAASRMWYEVGGKAWSIRVEDSEGGSSPSRRSAATASILRSHLHKAAMTKWTGVTSTRPREEEKVEVKLCPWRPRQGGCSTGQCRGRRQP

SEQ ID NO: 110322 - protein, 99 aa, Oryza sativa
  Clone ID: PAT_MRT4530_14397C.1.pep
MEIAARPSPVQPRLVLAAAQGGKERRRQREGLWKAGADPTKSEGAISGSFLIDLSTAYRHNPICCRILSYAPGPKNGDRTGNRGTEAWCKGPLESPGSP

SEQ ID NO: 110323 - protein, 88 aa, Oryza sativa
  Clone ID: PAT_MRT4530_14398C.1.pep
MSSSSAAALARGKSGISAAKFEASKGLGAKPKRSASATGSRGKTEKKVYSLPGQKFDPPEEREPLRIFYESLSKQIPSSEMAEFCFNA

SEQ ID NO: 110324 - protein, 76 aa, Oryza sativa
  Clone ID: PAT_MRT4530_14399C.1.pep
FNRAPAVRVALTLIVLKTLGRCSNISFISLVRLPLQTYVKDVLELKDSLTIVSSLPSFILVLDLGFFLDCYPLSNS

SEQ ID NO: 110325 - protein, 89 aa, Oryza sativa
  unsure (1)..(89): unsure at all Xaa locations
  Clone ID: PAT_MRT4530_1439C.1.pep
TRAHQYETVEDTSKLLFGGSAPIGLGENTXIRNCLIYMNAKIVRNAIIANTQAVQDSDHPEXGYYIRTGIVVILNNATMNDRTVISKHT

SEQ ID NO: 110326 - protein, 749 aa, Oryza sativa
  Clone ID: PAT_MRT4530_143C.1.pep
MEDPVAAPSSSVAAASAAAAPRVAPVAAPLPLAAQQAPAAAAGCRRQVFSVELRPGETTIVSWKKLLKEAGHAAASPPPAAPAVAVAASDPAFPALPGQPGAVHPPESDPKDPAQPNRFNAVIEKIERLYMGKHSSDEEDLDDVPDDDQYDTEDSFIDDAELDEYFEVNNLRTKHDGYFVNKGKLEQIEAGTSANVAPKKRRRKDSSSGYIENNQVAPADYPSIGNMPGKSAARSGAHVGKKLTSSNIGSYGEYYHDDNRVVKNITGAGVHKRKSMDFSMGSDTAAYTKISSKDMPYASSELNKAAGLQPTDYTHRSKTAEAYDYAYSAYRDRDTSMQLDFQQKRAYTGENRDPSNKIHRKEKHGMGEFSGMATTGALYSGQVMQPITSRDGSGTKPKGTRLERAIRDLQKIAAEYRPPAIDINEVDPNGQVAVKRRLPPEVKQKLAKVARLSANHGKIQEHELMDRLMGIVGHLVQRRTLRRNMKEMVESGLSAKQEKADKFQRVKMEINEMIKSRVAAKAKVNEHHSGSADDFQIANDEKRYLKGKSVMDAALEDRICDLYDLYVEGMDEDKGPQSRKLYVELAELWPEGSMDNVGIKDAINRSKERRRSLYNQQKVRNEERMKRKRLAAAAKLQDGYPVVMQSALIQQVAQPPITNPVATYPVTDQGSKSFDRVREISASANPDDINRNTGEMKKKKRKPESDLVDTQANAMKGPSQHVEKNKPPKRADEAVETVLCLPFYDQQPS

SEQ ID NO: 110327 - protein, 303 aa, Oryza sativa
  Clone ID: PAT_MRT4530_14400C.1.pep
DDTLESIRSALNYSESDGSETDTHPMLHTFHHLRSATSSSRSSQDGDSNDSSIEDGNENQEGKDDNEHEEKNGKVVAWTADDQKNILNIGCLEIERNQRLENLIARRRARKYIDRNLIDFGSSDSLPKIEELSKFNVQIPAIFAPRKNPFDLPYNEDNFPESAPSAPLNMLSKFDLPFDEANESSSTGGANSNHVDSTTVFSQSQKDTMFRRHESFTPGASFLSDFWQDTQPSRFRPYFVTEKMANEGISVPNLEGEASEKSSVEDSDSTSSVTDQENHKLVLEDSPNQNLGPQMSQMDSSLS

SEQ ID NO: 110328 - protein, 63 aa, Oryza sativa
  Clone ID: PAT_MRT4530_14401C.1.pep
TQIQLMLHLQQIRKMIDLVVSLMRNRAPDSIYGVAFHKYPIWASKSTSIIVGSSEHCQVKDLP

SEQ ID NO: 110329 - protein, 134 aa, Oryza sativa
  Clone ID: PAT_MRT4530_14402C.1.pep
PGLQYSRQRMSEGSLALETCAIIRPSICLQRLLTWAYAEMELPFMEGSLDNAGKLLGPQHTPPIGVKNQGLSSHCHSEALRSDLAHHRHRLPPGTPRKQKPEAARRSTARRRPAIRKKRGITVRKIEWPVKFSN

SEQ ID NO: 110330 - protein, 56 aa, Oryza sativa
  unsure (1)..(56): unsure at all Xaa locations
  Clone ID: PAT_MRT4530_14403C.1.pep
CNGMASYVSVYTLGHPTMLVILYAMTELYAMLACRTLYLPEXLGSVCLVQKKKKKK

SEQ ID NO: 110331 - protein, 41 aa, Oryza sativa
  Clone ID: PAT_MRT4530_14404C.1.pep
CELLSHCLAVTAGISNHSISCNLCQKKKKKKKLETSSLSPR

SEQ ID NO: 110332 - protein, 55 aa, Oryza sativa
  Clone ID: PAT_MRT4530_14405C.1.pep
EHEHASYQQDWTYQDVRPGHHGLLYVSPPTSGWCSLLVIWRCKEEATVIIWYHTH

SEQ ID NO: 110333 - protein, 604 aa, Oryza sativa
  unsure (1)..(604): unsure at all Xaa locations
  Clone ID: PAT_MRT4530_14406C.1.pep
LLYILCLFEQLSGLKINFNKSEIFCFGEAQDKQELYSGIFTCEIGNLPLKYLGIPIDQRRLLNKDWKGTENKMEHKLGCWQGKLQSIGGRLILINSSLSNTPMYMISFYKLPKGVKERLDYFRRRFLWQEDQGIRKYHLVNWPLVCSPRDQGGLGILDLEIMNCAMLGXWIWRLENERGWWQDILTKKYCHNKVLSGLKVKPRVSHFWQGIMDVKEVFYKFCTKVVGNGRNTLFWEDNWIGGKPLAEQFRDLYNITXQKKITVADVKQGGIDSIKFRRDVLGNKLRNWLKIKQSWGDLVLEDGTRDTLRWSLTKDGKFTVKSFHTALKMQQVIFPHKKLWDFKVPLKIKIFIWLFXKNKILTKDNLFKRGWRKGKANCQFCDQTETLQHLFFDCPLARLLWNIVKCALNINSVLNRQDLFGSWMNKIDKFTKKLVVVGLAAIIWTIWKFRNKACFEKKLPADPTDLVFMACSLVDSWATLQKQEGSRRNLQLGARLLKQVKSTARVRIECRLALEHGNEDNLSLSIAVRVHRGRYSGRHGEGKWSGGGRRGAASQRHGWRGRGGCADGWYQFHRARSIAEHLVIGSALMFAGETRRCQPGQIFF

SEQ ID NO: 110334 - protein, 68 aa, Oryza sativa
  unsure (1)..(68): unsure at all Xaa locations
  Clone ID: PAT_MRT4530_14407C.1.pep
FCSDDXVLGPXTPSSSGYCSVPEEGXPINRGPTVTKISGMTILDNDAVNAVSVLLTTAVTAYACIRIF

SEQ ID NO: 110335 - protein, 116 aa, Oryza sativa
  unsure (1)..(116): unsure at all Xaa locations
  Clone ID: PAT_MRT4530_14408C.1.pep
ESLLKPKPTPXQQLREWQRRLRNEGRNIERQIRDVQREEKKVEKSIXEAAKRNDIGSAKALAKEVVRSRKAVNRLYENKAQLNSISMHLGEIVATARTVGHLSKSTEVMKLVNNLM

SEQ ID NO: 110336 - protein, 291 aa, Oryza sativa
  unsure (1)..(291): unsure at all Xaa locations
  Clone ID: PAT_MRT4530_14409C.1.pep
SFYKLPKGVKERLDYFRRRFLWQEDQGIRKYHLVNWPLVCSPRDQGGLGILDLEIMNCAMLGXWIWRLENERGWWQDILTKKYCHNKVLSGLKVKPRVSHFWQGIMDVKEMFYKFCTKVVGNGRNTLFWEDNWIGGKPLAEQFPDLYNITLTKXITVANVKKGRIDSIKFRRDVLGNKLRNWLKIKQFWGDLVLEDGTKDTLRWSLTKDGKFTVNSFYKALKMQHKQEGSRKNLQLGARLLKQVISFLVKEIGASCPSSYIYIYIYIYIYIYIYIYIYIYIYLFIYLLLLS

SEQ ID NO: 110337 - protein, 54 aa, Oryza sativa
  unsure (1)..(54): unsure at all Xaa locations
  Clone ID: PAT_MRT4530_1440C.1.pep
VVDSSRRSMPRSSWFQLPXQRXPLTPMYLTTTACSDVTGSHHRADVDRSSSKVS

SEQ ID NO: 110338 - protein, 243 aa, Oryza sativa
  Clone ID: PAT_MRT4530_14410C.1.pep
MEAVKSLLKPKPTPQQQLREWQRRLRNEGRNIGRQSRGRLLSVDSGSSASVQREEKKVEKSIREAAKRNDIGSAKALAKEVVRSRKAVNRLYENKAQLNSISMHLGEIVATARTVGHLSKSTEVMKLVNNLMKAPEVAATMQEFSKEMTKAGVMEEMVNDAVDSALDNEDIEEEIEEEVDKVLSAIAGETASELPDAVRKEKEKMKQPSTSEPAERTAIAEAVDDDDDDELEQIRERLAKVRS

SEQ ID NO: 110339 - protein, 633 aa, Oryza sativa
  Clone ID: PAT_MRT4530_14411C.1.pep
MAAAAAQAQAQQAASSASEGGVQDAQLFDVFAQVGGVVSVRVCRDVNTRRSLGYAYVNYSSPADAARALEMLNFTPINGKPIRIMYSNRDPSLRKSGTANIFIKNLDKSIDNKALYDTFCVFGNILSCKVATDASGESKGYGFVQYERDEAAQAAIDKLNGMLMNDKKVYVGPFIRKQERDNSPGQVKFNNVYVKNLSENTTEDDLKEIFGKFGTITSAVVMREGDGRSKCFGFVNFESPDDAAQAVQELNGKKFDDKEWYVGRAQKKSEREMELKEKFEKNLQEAADKYQNTNLYLKNLDDSVDDDKLRELFAEYGTITSCKVMRDSNGVSRGSGFVAFKSAEDASRALAEMNSKMVGSKPLYVALAQRKEDRKARLQAQFSQLRPVPLAPSVGPRMPMFPPGVPGVGQQLFYGQPPPAFINTQPGFGFQQPLMPGMRPGAGPMPNFIMPMVQQGQQPQRPAGRRAGAGGMQQPMPMGQQQMMARGGRGYRYPTGRGMPDPAMHGVGGGVMPSPYEMGGMPMRDAAASQPVPIGALATALANAAPDQQRMMLGENLYPLVDQLEHEQAAKVTGMLLEMDQTEVLHLLESPEALKAKVAEAMEVLRTAQQIQTNATPEQQLASLSLNDGVVSS

SEQ ID NO: 110340 - protein, 88 aa, Oryza sativa
  Clone ID: PAT_MRT4530_14412C.1.pep
VIVSCTSKKMFKCLYPSSVQAPRKHLIMFTQRFYRIHFSLQEFAHVNTFLFLSGNCREAPDLRHESLKTAQSTGPSPTSGAPEQKDPT

SEQ ID NO: 110341 - protein, 139 aa, Oryza sativa
  unsure (1)..(139): unsure at all Xaa locations
  Clone ID: PAT_MRT4530_14413C.1.pep
MDRFFAAQSSPMRPSSYYTPPYDRPNYPPPSPQEPVRNSYYMSYDRPSYPAASPQEPTRTSYYASYDRPSYPPPSPQEQESSQWDFFWNPFSSLDSXAYPRPRSSYDXVVTDDELARLQRVREEEGIXXLKKEMMSVNT

SEQ ID NO: 110342 - protein, 662 aa, Oryza sativa
  Clone ID: PAT_MRT4530_14414C.1.pep
MAAAAAQAQAQQAASSASEGGSPASSAAAAAAAAASFPATSLYVGDLDVSVQDAQLFDVFAQVGGVVSVRVCRDVNTRRSLGYAYVNYSSPADAARALEMLNFTPINGKPIRIMYSNRDPSLRKSGTANIFIKNLDKSIDNKALYDTFCVFGNILSCKVATDASGESKGYGFVQYERDEAAQAAIDKLNGMLMNDKKVYVGPFIRKQERDNSPGQVKFNNVYVKNLSENTTEDDLKEIFGKFGTITSAVVMREGDGRSKCFGFVNFESPDDAAQAVQELNGKKFDDKEWYVGRAQKKSEREMELKEKFEKNLQEAADKYQNTNLYLKNLDDSVDDDKLRELFAEYGTITSCKVMRDSNGVSRGSGFVAFKSAEDASRALAEMNSKMVGSKPLYVALAQRKEDRKARLQAQFSQLRPVPLAPSVGPRMPMFPPGVPGVGQQLFYGQPPPAFINTQPGFGFQQPLMPGMRPGAGPMPNFIMPMVQQGQQPQRPAGRRAGAGGMQQPMPMGQQQMMARGGRGYRYPTGRGMPDPAMHGVGGGVMPSPYEMGGMPMRDAAASQPVPIGALATALANAAPDQQRMMLGENLYPLVDQLEHEQAAKVTGMLLEMDQTEVLHLLESPEALKAKVAEAMEVLRTAQQIQTNATPEQQLASLSLNDGVVSS

SEQ ID NO: 110343 - protein, 64 aa, Oryza sativa
  Clone ID: PAT_MRT4530_14415C.1.pep
IIGKIKVFPFLTSTAYSFVCRDCIFVFIHRGYIISKRVPNLSCSICLFFYPASTSNWIYATFLN

SEQ ID NO: 110344 - protein, 79 aa, Oryza sativa
  unsure (1)..(79): unsure at all Xaa locations
  Clone ID: PAT_MRT4530_14416C.1.pep
AFPGRRGSVFMECAEGGKCREKRGRWEDKPTGRRGRPHDGKERGPRGEGGVRXVGLERWMSPGGKEGGGSGGRRNHAAL

SEQ ID NO: 110345 - protein, 39 aa, Oryza sativa
  Clone ID: PAT_MRT4530_14417C.1.pep
DPVNDMIYVPLQHVQDIRIKESGVYQSFIWQMPSQFSLS

SEQ ID NO: 110346 - protein, 473 aa, Oryza sativa
  Clone ID: PAT_MRT4530_14418C.1.pep
MESFSNSQLLLITLLMLLGGEVFTSILGLYFTNAKYSSKMIATLPDDDDHGGSGKPPPPTTSPSSTLVELELAPPMDVVVVNPTTTATTHDEVELGLGRRNKRGCTCTTTHTSSSSSASKTTTTRLLMFVVMGYHAVVHVAGYTAIVVYLSAVGGAGAVVAGKGISAHTFAIFTVVSTFANCGFVPTNEGMVSFRSFPGLLLLVMPHVLLGNTLFPVFLRLAIAALERVTGWPELGELLIRRRRGGGEGYHHLLPSSRTRFLALTVAVLVVAQLALFCAMEWGSDGLRGLTAGQKLVGALFMAVNSRHSGEMVLDLSTVSSAVVVLYVVMMYLPPYTTFVPVQDKHQQTGAQSGQEGSSSSSIWQKLLMSPLSCLAIFIVVICITERRQIADDPINYSVLNIVVEVISAYGNVGFSTGYSCARQVRPDGSCRDLWVGFSGKWSKQGKLTLMAVMFYGRLKKFSLHGGQAWKIE

SEQ ID NO: 110347 - protein, 54 aa, Oryza sativa
  Clone ID: PAT_MRT4530_14419C.1.pep
CFYVFFSSVLWNSWSSMCLCAYNRSPTTLMNERILLSVRNWYPNGGTHNIHSPQ

SEQ ID NO: 110348 - protein, 130 aa, Oryza sativa
  Clone ID: PAT_MRT4530_1441C.1.pep
VPQPPKLINGPTPTGRAQKGPKKFKGGGPPQKKSKGEKRYGPKGGPNLRGAPVPKGQSPLSKSPKKILEPPIFFSKKIKGTPPNPKRQNFPPPHKNQVPARGPPVGFKPKGHQGGRRKKLPTNGGEQGAQ

SEQ ID NO: 110349 - protein, 305 aa, Oryza sativa
  Clone ID: PAT_MRT4530_14420C.1.pep
MATIPEVPASELIQTMPRVGMGTAAFPFTSSEDTTAAMLRAIELGYRHFDTARIYATEGCVGEAVAEAVRRGLIASRADVFVTSKIWCSDLHAGRVVPAARETLRNLGMDYVDLLLVHWPVSLTPGNYDFPFPKEVILPSFDMEGVWRGMEECHRLGLARAIGVSNFSAKKLEQLLSLAAVRPAVNQVEVNPMWQQRTLREVCRREGVQLCGYSPLGAKGTPWGSAAVMDSGVLQEIAGAKGKTLAQTYNEKRMKENLDIFNWELTDEERERISQLPQLRGLPGLEFISDHGPYKSVEDLWDGDV

SEQ ID NO: 110350 - protein, 103 aa, Oryza sativa
  Clone ID: PAT_MRT4530_14421C.1.pep
SVGVRWSNYRCIGGLTGGATVVSPAVGGRFDRAIQLRHLLRSRHTSISSPQTLSMQRKTRTEILVTDNEVIATATASYISFMSALNSGLGLQSGVGTRAAVAQ

SEQ ID NO: 110351 - protein, 648 aa, Oryza sativa
  unsure (1)..(648): unsure at all Xaa locations
  Clone ID: PAT_MRT4530_14422C.1.pep
MARRLAAALCLAVAAVSVAVATARFVVEKNSVKVLSPRSLRGRHEAAIANYGVPDYGGTLTGVVVYPADARLADGCRPFGEAAAKALRSRSRRPVVLLVDRGGCYFALKTWHAQLAGAAAVLVADGVDEPLLTMDSPEEETPDMAFLANITVPSALVTKQFGDALRAAASAADDEVVVRLDWRESMPHPDERVEYELWTNSNDECGPRCDEQAAFVGAFRGHAQLLEKRGYALFTPHYITWFCPDAFLETTQCKAQCVNRGRYCAPDPDGDLAAGYSGRDVVLENLRQLCVHRVANARNASWLWWDYVADYHLRCSMKGDHYTRRCADDVAKSLGLPMDLIDECMGDPDADVENDVLKTEQIVQVGHGTRGDVTILPTLVINNVQYRGKLESTSVLKAICAGFKESTEPDVCLTPEMETDECLNNNGGCWRDEKTNITACKDTFRGRICQCPVVDGVQYQGDGYTHCKGCTRLLLIGRTRADSDLSGCKCPPGFKGDGLHCEDVDECSEKLACSCPHCXCKNTWGSFDCSCHGNNLMYIKAEDTCIAKNMSAFGWLVTTLVLSCLAGAGVAGYVFYKYRLRRYMDSEVMAIMSQYMPLEGQNGERLPLREEAQLQRLNILAMSIRFETPRHMTATNAAMYMAKFRHHT

SEQ ID NO: 110352 - protein, 265 aa, Oryza sativa
  Clone ID: PAT_MRT4530_14423C.1.pep
MAPTPLFLLLLLTGVTAEPAHPGYAEGDGSSCDVAAVAVAERREEFDGGRIVDISHYYREEMPEWESADGTGGGFLRLVRSMRNGSDIANFSELRLTAHSGTHVDAPGHVFDHYYHAGFDVDTLDLAILNGPALLVDVPRDSNITANVMESLHIPKGVRRTLFRTLNTDRKLMWKKEFDTSYVGFMKDGAQWLIDNTDIRLVGVDYLSVGAFDECIPAHLVFLEKRVNVCASISYKLIYITIVIDYQCNSWIYDTNATSANIDCH

SEQ ID NO: 110353 - protein, 93 aa, Oryza sativa
  Clone ID: PAT_MRT4530_14424C.1.pep
SILHVTSYTVTSQRQIHSARTGTLQAASIVKKIIKKTLRFKKKIKLEYTTELKCVVCILSNQIILVLDDAPVVGTHHQRHLLICASKQSIEIH

SEQ ID NO: 110354 - protein, 77 aa, Oryza sativa
  unsure (1)..(77): unsure at all Xaa locations
  Clone ID: PAT_MRT4530_14425C.1.pep
PVLFLQVSTIIQALILLTRTRMWTYAERPGSMLVFGFXVAQLIATLIDVNADWAATLIKSFSGGLAGNGWQYDILIF

SEQ ID NO: 110355 - protein, 83 aa, Oryza sativa
  Clone ID: PAT_MRT4530_14426C.1.pep
LTRGAVLLSLCRLDRRISTGSPPCHHQSPQDYSIPHLDYTTNLASPRAINLSPWRHQRAFTSARSSAASLLFSSLAGREGEAL

SEQ ID NO: 110356 - protein, 65 aa, Oryza sativa
  Clone ID: PAT_MRT4530_14427C.1.pep
RSFAFSNRLVRRKYYIRLLLGRPSPSRLITPIRLTHAKARDPGPGGHPSVPTRPYILCQAARGWA

SEQ ID NO: 110357 - protein, 135 aa, Oryza sativa
  Clone ID: PAT_MRT4530_14428C.1.pep
RASGCSLVQRCCKQGKVSIAEKHANSELNPRVGAAGGYEGGHRPLCVSCERPILAVRVCHLRSFASISFSPFSSGGRAGLVVVAAAVTTKITPVLQLLQRPTSPLSPPFPISDSAIPHLPSLSSIPHRYWGKGRK

SEQ ID NO: 110358 - protein, 115 aa, Oryza sativa
  unsure (1)..(115): unsure at all Xaa locations
  Clone ID: PAT_MRT4530_14429C.1.pep
RRXGLADLMLDATQQFAQPFTLTRLFNWHRWLFPAEEARFSTHXLNVGALRXXEPMQVVSXRXDRPTVHFEAPPRQGLEQSLDDFIEWFEASXQXCGXXPNCLRXXLXXXWFGKP

SEQ ID NO: 110359 - protein, 44 aa, Oryza sativa
  Clone ID: PAT_MRT4530_1442C.1.pep
VTFVVAGAFAGEGAVGYGGPKVWEMNHLGKRGEDISVLGQRPAQ

SEQ ID NO: 110360 - protein, 152 aa, Oryza sativa
  Clone ID: PAT_MRT4530_14430C.1.pep
SKDRQWLNRTQLSRSPAEANHPAEIRYGRYTLVSTEPTTEQRDLLAQIIDVSIPSNLNPSVEEAMHYVLQRSGYSLCPTTEPVKTLFTRPLPAAHYRLGPIALRSALQVLAGSAWQLTTDEVSRSVCFEQQKADVGIVRATPDSSHQAEARP

SEQ ID NO: 110361 - protein, 41 aa, Oryza sativa
  Clone ID: PAT_MRT4530_14431C.1.pep
RDLCQAAVAYLAGEPPLTCTTSATLPTATTAFDVAPNALLL

SEQ ID NO: 110362 - protein, 63 aa, Oryza sativa
  Clone ID: PAT_MRT4530_14432C.1.pep
DLVNTASCTMLDLLPHIITNSCFRHVCRQHDAVIDARAWELALPFPSVIPFPIQILARPYVCV

SEQ ID NO: 110363 - protein, 123 aa, Oryza sativa
  Clone ID: PAT_MRT4530_14433C.1.pep
MVCETRAAKRDAASASINTRELGRAPALNLSGNRLTGELLEGFFSLALLEKVDLSGMPASAFLGTTLCGALLAPCANPALLPSSLGNSKGGGKLTRGAVIGIILDVVAVLIVMLVGNSPTLKV

SEQ ID NO: 110364 - protein, 97 aa, Oryza sativa
  unsure (1)..(97): unsure at all Xaa locations
  Clone ID: PAT_MRT4530_14434C.1.pep
LRFLPPXSKWSPTGSISTRWWVAXSRPPXDEHXKXYRXXXXATNXVRXXXKFXVLPEEXVRRXRXAMXRCSASTRSXSVTPNNDSSXYWHMDCGXQE

SEQ ID NO: 110365 - protein, 156 aa, Oryza sativa
  unsure (1)..(156): unsure at all Xaa locations
  Clone ID: PAT_MRT4530_14435C.1.pep
MSTDMYHEAKAGLAHHGVKFSSPERDWPAMMSQKDTAHAGLTKGIEGRFKKNKDEFSKGFGKXVSHSQVAVDLLDGGTTTVNGKNIIIATGSDVRSLPVVTTDDKKIASSTGALALSEIPKKIGAIGAGYMXVRDGVLYWNKLGSEVTVVEHAADI

SEQ ID NO: 110366 - protein, 282 aa, Oryza sativa
  Clone ID: PAT_MRT4530_14436C.1.pep
MTNRISAMGGNQEYMIRFDGHIDDASPSSATAEPPPPLPPPRPFAGRAISAEREHSVIVATLLHVISGYRTPPPEVFPAARAEVCGVCGMDQCLGCEFFAGESGVVSFDGAEKVAAAAAAAAAGAAAGQRRRRKKKNKYRGVRQRPWGKWAAEIRDPRRAVRKWLGTFDTAEEAARAYDRAAVEFRGPRAKLNFPFPEQLSAHDDSNGDASAAAKSDTLSPSPRSADADEQVEHTRWPQGGGGGGGGGGGETGDQLWEGLQDLMQLDEGGLSWFPQSSDSWN

SEQ ID NO: 110367 - protein, 130 aa, Oryza sativa
  unsure (1)..(130): unsure at all Xaa locations
  Clone ID: PAT_MRT4530_14437C.1.pep
ESITRNGKSAQSPTASRGGETAMTMITPSYLEEGTSSRSLSESRESSPLHHSRRRHHRRSEPYLPPLPSPPNPAVSWTGKPRTTRPRPWRTRRRSSSNRSTASTLRRRRXXXXXXXXXXXXXXXXXNSPY

SEQ ID NO: 110368 - protein, 151 aa, Oryza sativa
  Clone ID: PAT_MRT4530_14438C.1.pep
QCKCDFFFFWLLFREGFIHKAHKKCYTRRSTLLLRGIYTVQAQTARNGKKRDKVRGESAKKAKSSLSSFLRPHGEATRRRWRVAGAGRLVGESNRVESNPLAKSGPRRRRRPAARRSRRGGGSGRAGRWRGRSQAMSRGRRGGRCDRRGGG

SEQ ID NO: 110369 - protein, 157 aa, Oryza sativa
  Clone ID: PAT_MRT4530_14439C.1.pep
LAVRGRHAFGDRGHRHCSRCCRTHHRASSHRATAAATAVVQPLMPPLRRAPRPLPQPPSLPPRVLPLLPQATAAAATGRAAVVQHQPRRRSPPSAMPALRPLACRAAVLALRCRFAKERPRRCPPGWPLGLRRRAPATARRGEGREGAAAGARVRPH

SEQ ID NO: 110370 - protein, 171 aa, Oryza sativa
  unsure (1)..(171): unsure at all Xaa locations
  Clone ID: PAT_MRT4530_1443C.1.pep
GAAAARGRRQPAAAAGDVERRRAAGGQRRARGRRRTPRGGXSPATEEGGALADFRRRGAAAEVLLVLADLREVTARVDVDRSGGATRLESAAAAERGGSRGYGATEVERGNGAVAEFARAAAKLAVAAEQCGGHPSDGKRRPDFAGVRRCKCSARGERGRARRLGENGGKG

SEQ ID NO: 110371 - protein, 87 aa, Oryza sativa
  unsure (1)..(87): unsure at all Xaa locations
  Clone ID: PAT_MRT4530_14440C.1.pep
QNRNIEGITGNRHSRYATERRRVLIRTSERRCCLRLCPRPPPSSSPPPSSASTTPSTTAAALNSCRPRPXPPPLPPSSAFAVTDAAA

SEQ ID NO: 110372 - protein, 487 aa, Oryza sativa
  unsure (1)..(487): unsure at all Xaa locations
  Clone ID: PAT_MRT4530_14441C.1.pep
MHGSDLSKLIHQERPKRNFKSKQRMIQPSIRVYRQHTFEMLILTMPLATGEERGNDCRRDGSGSRGQIICIIFLPEDPTIALMKVKCRAGASGYVRVVNALRANIHATLDRRFCVDDSHELQIICHDRCCRLAALVCVRRDRRCRLRPCPRPPPSSPPPPSSASTTPSTTAAALNRCRPRPRPPPLPPSSAFAVTDAAAIVRVRCRCRRRPRPLPPPSSATVAALVRVHHXLDRCRLPRPRPLPSSPRSSASAEHGGWRAGMGEDKSGCCDAMEDRTASSRALRNTNWTDVNDPPFTVSTERASGPCDRPMPRCRCVGEKSSRGQGGGDPSRHAVTLVDTPRRNVSIALQLSSSSIDLLQLCLSAARGRALQAQAAIFVIDGFLVHNKLSWLLAHLQASVQHWRFGSVDLSNQTLSSNSQRLASKWIRRNGSYIHISASNFVSIPDFTLSAELFRVISESTNLARHLDGSTGVSPKPSPMNLVIIAD

SEQ ID NO: 110373 - protein, 68 aa, Oryza sativa
  Clone ID: PAT_MRT4530_14442C.1.pep
MENRWNGSAQADAAELEDRRFLHQQCGAVLPSSSIAIDNAGGPPRLIWAEAVRLADDHDEDSDGGGYS

SEQ ID NO: 110374 - protein, 104 aa, Oryza sativa
  unsure (1)..(104): unsure at all Xaa locations
  Clone ID: PAT_MRT4530_14443C.1.pep
PNQLAISLXXVLCCLVXIIDQWIKQYLTFLXKXXIKKXHXLXNXINXXPGGAXYPXXPIXIRITXHXPSFXNLVXGENPAVXQLNPLXHIPLSPAXXNTXKAHT

SEQ ID NO: 110375 - protein, 1581 aa, Oryza sativa
  Clone ID: PAT_MRT4530_14444C.1.pep
MPKVYGTGVFEFRHPRAAEYPLPADVPASAASAPDKAIPTAAASTITLLDIQRDRLTRVAAEHWGAPTAGAAFDAALVREIYATELRVEGRGRKTVPLHRVMILEVSQYLENYLWPNFDPAGASFEHVMSMILMVNEKFRENVAAWTCFHDRKDAFKGFLWRVLKLKEEDRELNMAEKTNYLLFMINAFQSLEDELVRETILQLVSLKLWHTLSFGRLQMELCLNPELIKKWTKIKRKEAKEAKKAGQTCDASEMLENRFLRNLIEEFLEILDSKVILSSQDGGDESVLNVSLSGQVDDYCVLYCERFMEFLIDMLSQLPTRRFLRPLVADVAVVAKCHLSALYTHEKGRLFAQLVDLLQFYEGFEINDHSGTQLSDDDVLQAHYSRFQAFQLLAFKQVPKLRDFSLCNIGSIHKRADLAKKLLVLTDVELQDLVCNKFFYQLLLLFLKLISEEDPCSGRRDFLIEVLVAFFEKRQSQKDAVNALPLYPNEQIMWDESLVPSINYSGEGCLALPKLNLQFLTLHDYLLRNFNLFRLESTYEIREDIQEAVPHLHAYINNEGDTAFRGWSRMAVPIKEFRITEVKQPNIGEVKPSAVTADVTFSISSYKPQIKSEWDALKEHDVLFLLSIRPSFEPLSPEEAAKSTVPERLGLQCVRGCEVIEIRDEEGSLMNDFTGRIKREEWKPPKGEIRTVKIALDTAQYHIDVTEVAEKGAENVYGTFNILMRRKPKENNFKAILESIRDLMNETCVVPEWLHNIFLGYGNPSAAQWINMPDLLENIDFKDTFLDADHVVQSFPDYQVTFINSDGTENLNPSPPFKIKLSKKMRESSHALPGNVNSVLSAKNNMVDDDGPQKEKIMVETYIPADPGPYPQDKPKQNSVRFTPTQIGAIISGIQPGLTMVVGPPGTGKTDTAVQILNVLYHNCPSQRTLIITHSNQALNDLFEKIMQRDVPARYLLRLGQGEQELATDLDFSRQGRVNAMLVRRLELLGEVAKLASSLHLPEDVSYTCETAAYFWLLHVYARWEQFLAACAQNQDKPSFVKDRFPFSEFFSDTPQPTFTGESFEKDMHAAKGCFKHLLTIFQELEECRAFELLKSTAERANYLMTKQAKIVAMTCTHAALKRRDFLQLGFKYDNLLMEESAQILEIETFIPMLLQRQEDGYARLKRCILIGDHHQLPPVVKNMAFQKYSHMDQSLFTRFVRLGVPYIELNAQGRARPSIAELYNWRYRELGDLPYVREEAIFHKANSGFSYDYQLVDVPDFRGRGESAPSPWFYQNEGEAEFIVSVYIYMRLIGYPANKISILTTYNGQKLLIRDVINRRCKPWNIEPPSKVTTVDKFQGQQNDFILLSLVRTRFVGHLRDVRRLIVAMSRARLGLYVFCRRSLFEQCYELQPTFQLLLQRPDKLGLNLEECTPFTERPLEETGNIHYVAGIEDIGHLVNFRLEHLRQMQYMQYYAPHANVPPSAVPENNADATENGNAGNGMHKANDVMAEENGDAVMRNKMEEDTIDTMQEENKMDGKNPEANDMAMEEKTVDGDDDPKNKMEEGNTEAKNKMEEGNTEAKDKMEEENDVAKNNMEE

SEQ ID NO: 110376 - protein, 45 aa, Oryza sativa
  Clone ID: PAT_MRT4530_14445C.1.pep
LDSLIPLVRTSSESAVRRPGKAPEGAVPGPSPGRHAEVSCSSTSN

SEQ ID NO: 110377 - protein, 97 aa, Oryza sativa
  unsure (1)..(97): unsure at all Xaa locations
  Clone ID: PAT_MRT4530_14446C.1.pep
NLVIEFXISNKYGSKPQISDYGLSGRRSASSICXEEPIXITLHFFLXSXLPSPSPXLGPRALPRLGDRRAALRRRRXEPPASXMADPVELGAPXSPE

SEQ ID NO: 110378 - protein, 41 aa, Oryza sativa
  unsure (1)..(41): unsure at all Xaa locations
  Clone ID: PAT_MRT4530_14447C.1.pep
MAVSCIILVSDDLXYMLSPSLVNIERIALWNMAIENISVAF

SEQ ID NO: 110379 - protein, 143 aa, Oryza sativa
  Clone ID: PAT_MRT4530_14448C.1.pep
MTPDDMAATCSMKCPIYQKENKGAVTVTSTFRAFRHAEQPALRTLLAPEKRLLVRSGTEGSFTKFINAPYKSECLELYEMMDEYCREPMDLFGTAPALTLPLLELELSQTVSAPPKLGVELDWTEAYNLFKEQGIKDLVVNVK

SEQ ID NO: 110380 - protein, 126 aa, Oryza sativa
  Clone ID: PAT_MRT4530_14449C.1.pep
DRRIVTHSFFLCRIGQLTRITLLLHAAYTVAFEASSITVCLSTAEYRGHRRSCWLRCAHSTRESHRACLFLERLHALSLIDPKGLIIYLRIAHSLMMLELSAGLSLGALAGVYQRADRIDILGRQL

SEQ ID NO: 110381 - protein, 206 aa, Oryza sativa
  Clone ID: PAT_MRT4530_1444C.1.pep
MARRRHAATGGSSRRRGTAAGGRRTAARTGTATHPKRRRISPTTEEGGAPADFRRRGAAAEVLLVPAELREATVRVGVDRSGGATRLESVAATERGGSRGYGATEVERGNGAVAELACPAAKLAVAAERCGGDPSDGKRRPEFAEVWRRAGAAWGERGRECRARETRGKWRGRCGECFYRGGEAGSSTGEAESGRQPPGKWGADAG

SEQ ID NO: 110382 - protein, 90 aa, Oryza sativa
  Clone ID: PAT_MRT4530_14450C.1.pep
LLLWGDGNRIKEPLLCSSQLPSSAGQKHHKIPTLLAKFLSMASSVELDSIRNHLHPPHLAQNPLPSRKSSPRPSPARASPTAEAAGAART

SEQ ID NO: 110383 - protein, 87 aa, Oryza sativa
  unsure (1)..(87): unsure at all Xaa locations
  Clone ID: PAT_MRT4530_14452C.1.pep
XAFXSXPXVXVVDFXXQLSWXXXRXHRXXXFXTYXXXGMXXSCKXXTETXXPPTLRXSCXFKTIYXLMIPQHNXPXXXXHIGSXEYX

SEQ ID NO: 110384 - protein, 796 aa, Oryza sativa
  Clone ID: PAT_MRT4530_14453C.1.pep
MASSASRTLLLLVVVVVVAAAVGGVLGGGGEERTFIVRVDADAKPSAFPTHAHWYEAAVMAAEGGGGGGEWREGGPLIHTYSAAFHGFSARMSPAAAAALAEAPGVAAVVPERVRQLATTRSPRFLGLLSSPPSALLADSDFGSDLVIAIIDTGISPTHRSFHDRGLGPVPSKWRGVCSSGPGFPPNSCNRKLVGARFFSAGYEATSGRMNETAEVRSPLDTDGHGTHTASIAAGRYVFPASTLGYARGVAAGMAPKARLAAYKVCWVGGCFDSDILAAFDAAVADGVDVVSLSVGGVVVPYYLDAIAIGAFGATEAGIVVSASAGNGGPGGLTVTNVAPWMATVGAGSMDRAFPANVQLGNGQVLDGVSVYGGPALQSGKMYELVYAGASSGAASSAADGYSASMCLDGSLDPAAVRGKIVVCDRGVNSRAAKGDVVHRAGGIGMVLANGVFDGEGLVADCHVLPATAVGAAAGDKLRKYIGSSTRQAPATGTILFEGTHLGVHPAPVVAAFSARGPNPQSPEILKPDLIAPGLNILAAWPSGVGPAGIPSDGRRTEFNILSGTSMACPHISGLAALLKAAHPTWSPAAIKSALMTTAYIKDNSNGTMVDESTGVVADVFDFGAGHVDPMRAMDPGLVYDITPVDYVNFLCNLNYTEQNIRAITRRPADCRGARRAGHAGNLNYPSMSATFAADGTRATMKTHFIRTVTNVGGGRAVYRATVRSPEGCAVTVQPRQLAFRRDGQKLSFTVRVEAAAPAKKMEPGSSQVRSGAVTWSDGRHAVNTPVVVTVQAPLQ

SEQ ID NO: 110385 - protein, 112 aa, Oryza sativa
  unsure (1)..(112): unsure at all Xaa locations
  Clone ID: PAT_MRT4530_14454C.1.pep
EWVRTTFCLLGSLGYFWTANKGFIRVSADEVSRCCIGLQGLHPIGFYWIILLLFIIISRLSQVSESXIGYITDSSKPYHYRLDKPDXHACISPTFGPALELSRSPRPLCSST

SEQ ID NO: 110386 - protein, 865 aa, Oryza sativa
  Clone ID: PAT_MRT4530_14455C.1.pep
MEFLDVSLVEVDKWAKAHIDLVVGLQSRFARLELSNGLRLRLLRFSFPSPSSSPLRWVRVGNLVPLNEGNASSSNGSVSSIPIYLGANVVGRNHLVVVDKRVSRKHLSLHASADGSIEAVVEGPNPIIVRSEGQRRKVCAQERVKIAHDDVLELIPGEYFVKYLNVGDNHKSSTSMGSSDFKKGKRLCEDDTVVIKRNRQIMEDEALARSLQKSFAEESSTISGLGCDQMLSSLDSAGFSERNNERIHSVDYLKDVLSLTFRLMRVQGLPSWTNTSSVTIQDVIQGEVLLAVLSNYMVDMEWLLTACPSLRKVRHVLVIHGEDGASVELLKGLWMQDFPWKDAKDVNRSVSFENDLVDYLSAIKREILELLATCCKLIWPEFRVNLPVVGDVNINAAFFRKFDYKSSSVRLIGSVPGYHVGPNIKKWGHMKLRSVLEGCTFEQQFCKAPMIYQFSSLGSLDEKWMSEFAFSLSAGKSDNGSPLGIGKPLIVWPTVEDVRTSIEGYAAGSCIPSPQKNVEKDFLRKYWARWKADHVGRCAPDQTGLGPVRPQRLDHHKGAGQIGFQDLEPEATARIELYGLTAHKASLGVLFLPKTHQSVPQFSCTGKNNSNLFLTQNNLAPGKEIKTKLVTLCWKSDEEKEQSTEIIRLPVPYQLPPKPYGTEDVPWSWDKRYTKKDVYGSVWPRHVQYCFFTLCLTQAIFSLAITNNRGENETPDMKTESNIIETENGAKTNRREYVLGVACHFHQQSFMSDLDIQIPTAFDPFAEANAGDSGAAAGSKDYVHVRIQQRNGRKSLTTVQGLKKEFSYNKILKDLKKEFCCNGTVVQDPELGQVIQLQGDQRKNVSNFLVQAGIVKKEHIKIHGF

SEQ ID NO: 110387 - protein, 101 aa, Oryza sativa
  Clone ID: PAT_MRT4530_14456C.1.pep
LGVLFLPKTHQSVPQFSCTGKNNSNLFLTQNNLAPGKEIKTKLVTLCWKSDEEKEQSTEIIRLPVPYQLPPKPYGTEDVPWSWDKRYTKKDVYGSVWPRHG

SEQ ID NO: 110388 - protein, 160 aa, Oryza sativa
  Clone ID: PAT_MRT4530_14457C.1.pep
MTSSSRVRVGNLVPLNEGNASSSNGSVSSIPIYLGANVVGRNHLVVVDKRVSRKHLSLHASADGSIEAVVEGPNPIIVRSEGQRRKVCAQERVKIAHDDVLELIPGEYFVKYLNVGDNHKSSTSMGSSDFKKGKRLCEDDTVVIKRNRQIMEDEALARSL

SEQ ID NO: 110389 - protein, 61 aa, Oryza sativa
  Clone ID: PAT_MRT4530_14458C.1.pep
AGLGSQLTWGLLMITRADVSESAVPAVTVDVAAACDLITSDGHRYGVVQPQGDLDRGGLHG

SEQ ID NO: 110390 - protein, 260 aa, Oryza sativa
  unsure (1)..(260): unsure at all Xaa locations
  Clone ID: PAT_MRT4530_14459C.1.pep
MEFEGVGSIPRVKTPSLASRQRGGKVNAGGLDWGVQYCFFTLCLTQAIFSLAITNNRGENETPDMKTESNIIETENGAKTNRREYGGIQAKKRESTKDTRLAEAERPPRSISSGRFLGRSLPSSTSSSQVLGVACHFHQQSFMSDLDIQIPTAFDPFAEANAGDSGAAAGSKDYVHVRIQQRNGRKSLTTVQGLRKEFSYNKXILKDLKKEFCCNGTVVQDPELXGQVIQLQGXIRXKNVSNFXVQAGIVKKEHIKIHGF

SEQ ID NO: 110391 - protein, 231 aa, Oryza sativa
  Clone ID: PAT_MRT4530_1445C.1.pep
MAAQWWRSAAGHLRTVAAGRGSLSGFQRSTYHTIQAIPRECSGSKVSARDRTQGRIPCVVFLQNLLEKNPDARSESKKHLLTVEKKQIKAILDSADAPFFCSTRFPLQIRAGSGSSHLLESGTVLPIKIHRDEESGKILNLVFVWAEDGMKLKVDVPVVFEGEDACPGVQKGGILNKIRPSLKFLCPSEHIPSKIVVDASNLDIEDRIFMRDIEVHPSLELLSKNESMPIC

SEQ ID NO: 110392 - protein, 526 aa, Oryza sativa
  Clone ID: PAT_MRT4530_14460C.1.pep
MAIEDKLDLLLRRIEEYELRREEADRRTRADIRSLIDVVEACTPEVGKKAKDLPASIKKEQSKVTPTTCLTKCSSPDIEPKLTLVAMVKCAATAMASMKLVADNGATSTTKIPTTDYSKETHAKCSMLGFDVKWDANKADIAFLTKTVVLETVPASIASLSAFSPRMIADIKHYTLMPTSNKLKFNVGVKSELSFLINLIAATSKEGIYAAGEPEYLLLGLSFVEMERKGNCYLSWSHLLLARVMVVELSSTGQFGSVNFSFKGKHVDKLRLFVMPPWLPLVCLLEVREGKCCTTDSAASIIPWNEQKKMMITETCTCFEQKMQKFWDLTFQGMLLNYYQTRVEKWNMRIICMVISESESCLESNYIGLNVEGDLLYVIADEKGRKRVKEMEEDANSIHDEKYTFGLVPIVVLIKRGCHCLQHIKLLGINVGKRFVTVLLSCITQVYFTWSKQLFKLKLLALFFFNDGSLSNTKYLEEPWDPRGVFHRLLDKPNFKKRGLSGSRVGRTRAGQPIAMRPKQTEGSSI

SEQ ID NO: 110393 - protein, 115 aa, Oryza sativa
  Clone ID: PAT_MRT4530_14461C.1.pep
MSDLDIQIPTAFDPFAEANAGDSGAAAGSKDYVHVRIQQRNGRKSLTTVQGLKKEFSYNKILKDLKKEFCCNGTAVQDPELGQVIQLQGDQRKERIKFLGQAGIVKKEHIKIHGF

SEQ ID NO: 110394 - protein, 1408 aa, Oryza sativa
  unsure (1)..(1408): unsure at all Xaa locations
  Clone ID: PAT_MRT4530_14462C.1.pep
MKDHRKHGYLDENCKFTIDLLDILEEFRPLSQGEQCLRNLVQNKLAQLVQSRLSYWKQRGKVRRIKLGLDNSAFFKAHASKNFRKSRIKSIKHNGTEVADHNGKARLMHSYYQNLLGGESQPVWDVDLSALYLSEECDSNMLATQXAPGPDGFGPSFYISXAWNDIREAILNLASGFSQGAIQLERINRAFIVLIQKPGKENTVDGYRPISLQNCSVKILSKVLAFRLQIALTKMIHMDQTGFLKGRCIFENLIFATELIQACHKRGCQTLIIKLDFAKAFDSVNWESLLKILAVRGFPDNWIGWINKLLTSSKSLVLINGIPGSWINCRRGLRQGDPLSPYLFILVADVLQRLLERNASLRHPIYHDRPYATIQYADDTLIIYRAEEDDVRALKSSILSFSKATGLHINFAXKPLLNKVDGFLAGWEASLXQAERLVSINAVLNSLPVYAMSAFKLPPSVIEEIDKRRRAFLCTGEDVCSRARCLVAWDVVCSPKELGGIGVKNLKVQNEALLLKRLFSLFSSESSWANWIWKEFDGQSLLKSLPLGQHWTSLQKFLPELQKLMTVKIGNGSRTSLWHDCWLGILQLANLFPALYSHTTDCHATVKDVLSRGLMIMFVPRLSEAANAELHSLQAMVADLTLTNDNDVWQNNRSTSLTTKEIYDARFPVQMPSPNWKIIWNCRAPLKGAMAIEDKLDLLLRRMEEYELRREEADRRTRADIRSLIDVVEACTPEVGKEAKDLPASVKKEQSKLVADDGATSTTKIATTDYSKDTHGKCSMLGFDVKWDANKGDIVFLTKSVVLETVPASIASLSAFSPRMITDIKRYTLMPTRYSAKCSGSNNSQVVSYLSFLSTPMLVESAGGHLLVPWQLLLQHFEVDPWPPITSRDQEFIIWESQLMSWLAFNCSCSEVHILPPWPPPTEAKWFQLFVGKQFSLVNPLNIIHVMLGPLVWDPGDGKVHLHKILIWMDDWFPQHYFHWKYILWSNELRLNVGVKSELSFLINLIAATSKEGQLLLKLESLTSCKSDGCGAEQYWAIWFYDHFLQRKTCDKLRLFGMPPWLPLVGLLEAREGKCCTTDSAASIIPWNEQKKMMTTETCTCFEQKMQKFWDLTFQVSLTTLASKESNLVICDPKSLYVWLSSVDLRGMLLNYYQTRVEKWNMRIICMVISESESCLESNYIGLNAERDLLYLIADEKGCKRVKDMEEDANSIRDEKYTFELVSTEVHIKLLGITVGKQFITVPLSRITQEDFAWSKKLLRLKLPALFFFNDVPLSNTKYLEQPWDPGGIKGKRRRLMGGDGNRVAMTNELKRCSTPSEEKEAKRMKKEEAVKKKRMPMERVQHLLSMVPRAPVPLPVIRDDSPELKEIDQALANVVQALNTSSQLIRQMQANTLDQLRTKGYVDSNNL

SEQ ID NO: 110395 - protein, 509 aa, Oryza sativa
  Clone ID: PAT_MRT4530_14463C.1.pep
IIYATLRALKKKKKKIRLVVHTANLIHVDWNNKTQGLWMQDFPWKDAKDVNRSVSFENDLVDYLSAIKREILELLATCCKLTWPEFRVNLPVVGDVNINAAFFRKFDYKSSSVRLIGSVPGYHVGPNIKKWGHMKLRSVLEGCTFEQQFCKAPMIYQFSSLGSLDEKWMSEFAFSLSAGKSDNGSPLGIGKPLIVWPTVEDVRTSIEGYAAGSCIPSPQKNVEKDFLRKYWARWKADHVGRCAPDQTGLGPVRPQRLDHHKGAGQIGFQDLEPEATARIELYGLTAHKASLGVLFLPKTHQSVPQFSCTGKNNSNLFLTQNNLAPGKEIKTKLVTLCWKSDEEKEQSTDTRLAEAERPPPRSISSGRVLGRSLPSSTSSSQVLGVACHFHQQSFMSDLDIQIPTAFDPFAEANAGDSGAAAGSKDYVHVRIQQRNGRKSLTTVQGLKKEFSYNKILKDLKKEFCCNGTVVQDPELGQVIQLQGDQRKNVSNFLVQAGIVKKEHIKIHGF

SEQ ID NO: 110396 - protein, 509 aa, Oryza sativa
  Clone ID: PAT_MRT4530_14464C.1.pep
MANGGCKPREDDGNRRTGLVGELQGVTIEEYELRREEADRRTRADIRSLIDVVEACTPEVGKKAKDLPASIKKEQSKVTPTTCSTKCSSPDIEPNLTVVAVVKCAATAMASMKLVADNGATSTTKIPTTDYSKETHAKCSMLGFDIKWDANKADIVFLTKTVVLETVPASIASLSAFSPRMIADIKHYTLMPTSCCKVHILPPWPPPTEAKWFQLFVGKQFSLCGIQVMERSTFAKYQYGWMIGSHNIIFIGAATSKEGIYAAGEPEYLLLGLSFVEMERKGNCYLSWSHLLLARVMVVELSSTGQFGSVNFSFKGKHVDKLRLFVMPPWLPLVCLLEVREGKCCTTDSAASIIPWNEQKKMMITETCTCFEQKMQKFWDLTFQGMLLNYYQTRVEKWNMRIICMHIKLLGINVGKRFVTVPLSCITQVYFTWSKQLFKLKLLALFFFNDGSLSNTKYLEQPWDSRGVFHRLVDKPNFKKRGLSGSRVGRTQAGQPIAMRPKQTEGSSI

SEQ ID NO: 110397 - protein, 505 aa, Oryza sativa
  Clone ID: PAT_MRT4530_14465C.1.pep
MVQLAPPKIATTDYSKDTHGKCSMLGFDVKWDANKGDIVFLTKSVVLETVPASIASLSAFSPRMITDIKRYTLMPTRYSAKCSGSNNSQVVSYLSFLSTPMLVESAGGHLLVPWQLLLQHFEVDPWPPITSRDQEFIIWESQLMSWLAFNCSCSEVHILPPWPPPTEAKWFQLFVGKQFSLVNPLNIIHVMLGPLVWDPGDGKVHLHKILIWMDDWFPQHYFHWKYILWSNELRLNVGVKSELSFLINLIAATSKEENAEVLGSNFPESESCLESNYIGLNAERDLLYLIADEKGCKRVKDMEEDANSIRDEKYTFELVSTEVHIKLLGITVGKQFITVPLSRITQEDFAWSKKLLRLKLPALFFFNDVPLSNTKYLEQPWDPGGIKGKRRRLMGGDGNRVAMTNELKRCSTPSEEKEAKRMKKEEAVKKKRMPMERVQHLLSMVPRAPVPLPVIRDDSPELKEIDQALANVVQALNTSSQLIRQMQANTLDQLRTKGYVDSNNL

SEQ ID NO: 110398 - protein, 65 aa, Oryza sativa
  Clone ID: PAT_MRT4530_14466C.1.pep
MGCVRRFAAPAEVKLAAGAVGVRRDGGDGPIEEPGALEGAAGADDVLVVLDGAVGVAGEVASDEP

SEQ ID NO: 110399 - protein, 135 aa, Oryza sativa
  Clone ID: PAT_MRT4530_14467C.1.pep
RPPPSFVAPPFWPPGWFFFFTPPVFPPPCFPPPRGGGPHFSFPALFRVPAFLHHIQLQRGGVVFFFQTPGPGPAFWAFTFPPLWGVFPTHPLRPGGLPPVGGAWVPFALCVWAQCFKKVLAPPARPVYLFAWSSF

SEQ ID NO: 110400 - protein, 390 aa, Oryza sativa
  Clone ID: PAT_MRT4530_14468C.1.pep
MAIEDKLDLLLRRIEEYELRREEADRRARADIRSLIDVVEACTPEVGKKAKDLLASIKKEQSKVTPTTCRRQLRKSSHLLLARVMVVELSSTEQFGSENISFKGKHVDKLRLFGMPPWLPLVCFLEAREGKCCTTDSAASIISWNEQKKMMTTETCTCFEQKMQKFWDLTFQVSLTTLASKESNLVICDPKSLSVWLSSVDLRGMLLNYYQTRVEKWNMRIICMVISESESCLESNYIGLNAERDLLYVIADEKGCKRVKEMEEDANSIHDEKYTFELVSAEVHIKLLGIIVGKQFITVPLSGITHEDFAWSKKLSRLKLLALFFFNNVLLSNTKYLEQPWDPGGFNSSAWRQAEFKERGLLDTLLGCTTAGPLRKSRPKQTQEEQYITQ

SEQ ID NO: 110401 - protein, 102 aa, Oryza sativa
  unsure (1)..(102): unsure at all Xaa locations
  Clone ID: PAT_MRT4530_14469C.1.pep
GRRRRRGRRRAPPQQSPARRDPRREHEAQPPRRRRLERRGRSAREACSRGLARXRRPRRRRKWRRRRRGSGRRGRAGRGAPRGRPPRRSRGREQSPSQHQKP

SEQ ID NO: 110402 - protein, 83 aa, Oryza sativa
  Clone ID: PAT_MRT4530_1446C.1.pep
YSNSFTLARGAQLYPQDTIHRHVTTSSCTHDEHVTMSSDCDRPPADPTPSCSPLAENVSQRKAWVRPAKPCTRSPPFSRILVG

SEQ ID NO: 110403 - protein, 99 aa, Oryza sativa
  Clone ID: PAT_MRT4530_14470C.1.pep
MIFSAPPQYEESLPAAGSRGRRVEAIENKEVGRNAAVTAGAAAAVADAEGDRGANEKRLGSSRVTFRQQGWTTMVDDDRRCVEMETGRKQGWSIDMMKN

SEQ ID NO: 110404 - protein, 109 aa, Oryza sativa
  unsure (1)..(109): unsure at all Xaa locations
  Clone ID: PAT_MRT4530_14471C.1.pep
KKKSQHLFLFIRFKTFTKIHTSGTNFTLFSILVHSFTRSKKIRSFLSGTFVHFLDRVHTPTLFFKNPHCXKPNLLYLRGFVSIGTRGGGGLFFGDQICGVSPHFFFYRV

SEQ ID NO: 110405 - protein, 152 aa, Oryza sativa
  Clone ID: PAT_MRT4530_14472C.1.pep
MLEGQSCLISRSLPSSCDQESRLAYMTYHLLEITRSKRVSGTPRIEPDSVAAVAVLTKRPKSARNHECEQLDCQGSNDQGFSDSSTLISSIGRDNSISCLARCSRSDYGSIASVNRNFHSLVRSGELYKERRQLGIAEHWVYFSCNVQEWEA

SEQ ID NO: 110406 - protein, 71 aa, Oryza sativa
  unsure (1)..(71): unsure at all Xaa locations
  Clone ID: PAT_MRT4530_14473C.1.pep
NPSRTQSNPIPSSSNSALXTWPHXAPPXXXPSPPPXTSPXPASPPTRRTPSPSNALPTPGXSXSTTPHPDP

SEQ ID NO: 110407 - protein, 120 aa, Oryza sativa
  unsure (1)..(120): unsure at all Xaa locations
  Clone ID: PAT_MRT4530_14474C.1.pep
MIQPRMADEDAPXFRVGPPAGYATTVFDALVSXDEWSESRGSRRRVTVVXAIQLRDPSRQLRAVGAPMVXLVQSARLLGXAGNSGGRFKVRSLHVGGVQXRCPVGAAPRRRLEDPSLRTR

SEQ ID NO: 110408 - protein, 364 aa, Oryza sativa
  Clone ID: PAT_MRT4530_14475C.1.pep
MATVEMEDFSSAQLWVLTILMLIGGEVFTSMLGIHFMRAEFGTKESVSTRDHSPCIDIESITSTKFGPSTQGTKVTVSFSELRMENGGHVEPKTIKFLGFVVMGYLLITNLGGSLLIYLYLNLVPSAHKILKRKGIGIIVFSVFTAISSVGNCGFTPVNENMIIFQKNSILLLLILPQILAGNTLFAPCLRLMVWSLEKITGKKDCRYILEYPKAIGYKHLMSTRESVYLTLTVVSLIILQTVLFLSLEWSSVALDGMSNYQKIVSALFQSVNARHAGESVTDLSNLSSAILVLYTIMIAYGNVGFSVGYSCKRLLNHDARCKDASYGFAGKWSDNGKAILIIVMLFGRLKTFNMKGGRAWKLR

SEQ ID NO: 110409 - protein, 531 aa, Oryza sativa
  Clone ID: PAT_MRT4530_14476C.1.pep
MNHCLVVSHKKLQTFRTFAASKFSSFTKSAQKSIKYSFQFIYQNNPLFVHVAYFALISFAGYGSLKVLKPRDKSNTLKDLDVLFTSVSASTVSSMATVEMEDFSSAQLWVLTILMLIGGEVFTSMLGIHFMRAEFGTKESVSTRDHSPCIDIESITSTKFGPSTQGTKVTVSFSELRMENGGHVEPKTIKFLGFVVMGYLLITNLGGSLLIYLYLNLVPSAHKILKRKGIGIIVFSVFTAISSVGNCGFTPVNENMIIFQKNSILLLLILPQILAGNTLFAPCLRLMVWSLEKITGKKDCRYILEYPKAIGYKHLMSTRESVYLTLTVVSLIILQTVLFLSLEWSSVALDGMSNYQKIVSALFQSVNARHAGESVTDLSNLSSAILVLYTIMMYLPGYTSFLPRHDGEDSKTEKINKRKGLLENWIFSHMSYLAIFVMLICITERDSMATDPLNFNVFSILFEVVSAYGNVGFSVGYSCKRLLNHDARCKDASYGFAGKWSDNGKAILIIVMLFGRLKTFNMKGGRAWKLR

SEQ ID NO: 110410 - protein, 89 aa, Oryza sativa
  Clone ID: PAT_MRT4530_14477C.1.pep
NKIMYYKLKFETIINIYFCHVLLLDSVAMNGYFFRYLILIKKNSLAKKSHSRRNVFWLAIISSSLHSIANHLTLQNQKEIVHEWKEKKK

SEQ ID NO: 110411 - protein, 116 aa, Oryza sativa
  unsure (1)..(116): unsure at all Xaa locations
  Clone ID: PAT_MRT4530_14478C.1.pep
LKLKLLLPGLQRDLVEVGLAGGVVVAVVGEGELVXAMIDGARRGGGPDGVGDGEAGEVVEAELVAEMPELTLVVPPHLLNHQKDRVCCPRRWEMXDCLEAPEXVKQTPQSQKERGN

SEQ ID NO: 110412 - protein, 115 aa, Oryza sativa
  Clone ID: PAT_MRT4530_14479C.1.pep
MVKRRSTGSMGTKGETLGSTGVRTWTWRYTVAPRGDPARGTWHIIEASWGDLGCTCWPVEWTWCNIVATRGDPGLHKCAYMLVRGGDMAQRCSTGFIGEMEQCRNTERRSLVFAY

SEQ ID NO: 110413 - protein, 405 aa, Oryza sativa
  Clone ID: PAT_MRT4530_1447C.1.pep
MRSMPFQLKNGHHHHGAMEGKPPVTPMQQQQQHAPPPRVSRFRRLLVRVSASERLAGDGKERGEKEAEKVSASAAGGEVEAGSVGLDRMVLSFMEDSAAVERPQRGRCNCFNGSNYEESDDEEGFFLPSDHSSASAPAAAGDALESLKGLVQSASVAERNLLADASRIAERCCKGSKGKAECRRAVADGLRALGYDAAVCRSRWEKTSSYPAGEHEYIDAVVGEEVRLIVEVDFRSEFEVARSTKAYRAALQALPPLFVGTPDRLGQIVAVVAEAARQSLKKKGLHFPPWRKPEYMRAKWLSPHVRSGDKAAAAAKTVTSTTSATATPVSAASFSGAFELLFDRKQSGEIPAAEKITVVVSPSPWRPTEEASKKKPPPSPSPPQLWQQHQQPPKAKVVTGLAAVL

SEQ ID NO: 110414 - protein, 44 aa, Oryza sativa
  Clone ID: PAT_MRT4530_14480C.1.pep
MAAEPKLDVEVKLMEEERVLEPELTFLAQGEWIVTTNFDNPSTK

SEQ ID NO: 110415 - protein, 49 aa, Oryza sativa
  unsure (1)..(49): unsure at all Xaa locations
  Clone ID: PAT_MRT4530_14481C.1.pep
MGSXTAXTXVXALRSSASLKCTXLGQSXTXXXXAPTTRRNXRXXAKXXW

SEQ ID NO: 110416 - protein, 113 aa, Oryza sativa
  Clone ID: PAT_MRT4530_14482C.1.pep
SYRNRRRRGVYGNPSATTPLRKALLGDITTAQLDPPWRRVARADRHNVLRSPHSMLLNNKRQPYDDFRLAGHQNYVESWGTGRAASRIPRVPGGGTHRAVQGAFCNMSRGGRM

SEQ ID NO: 110417 - protein, 84 aa, Oryza sativa
  Clone ID: PAT_MRT4530_14483C.1.pep
KPYLLLLVPCGKMGEEPYAELDFFPLVNKLMFNPTLPILTQKPILNFSFDLERFSEGRKKPSDQMISSVMVHRNGKTPMPSSQF

SEQ ID NO: 110418 - protein, 372 aa, Oryza sativa
  Clone ID: PAT_MRT4530_14484C.1.pep
MVTNVVDLRSDTVTKPSDAMRAAMAAADVDDDVLGADPTAHRFEMEMARITGKEAALFVPSGTMANLISVLVHCDTRGSEVILGDNSHIHIYENGGISTIGGVHPKTVRNNPDGTMDIDKIVVAIRHPDGALYYPTTRLICLENTHANCGGKCLSAEYTDEVGEVAKSHGLKLHIDGARIFNASVALGVPVHRLVKAADSVSVCISKGLGAPVGSVIVGSTAFIEKAKILRKTLGGGMRQVGILCAAAYVAVRDTVGKLADDHRRAKVLADGLKKIKHFRVDTTSVETNMVFFDIVDSRISPDKLCQVLEQRNVLAMPAGSKSMRLVIHYQISDSDVQYALTCVEKAAEEILTGSKKFEHLTNGTTRNSYGH

SEQ ID NO: 110419 - protein, 806 aa, Oryza sativa
  unsure (1)..(806): unsure at all Xaa locations
  Clone ID: PAT_MRT4530_14485C.1.pep
MDNHGGDGGAGGGGGGEGERSVRVNIEAQASDPAGMVVAMATPFEPQLSDDSPPRSSMQSVAEVVDDAAAAEATGGGGDEVVAVAAVGPERRLTMLALRLAILEKAASGLGALGFIWATVVLLGGFAITLGRVDFWSVTVILLVEGARIFSRSHELEWQHQATWSLAAAGRSSFRLVARSFRFVFHLDDGKAAADAGGGGGGAPRMGRRRWRISWSFLSRHVGRVFYWLQLASATACVAVSAVRLAGQDFGEAEDARTNRRSALDIFYGLALAEALLFLMEKAMWEWEVSYGRLLQRVAGECHLAGEPGLVAVRRFFYDAYSRCVDGSIFDGLRMDLVSFAEELLVGGSHDEQRIGVGILVNVAANPRLGEAALRRVGTSAAVVDRLVEMLTWSGGAAEAAARASAALVVSKLASKKRNALRVAGVPGAIESVSSLLYAAGDEECNLLGLLIIKKLARDHDNCSKIGNARGLLDKIIDFSAIGGGAVITPSRAKAVKRSLQVVKMLAETTGSTGKLLRREVAEIVFTVSNIRAVLQHGAGHLELQRLGAEVLTRLAMDADAREKIGGTGGVVSLLLAXAGEALAMLALDSRRNCDRILRAGGGARRXTVARLVDALTDDEAGIGAARILTNLCAYAGGEWFSDLHLVTSGAATALRNVMTTKKSKLLEVSLGLVAQMARFMGPHELSHHLAGAGVAGGEEELVGRLVAVLARYGSPSIRVPRIRRFAVELAVAMMTEGRRRRGAVAVMMAAAGMGPVLRRVAETTSELECFHVFSGSAGLSRHAVSLSALVDTALELMGARGTDDQ

SEQ ID NO: 110420 - protein, 812 aa, Oryza sativa
  Clone ID: PAT_MRT4530_14486C.1.pep
MDNHGGDGGAGGGGGGEGERSVRVNIEAQASDPAGMVVAMATPFEPQLSDDSPPRSSMQSVAEVVDDAAAAEATGGGGDEVVAVAAVGPERRLTMLALRLAILEKAASGLGALGFIWATVVLLGGFAITLGRVDFWSVTVILLVEGARIFSRSHELEWQHQATWSLAAAGRSSFRLVARSFRFVFHLDDGKAAADAGGGGGGAPRMGRRRWRISWSFLSRHVGRVFYWLQLASATACVAVSAVRLAGQDFGEAEDARTNRRSALDIFYGLALAEALLFLMEKAMWEWEVSYGRLLQRVAGECHLAGEPGLVAVRRFFYDAYSRCVDGSIFDGLRMDLVSFAEELLVGGSHDEQRIGVGILVNVAANPRLGEAALRRVGTSAAVVDRLVEMLTWSGGAAEAAARASAALVVSKLASKKRNAHPVAGVPGAIESVSSLLYAAGDEECNLLGLLIIKKLARDHDNCSKIGNARGLLDKIIDFSAIGGRRRDHAVARQGREATTGSTGKLLRREVAEIVFTVSNIRAVLQHGAGHLELQRLGAEVLTRLAMDADAREKIGGTGGVVSLLLAMFLQPSITDEGDAARVEAGEALAMLALDSRRNCDRILRAGGGGGAATVARLVDALTDDEAGIGAARILTNLCAYAGGEWFSDLHLVTSGAATALRNVMTTKKSKLLEVSLGLVAQMARFMGPHELSHHLAGAGVAGGEEELVGRLVAVLARYGSPSIRVPRIRRFAVELAVAMMTEGRRRRGAVAVMMAAAGMGPVLRRVAETTSELECFHVFSGSAGLSRHAVSLSALVDTALELMGARGTDDQ

SEQ ID NO: 110421 - protein, 66 aa, Oryza sativa
  Clone ID: PAT_MRT4530_14487C.1.pep
RVFPFRGNPERVGYKANCVVNLNPNAYYSQLPWLRIWLCNGPAQSPFPSKKRWKWRVICAAWIALL

SEQ ID NO: 110422 - protein, 147 aa, Oryza sativa
  Clone ID: PAT_MRT4530_14489C.1.pep
MSTRPSKTAMYIGEVPVPSIDQSDEKPLTLPALAGSTVQRRVTLVVLCCQETWGLPVDDACIPQVAGAITTGGYNMEFCVALNGPPLRPSGDGDRVAGTADLGLVDQTGQWLPSNRQHTGGQTGDDYRRTGDLQAVGPTVSTRLDRQ

SEQ ID NO: 110423 - protein, 413 aa, Oryza sativa
  Clone ID: PAT_MRT4530_1448C.1.pep
MALHVLASMGDLWRRYAPHNLMILSQLCYTLMYFITEAAFNKGLNPFIYVTYRHLVVAVFLAPFAYYQEKKLRPRMTLMLFLEIFVLSLLGVSLTLNMYFASLMYTSPTFVTSVVNTVASITFVIAIVVRCPTFSRISRRTHAESDRLYCSLSAWLTLARDQINLDAVRMEIVDVRSIRGLAKVAGTVVSFAGVTTMTLYKGTAISSPWKAPISIHGGGGGGGVHESWLKGSFLAVASCICWSIWYILQASSLKRYPAQLSLTAWMCTVGGIQSAVFTAFMQHKPEDWRIGFGLKFWCIVYSGFACNGFTVFAQLWCTEKKGPVFVTMFNPLSTIMVAILAYFMFGENLYVGSIIGGVVVILGLYMLLWGKDKDQEYNANKQQESDLDCEKQARITEFSAAQNDQEEPRRTKK

SEQ ID NO: 110424 - protein, 79 aa, Oryza sativa
  Clone ID: PAT_MRT4530_14491C.1.pep
PVGDLERRWGDEDINTIDTSTSLQVRLDGPITRARARQLNYQDECPRGRVDTHHKFAATIRDGISVAKAQRLWTVVVVP

SEQ ID NO: 110425 - protein, 187 aa, Oryza sativa
  Clone ID: PAT_MRT4530_14492C.1.pep
MLETASIHILHWKNQIPSLCNTFLGAGPSWMIHVFDCLSVAPIQQLVPPRPCEARLSRAQARPKSARPASTPPPVRSLARPAFAARGGGTSAPSPAASFTPPPLPISYLIQCPSICARSDGAVGIFCPYPPGQLKQHMPPTGLGFPLRTCMGDEMGDNFISLEEQEEYRTMTAMRFKTEKQGFLFYN

SEQ ID NO: 110426 - protein, 257 aa, Oryza sativa
  Clone ID: PAT_MRT4530_14493C.1.pep
LEVATAPTRASHPPPRSTRPPPSPASHCRSSAAPSSAFSVLLTQRTVPPRGTKLSSHSLVSGTNAEVGARSTAARARSSRMTSLARRIARSQQRPVPFSPSPLAEAPAVAGSPSLATTTIRDNSRAFLPFPNPPCSFTQTMSRRPNVAISHALVLPSEAAMPPVTVVMATTTTATPLAAASDPHPPTSPAPPQAIAEDPAAAGSPSIMTTTIRDNSRAITWCTTPPGDFTQVLQDVAGDPTLPRTKSVRCAACGHGE

SEQ ID NO: 110427 - protein, 35 aa, Oryza sativa
  Clone ID: PAT_MRT4530_14494C.1.pep
ATDGVRTRGDGANSSPATVGGDSQVPAMVLGAWNL

SEQ ID NO: 110428 - protein, 276 aa, Oryza sativa
  Clone ID: PAT_MRT4530_14495C.1.pep
MGRAPCCEKEGLRRGAWSPEEDDRLVAYIRRHGHPNWRALPKQAGLLRCGKSCRLRWINYLRPDIKRGNFTADEEDLIVRLHNSLGNRWSAIAAQMPGRTDNEIKNVWHTHLKKRLDDERKLAAAGGGGGRRPHTRKQPKAAKSAAAVKREATPSVSVDTSSGVTCSTVTESSPSSADGDHRRQQQQTQHAAVKEESFSSGGELPAAAAAPTAAADMDESFWSSTEVTGMMAGLGDMDEELAIAGTSSAAAARSDDMEFWLKMLLESGDMRDLAVL

SEQ ID NO: 110429 - protein, 62 aa, Oryza sativa
  Clone ID: PAT_MRT4530_14496C.1.pep
SFKFSKNGHKIAQDNVFHLSDHPFLYSFTKNYISQTANDHFKRTISKNGLHTIRLFEVHGKP

SEQ ID NO: 110430 - protein, 124 aa, Oryza sativa
  Clone ID: PAT_MRT4530_14497C.1.pep
QHWRWRGNVRRFRDSAGGDWKAAATPQVIAGDPFGIKPAFLVLLSWAARGRGSPPWPWLRAEENWDSGRRHGIRPCGISPPHGAPPAAALFTARRRHAAPPPLPLRPTAAAFPARSATSRACRR

SEQ ID NO: 110431 - protein, 631 aa, Oryza sativa
  Clone ID: PAT_MRT4530_14498C.1.pep
MAGLIPPFSGFFHEVLDFYEIHALHLAPNAMMILVIFAHLCEMFIGPRAGVMGQYIETHLRKKWDDWKRDWFYTALHDHLRLRLPTGPPERSAGWLAVSELGEEYDTVLDRLRGLRSKGLTATMVFGDYFRHRIAPLQEWSRGAWAYTGYNDPMRTHVGQCLDWGKEDARAVVRRVLSLDTVEPMLIPDGILPLCSDRDRESILAVMMAVGTAGGRSRRGAAGGGGGGDDAGSSNVAAGGGRAGGSGGGGSRAPGPSHGAGRGPAANPKGKRKVSGFEPPSHPHGGGAERTVDRPPTSHKRPAAAEPERKNKRLRKMGQTEPCRGSFIEPRSRPSNAPPPRPQRNPLPRGLDSESPRGSKPERSGWPEAGQTGTADTTRPSSRARGPHTRSDSESTMAETVPVLAAADSTVREGLNVQVQALADERVALEAEWAQVAADRSRVEEGRCTVDALVEPGRKMHQAQLAEIQAREETLDSIMRETEVEWQAALVASSILDEALGDIRLQYEAHAEDLVQRAEAARGVLNTVAAQEWPASEESEAAIRWWVEVLDRTHREQEELDWAQSTLRLREEAAAEHARTTTTAEAAVARRAEELRLREEAWRERDAALAEREAEITRCEVAARRLGDHPT

SEQ ID NO: 110432 - protein, 197 aa, Oryza sativa
  Clone ID: PAT_MRT4530_14499C.1.pep
MWVKQQKPFQLLNKGGSEWWTSKCNFSSVFLGGDRAGANIAYNVATRLCACDGAALRPLNLKGLILIQPFFGGEVRTGSEKCMAQSPGSALNLAASDTYWRLALPCGANRDHPWCNPLVKVKLEELKLMRTLVCISEMDILKDRNLEFCDALVRAGKRVEYGVFRGVGHAFQILSKSQVSKSRAKEMMARVKSFMAL

SEQ ID NO: 110433 - protein, 139 aa, Oryza sativa
  Clone ID: PAT_MRT4530_1449C.1.pep
MNQVIALDDDPLDEARQCESQAPDHRTALHHTNRPVLRGLGEGEAPPQSKPRMMPPMLARRDPSWNTEPSKFSLHHPGVGRAHLTISQASWNDDGEDGRAAWSSGELRWAGLGRGDAESDSDLKKAARYDIVWLNPVPL

SEQ ID NO: 110434 - protein, 121 aa, Oryza sativa
  Clone ID: PAT_MRT4530_144C.1.pep
MGGSGRFGRMQPPERSGEQGRATCGSRHPSHHEASSVTRQGDDRGGELGSDGKGEPATREEASSAAREEASSAASGERGRVAAAGERGLALLLFEPASSSSRGARRITRGRGSLHASPTFS

SEQ ID NO: 110435 - protein, 283 aa, Oryza sativa
  unsure (1)..(283): unsure at all Xaa locations
  Clone ID: PAT_MRT4530_14500C.1.pep
MDPFHHLNSSFSNPYHPLLASPPHHFAPDPLPPPPPPPPPPLLPADPPSLERERLPQWSHAETAAFLAIRADLDHSFLSTKRNKXLWEAASARLHXSDFARTPDQCKSKXKNTRLRGXRALERKKVKGKDPDDDHDGGGDGDEDDEEEADQQVDEEDDGASGDTTRAGSKKRRRKAAAAARRTGSTGGVEGEVEAMLREFMRRQIEMEERWMEAAEAREAERRAREEEWRTAMVALGEERLALVRRWREREDAWRARAEEREERRHQLVAALLAKLGAGDASA

SEQ ID NO: 110436 - protein, 67 aa, Oryza sativa
  Clone ID: PAT_MRT4530_14501C.1.pep
ARKPERRAPKEEWRTAMVALGEERLALVRRWREREDAWRARAEEREERRHQLVAALLAKLGAGDASA

SEQ ID NO: 110437 - protein, 202 aa, Oryza sativa
  Clone ID: PAT_MRT4530_14502C.1.pep
MDPFHHLNSSFSNPYHPLLASPPHHFAPDPLPPPPPPPPPPLLPADPPSLERERLPQWSHAETAAFLAIRADLDHSFLSTKRNKALWEAASARLHALGFARTPDQCKSKWKNLVTRFKGTEGAAAVAAAGTDQMQGGQGGGAAARGASSSFPFHDELRRIFDARVERARALERKKVKGKDPDDDHDGGGDGDEDDEEEADHH

SEQ ID NO: 110438 - protein, 85 aa, Oryza sativa
  Clone ID: PAT_MRT4530_14503C.1.pep
MRLAKKLKNCECFFRENVRWISLPLSPTAQGGLDPRPDRGRPAQSLVGPRHTVPYKEGWRTGRDNVTRNEGRPDFLFLNNDWSQP

SEQ ID NO: 110439 - protein, 52 aa, Oryza sativa
  Clone ID: PAT_MRT4530_14504C.1.pep
FLNTITCIDFVAIRTSAPLIRREEGTWAPNTRASTEESPERARDGADSTDPR

SEQ ID NO: 110440 - protein, 1179 aa, Oryza sativa
  Clone ID: PAT_MRT4530_14505C.1.pep
MSDLGGKDGEIGNEDGASSKGTPSPKGATTPFDYSKLTIPSHNFVSVPSGRAPQFDGTHYAAWKHKIKLYLISLHPSIWKVVCTGIDVTHEDMELTLEQEQLIHRNAQASNAILSALSPEEFNKVDRLEEAKEIWDTLQLAHEGFPAVREAKIELLEGRLGRFVMDDKETPQEMYDKMMILVNKIKGLGSEDMTNHFVVKRLLRAFGPRNPTLVSMIRERKDFKRLTPSDILGRIVSHEMQVEEARESGYGKGRKDDGKGKRQSKRACFNCGEYGHFIADCPKSNEAKAKRGKKKPERAHVAEAHMAEVWYSEDEEASEAKPKPKPKDKVEGEGGVATVAFKSSSSSKERLFNNLSDDNDDSYQYSCFMAQGRKAYSSGGSSWVVDSGCTNHMTGERSMFTSLDEENKTHENIVFGDDGKGKLGYNCLFTDEDVTVFRRDDSSVAFKGKLEGDLYLVNFDVDRVNPEACLIAKSSMGWLWHRRLAHVGMRNLAILLKGEHILGLTNVTFEKDRVCSAFQAGKQVGNLHPIKNIMTTTRPLELLHMDLFGPVAYISIGGEAQDVFKRFAKQAQNLYDLTIKRVRSDNGREFKNTQVEEFLDEEGIKHEFSAPYDPPQNGIVERKNQTLIEAARAMLDEYKTSDIFWAEAVSTACHAINRLYLHKILKKTSYELLSGKKPNVSYFRIFGSKCFILSKRPRSSKFSPKVDEGFLLGYESNAHAYCVFNKTSGIVEVTRDVTFDESNGSQGEQVVVHVVGDVDPSQAICTKAIGDIRPVETVEDALGDPDWVMAMQEELNNFTRNQVWTLVERPDQNVIGIKWIFRNKQDEHGVVVRNKARLVAQGFTQVEGLDFGETFAPVARLESIQILLAYAAHHDFRLFQIDVKSAFLNGPISELVYVEQPPGFEDPKLPNHVYKLHKALYGLKQAPRACSIMTKRFEMSMMGELTFFLGLQVKQAQEGTFISQTKYVKDILKKFMMEDAKPIKTPMPTNSHLDLDDNGKCVDQKVYRSMIGSLLYLCASRPDIMLSICMCACFQAEPKECHLIAIKRILRYVVHTPNLGLWYPKGCDFELLGYSDSDYAGCKVDRKSTTGTCQFLGRSLVSWFSKKQNSIALSTAEAEYVATGSCCAQLLWMKQTLKDFGYNFTKIPLLCDNESAIKIANNPVQYSRTKHIDIRHHFS

SEQ ID NO: 110441 - protein, 49 aa, Oryza sativa
  Clone ID: PAT_MRT4530_14506C.1.pep
MARVSLQMTSADAATNERPLFVPLCTRSPADHGSRGLSGYWQCAKRPSR

SEQ ID NO: 110442 - protein, 46 aa, Oryza sativa
  Clone ID: PAT_MRT4530_14507C.1.pep
PTRAAIQNTLPAIKIWPSITRISTPLLRCMVRLIQNYKVESRRILV

SEQ ID NO: 110443 - protein, 1631 aa, Oryza sativa
  Clone ID: PAT_MRT4530_14508C.1.pep
MSDLGGKNGENGNEDGTSSKETPSPKGATIPFDYSKLTIPPHNFVSVPSRRAPQFDGTHYAAWKHKMKLHLIFLHPSIWKVVCIASNPILSALSPEEFNKVDGLEEAKEIWDTLQLAHEGSPAVREAKIELLEERLGRFVMDDKETPQEMYDRMMILVNKIKGLGSEDMTNHFVVKRLLHAFGPRNPTLVSMIWERKDFKRLTPSDILGRIVSHEMQEEEAREVRQMVKNATMIKNQEVALKAKQEEESSCEESEDEEMTFIVKRFKHFLRKSGYGKGRKDDDKGKRQSKRACFNCGEYGHFIADCLKSNEAKAKGGKKKPERAHVAEAHMAEVWYSGDEEDLEVKPKPKPKDKVEGEGGVATVAFKSSSSSKERLFNNLSDDDDDSYHYSCFMAQGHKVMTQKPSHTSLDVDSSDEESDNELDDVLKSFSKPAMQHLAKLMRALDSKEQSLERQEELLILEKERNLALVESLAKECAKNEQLANELNLANGSLASLRDVNETLQEKFASLDKSHKDLEVQFDTLWNSTSQPNVVSNSSNPSTSNGCARYYNIDLNSHATNVDAMQALKKENERLGTLVKYGCMKTYHSKDALYKTITAHPNKDGHGLRKFRASDRPKGLAGSSGYNARKFWPEGLYYDSYAYSSDGSSWVVDSGCTNHMTGERSMFTSLDEEGGSRENIVFGDDGKGKRVRSNNGGEFKNTQVEEFLDEEGIKHEFSAPYDPPQNGIVERKNRTLIEVARAMLDEYKTSDVFWAEAVSTACLAINRLYLHKILKKTSYELLSGKKPNVSYFHVFGSKCFILSKRSRSSKFSPKVDEGFLLGYESNAHAYRVFYKTSGIVEVTRDVTFDESNGSQGEQVVVHVVGDVDPNQAIGTNAIGDIRPVETQDDQEDRDQPPSSTSNSPTSAVSAEPEVPGPIDRNLRTSPDPEVPGSTVRNLRISGSEDVPTAQVDGIDAEGTLEHSDQAQVPPVHHPRIHHTVQRDHPVDNILGFEDPKLPNHVYKLHKALYGLKQAPRAWFEMSMMGELTFFLGLQVKQALEGTFISQTKYVKDILKKFGMEDAKPIKTPMPTNGYLDLDDNGRKFRCSWPGTSVVIMPREKRQKLSQDVPADSSPPVRGPRGRLGKEKVGVFYSGSQIPIHSRRAGSIVIRDAPRSPSPAASESDDGGNEDEPGSKSNPLRLYKTRAVDPDPKRTRVNYLKNLLQCGKDRMVSPDTLPADSQDDRFRTLVQVDWYNSMIMGRSHLVVEMKWLDWQYMSSKNNIVFNEVRKVCERKHVVDLLALQYSWNEEVIGQFYFTAFFGITKKGLDFVKWTIQGQQYRVSMAQFAAALGLDDDDLSRPHIFVEDALSPTSTTFMYEKDAPKDCLGTIRGLRPYYRVLYSIFRWSLLPKVGDATALPGRHALLLSRMRYNKPDFSIMKLIWSEIYKTMCEPKRGCIYAPYIMKMIEAKTGICYFKDNQHKLFRPHAPTTSATPTTRVTRASTSAAPSSSAAPQRSESSSPIKKALRAIFCMCAKTAKKVKKIERRQKEDWIAAGKDVSDISDDEEFVDPFAAYETARDIASGEGPSGTSRFFNEESSHSEESSDDEESNAPTENVLTDPDEAVDAAGQDIDSPHSGDTEIIPSDGDDDEA

SEQ ID NO: 110444 - protein, 1181 aa, Oryza sativa
  Clone ID: PAT_MRT4530_14509C.1.pep
MSDLVEKNGENGNQDGASSKGTSPPKGATIPFDYNKLTIPSHNFVSVPSGRAPRFDGTHYAAWKHKMKLHLISLHPSIWKVVCTGIDVPHDDMELTSEQEQLIHRNAQASNAILSALSPEEFNKVDGLEEAKEIWDTLQLAHEGSPAVREAKIELLEGRVGRFVMDDKETPQEMYDRMMILVNKIKGLGSEDMTNHFVVKRLLRAFGPRNPSLVSMIRERKDFKRLTPSDILGRIVSHEMQEEEARQVSQIVKNVAMIKNQEVALKAKQEEESSCEESEDEEMAFIVKRFKHFLRKRGYGKGRKDDDKGKRQSKRACFNCGEYGHFINDCPNDEESDNELDDVLKSFSKPAMQHLAKLMRALDSKEQSLERQEELFILEKKRNIALEESLAKECAKNEQLANELNLANGSLASLRDVNETLQEKFANLDKTLKKENERLGTLVKYGCMKTYHSKDAIYKTITAHPNKDGHGLGFSSGSPVSKRVMTYSSGGSSWVVDSGCTNHMTGERSMFTSLDEEGGSRENIVFGDDGKGKVMGLGKIAISKNQSLSNVLLVNSLSYNLLSVFQLYKLGFNCLFTDVDVTVFRRDDSSVAFKGVLKGDLYLVDFDIDRVNPEACLIAKSSMGWLWHRRLAHVGMRNLASLLKGEHILGLSNVSFEKDRVCSACQAGKQVGSPHPIKNIMTTTRPLELLHMDLFGPVAYISIGGNKYGFIIVDDFSRFTWVYFLHDKSEAQDVFKRFAKQAQNLYDLTIKRVRSDNGGEFKNTQVEEFLDEEGIKHEFSAPYDPPQNGIVERKNRTLIEAARAMIDEYKISDFSPKVDEGFLLGYESNAHAYRVFNKTSGIVEVTRDVTFDESNGFQGEQVVVHVVGDVDPSQAIGPEVPGSTVRNLRTSGSEDVPTVQVDGIDAASTLEHTDQAQRPKQNVIGTKWIFRNKQDEHGVIVRNKARLFQMDVKSAFLNGPISELVYVEQPPGFEDPKLPNHVYKLHKALYGLKQAPRACSIMTKRFEMSMMGELTFFLGLQVKQALEGTFISQTKYVKDILKKFGMEDAKPIKTPMPTNGHLDLDHNGKCVDQKVYRSMRGSLLYLCASRPDIMLSVCMCACFQAEPKECHLIAVKRILRYLVHTPNLCLWYPKGCGFELLGYSDSDYAKCKVDRKSTTGTCQFLGRSLVFWSSKKQNSFG

SEQ ID NO: 110445 - protein, 148 aa, Oryza sativa
  Clone ID: PAT_MRT4530_1450C.1.pep
MASKRAMNSALFFASVILVLASAVNGGLVLHGHSPCLATAPTPTETPAPAPALVVPPTPAPTPVPTPSPAPPPKCPLPLADLGVCLNVALGNQLLNQQCCSQLSSLPSDTAAFCLCEAIKVKALVILKVNVPNILKACGKVSAVTCVN

SEQ ID NO: 110446 - protein, 1248 aa, Oryza sativa
  Clone ID: PAT_MRT4530_14510C.1.pep
MELTSEQEQLIHRNAQASNAILSALSPEEFNKVDGLEEAKEIWDTLQLAHEGSPAVREAKIELLEGRLGRFVMDDKETPQEMYDRMMILVNKIKGLGSEDMTNHFVVKRLLRAFGPRNPTLVSMIRERKDFKRLTPNDILGRIVSHEMQEEEAREVRQMVKNAPMIKNQEVALKANQEEESSCEESEDEEMAFIVKRFKHFLRKSGYGKGRKDDDKGKRQSKRACFNCGEYGHFIADCPRSNEAKAKGGKKKPKRAHVAEAHMAEVWYSGDEKYPEVKPKPKSKDKVEGKGGVATIAFKSSSSSKERLFNNLSDDDDDSYHYSCFMAQGRKVMTQKPSHTSLDVDSSDEESDNELDDVLKSLSKPTMQHLAKLMRALDSKEQSLERQEELLILEKKRNLDLEESLAKECAKNEQLANDLNLANGSLASLRDVNETLQEKFACLDKSHKDLEVQFDTLWNSTSQPNVVSNSSNPSTSNGCVRCYNIYLNSYATNIDAMQALKKENERLGTLVKYGCMKTYHSKDALYKTITAHPNKDGHGLGFSGGSPVSKRVMAYSSGGSCWVVDNGCTNHMTGERSMFTSLDKENGTRENIVFGDDGKGKLGYNCLFTDEDVTVFRRDDSSVAFKGKLKGDLYLVDFDVDRVNPEACLIAKSSMGWLWHRRLAHVGMRNLATLLKGEHILGLTNVTFEKDRVCSACQAGKQVGNPHSIKNIMTTTCPFELLHMDLFRPVAYISIGDNKYGFVIVDDFSRFTWVYVLHDKSEAQDVFKRFAKQAQNLYDLTIKRVRSDNGGEFKNTQVEEFLDEQAQEGTFISQTKYVKDILKKFGMEDAKPIKTPMPTNGHLDLDDNGKCVDQKVGNAFVHQYYNILHQSPDLVHRFYQDGSRIGRPASPAAAEMDTVTTMEAINAKIVSMDIVRAEIKAVDAQESLGGGVTVLVTGHLTGSDDVRREFSQSFFLAPQEKGYFVLNDILRYVGGEGDQEVEPEPELELSFPPSQQPDSVPAPSANGTSVPREQEAFSQPEQHVADPAPNAQEADLNGEEVYNPPNNTEGPVVEETPIPEVIDEVPNNVAVAMPTPPAPAPAPVPQEEAPKKSPAPPKQEKQVAPAPVAPVADAPTFSPNPESSNIQEAEEFEDPSSVQSAIAGSPVTISDRQCYVEEKRTAGSRGGGRGRFAPGRGGNFRGEGMRGRGNYTGGRGYGRGEFNYRSDYGGRGAGRGGSSRGGDVGYQRVDHSAGRAARAPSGTSAVAK

SEQ ID NO: 110447 - protein, 114 aa, Oryza sativa
  unsure (1)..(114): unsure at all Xaa locations
  Clone ID: PAT_MRT4530_14511C.1.pep
QPQLRRPRRLRRVQVHDAGDHRVGRLTAASEAAVLLPLPVCHVYMRGWGXSLLGXFFLIVLWGPPVLDLVCLXXALRFFCXPLEMRHFXKXWLAKISLVFTPFLKHCFCFFFLS

SEQ ID NO: 110448 - protein, 688 aa, Oryza sativa
  Clone ID: PAT_MRT4530_14512C.1.pep
MSHLEGTGGLDDKGDASSTKDTGPKGATIHFDYGKLNVPPHNFVSVPSGRVPQFDGTHYAAWKHKMKLHLISLHPSIWKVVCTEEFNKVDGLEEAKEIWERRPRRYGILCNWLMRDHPPFRLLRAFGPRNPTLVLMIRERKDFKRLTPSDILGRIVCHEMQEEEAREVRQMVKNATMIKNQEVVLKAKQEEESSYEESEDEEMAFIVKRFKHFLRKSGYGKGRKEDDKGKRQSKRACFNCGKYGHFIADCPKSNEAKVKGGKKKPERAHVAEAHMAEESLAKECAKNEQLANELNLANGSLASLRDVNETLQDKFANLDKSHKDLEVQFDTLSNSTYQPNVVSNPSNPSTSNGCARCYNIDLNSYDTNVDAMQALKKENERLGTLMKYGCMKTYHSKDALYKTITAHPNKDGHGLRFSGGSPVSKRVMVNGKECLMFVREGKAPQASEVTCPFTGQTPGSSGQNDRKFLPCKTGSFKHFVRKFRASDRQKGLTGSSGYNTRKFRPEDLYYDSYVISKNSEGKMVAYFNGNYNDEYRTCVGVPKALAYSSGGSSWVVDSGCTNYMMGERSMFTSLDEEGGSRENIVFGDNGKGKVMGLGFNCLFTDVDMTVFKRDDSSIALKGVLKGDLYLVDFDVDRVNPEACLIAKSSMRWLWHRRLAHVGMRNLASLLKGEHIIGLSNVSFEKDRV

SEQ ID NO: 110449 - protein, 2336 aa, Oryza sativa
  unsure (1)..(2336): unsure at all Xaa locations
  Clone ID: PAT_MRT4530_14513C.1.pep
MSDLGGKDGEIRNEDGASSKGTPSPKGATIPFDYSKLTIPSHNFVSMPSGRAPQFDGTHYAAWKHKMKLHLISLHPSIWKVVCTGIDVPHEDMELTSEQEQLIHCNAQASNAILSALSPEEFNKVDGLEEAKEIWDTLQLAHEGSPAVREAKIELLEGRLGRFVMDDKETPQEMYDRMMILVNKIKGLGRRFVMDDKETPQEMYDRMMILVNKIKGLGSEDMTNHFVVKRLLRAFGPRNPTLVSMIRERKDFKRLTPSDILGRIVSHEMQEEEAREVRQMVKNAAMIKNQEVALKAKQEEESSGEESEDEEMAFIVKRFKHFLRKSGYGKGRKDDDKGKRQSKRACFNCGEFGHFIADCPKSNEAKAKGGKKKPERAHVAEAHMAEVWYSGDEEDPEVKPKPKSKDKVEGEGGVATVAFKSSSSSKEHLFNNLSDDDDDDSYHYSCFMAQGRKVMTQKPSHTSLDVESSDEESDNELDDVLKSFSKPAMQHLAKLMRALDSKEQLLERQEELLILEKKRNLALEESLAKECAKNEQLANELNFANGSLASLRDANETLQEKFACLDKSHKDLEVQFDTLWNSTSQPNVVSNSSNPSTSNGCARCYNIDLNSYATNIDAMQALKKENERLDTLVKYGCMKTYHSKDALYKTITAHPNKDGHGLRFSGGSPVSKRVMVNGKECLMFVREGKAPQASEVTNLVSSQGLGTSGQTGQNLWVGVSVSQKFPPGSSGQFAGKFRANGRAQDMTGSSRHNARRFRPDGLYYDSYVISKNSEGKVVVYFNGNYNDEYRTCVWVPKALTYSSGGLSWVVDSGCTNHMTGERSMFTSLDEENGTRENIVFGDDGKGKVMGLGKIAISNNQSLSNVLLVNSLSYNLLSVSQLCKLGYNCLFTDEDVTVFRRDDSSVAFKGKLKGDLYLVDFNVDRVNPEACLIAKSSMGWLWHRRLAHVGMRNLATLLKGEHILGLTNVTFEKDRVCSACQAGKQVGNPHPIKNIMTTTRPLELLHMDLFGPVAYISIGGNKYGFVIVDDFSRFTWVYFLHNKSEAQDVFKRFAKQAQNLYDLTIKRVRSDNGGEFRNTQVEEFLDEVGIKHEFSTPYDPPQNGIVERKNRTLIEAARSMLDEYKTSDIFWAEAVSTACHAINRLYLHKILKKTSYELLSGKKPNVSYFRVFGSKCFILSKRPRSSKFSPKVDEGFLLGYESNAHAYRVFNKTSGSVEVTRDVTFDESNGSQGEQVVVHVVGDMDPSQAIGTKAIGDIRPVETQDDQEDRDQPSSSTSNSPTLSQVSVDPKVPGPDGRNLQTSPGQEVPGPSAKKFRAEDSQGVPTAQVDGIDAEGTVEHPDQAQVPSVHHPRIHHXQRDHPVDNILGXEDALGDPDWVMAMQEELNNFTRNQVWMLVERPNQNVIGTKWIFRNKQDEHGVVLRNKARLRKGSPKLFQMDVKSAFLNGPISELVFVEQPPGIEDPKLPNHVYKLHKALYGLKQAPRAWYECLRDFLLKNGFEIGKADTTLFTKKFKSDLFICQIYVDDIIFGSTNASFCEEFSSIMTKRFEMSMMGELTFFLGLQVKQAQEGTFISQTKYVKDILKKFGMEDAKPIKTPMPTNGHLDLDDNGKCVDQKVYRFMIGSLLYLCASRPDIMLSVCMCARFQAEPKECHLIAVKRILRYLVHTPNLGLWYPKGCDFELLGYSDSDYAGCKVDRKSTTGTCQFLGRSLVSWSSKKQNSIALSTAEAEYVAAGSCCAQLLWMKQTLKDFGYNFTKIPLLCDNESAIKIANNPVQHSRTKHIDIRHHFLRDHETKGDICLTHVRTKTQLADIFTKPLDEKRFCELRISTMTREKRQKASQDVSGDESPPIRFPRGRLGKEKVVEGGSGSGTRTSPRFTRQSSNRPVQIRDVDSGQGSDAPSSRGRGRGGGRTSGAGRASHDFPVGFRENPVRLYKTIGFDTTPIHHIGRPKSNYLHQLAKCRRDRLIDPETQPEESQDPRFRTLTQLDWYNSMIMARDNPVVEMKWIDWTYMRKKNNEVFNQAMQVCHNKNLGDILALEYDWTEEVIAQFYATAFFGTTRKGTPYVKWMTAGVRHKISIAQFAEILGLEDEDLNRPNIHSEAPLPMIKTKFMYTKDAPRTCMGTTHGLHPNYKVGDATALPSKHAHLLSRMRYNQPLFSVMKLIWYEIANTILEPKRGCIYAPFIMKMIETVTGVFYIKDGRHNPFRPCVPPSSSPVAPRSIPSTSAGPSSSAPPQSSSSSPIKKALQAIFCMCAKTAKNAYEAARNVAGEGSSTYFNEESSQLDDDDDDDEDDTDAAAEDAPTDVDTAAQSDESHLSGDTEIVPSDGDGDGDE

SEQ ID NO: 110450 - protein, 1463 aa, Oryza sativa
  unsure (1)..(1463): unsure at all Xaa locations
  Clone ID: PAT_MRT4530_14514C.1.pep
MSDLGEKNGENGNEDGASSKGTPSPKGAIIPFDYSKLTIPPHNFVSMPSGHASQFDGTHYAAWKHKMKLHLISLHPSIWKVVCTGVDVPHDDMELTSQQEQLIHHNAQASXNAILPALSPEEFNKLRLSEARRSRSVLMWRRHTWRRCGTPXDEEDLEVKPKPKPKDKVEGEGGVATVAFKSSSSSKERLFNNLSDDDDNSYHYSCFMAQGRKVMTQKPSHTSFDVDSSDEESDNELDDVFKSFSKPSMQYLAKLMRALDSKEQSLERQKESLILEKKRNLALEESLAKECAKNEQLANELNLANGSLASLRDVNETLQEKFANLDKSHKDLEAQFDTLWNSTSQPNVVSNSSNPSTSNGCARCYNVDLNSYATNVDAMQALKKENKRLGTLVKYGCMKTYHSKDALYKTITTHPNKDGHGLGFSGGSPVSKRVMVNEKECLMFVREGKAPQASEVTCPFIGQTPRSSGKNDRKFLPCKTGSSGHFVRKFWASDRLKGLTGSSGYNTRKFRPEGLYYDSYVISKNSEGKVVAYFNGNYNDEYRTCVWVPKALAYSSDGSSWLVDSGCTNHMTGERSMFTSLDEEGGSCENIMFGDDGKGKVMGLGKIAISKNQSLSNVLLVNSLSYNLLSVSQLCKLGFNCLFTDVDVTVFRRDDSSIAFKGVLKGDLYLVDFDVDRVNPEACLIAKSSMGWLWHHRLAHVGMRNLASLLKGEYILGLSNVSFEKDRVCSACQAGKQVGSTHPIKNIMTTTRPLELLHMDLFGPVAYISIGGNKYGFVIVDDFSRFTWVYFLHDKSEAQDVFKRFAKQAQNLCDLTIKRVRSDNGGEFKNTQVEEFLDEEGIKHKFSAPYDPPQNGIVERKNRTLIEAARAMLDEYKTSDVFWAEAVSTACHAINRLYLHKILKKTSYELLSGKKPNVSYFRVFGSKCFILSKRPRSSKFTPKVDEGFLLGYESNAHAYRVFNKTSGIVEVTRDVTFDESNGSQGEQVVVHVVGDVDPSQAIGTKAIGDIRPVKTQDDQEDRDQPPSSTSNSLTSVVSTEPEVLGPIDRNLQTSPGPEVPGSTVRNLWTSGSEDVPTAQVDGIDAAGTLEHTDQAQVPPVHHPRIHHTVQRDHPVDNIHGDIRKGVTTRSRVASFCQHFSFVSSLEPTRVEDALGDPDWVMAMQKELNNFIRNKVWTLVERPKQNVIGTKWIFRNKQDEHGVVIRNKARLFQMDVKSAFLNGPISELVYVEQPPGFEDPKLPNHVYKLHKALYGLKQAPRALYECLRDFLLKNGFEIGKADTTLFTKKFKSYLFICQNYVDGIIFGSTNASFCEEFSSIITKRFEMSMMGELTFFLGLQVKQAQEGTFISQTKYVKDILNKFGMEDAKPIKTLMPTNGHLDLDDNTKSVCICARFHTEPKECHLIAVKRILRYLVHTPNLGLWYPKGCDFELLGYSDSFYAGCKVDRKSTTGTCQFLGRSLVS

SEQ ID NO: 110451 - protein, 154 aa, Oryza sativa
  unsure (1)..(154): unsure at all Xaa locations
  Clone ID: PAT_MRT4530_14515C.1.pep
EASAAEEESPIESFPLPRKIRDLFLXIKTVMSETIDLTGDRCILKTVIRRAKDDATAPSDSLPIVDAHYEGTLAENGEVFDTTHEDNSAFSFEIGEGTVIKAWDIAVKTMKVGEVAKITCKPEYAYGAAGSPPEIPAEATLTFEEELIPWRPRK

SEQ ID NO: 110452 - protein, 85 aa, Oryza sativa
  unsure (1)..(85): unsure at all Xaa locations
  Clone ID: PAT_MRT4530_14516C.1.pep
MRRYTSKTFAMHALIDLSRSATTANTPLCMIYPPSSPMGTMDPCTPHMTQTTXMGRSTGKFMXHAMGLLLQLCLLDLQPMIPQRH

SEQ ID NO: 110453 - protein, 1104 aa, Oryza sativa
  unsure (1)..(1104): unsure at all Xaa locations
  Clone ID: PAT_MRT4530_14517C.1.pep
MELTSEQEQLIHRNAQASNAILSALSPEEFNKVDGLEEAKEIWDTLQLAHEGSPAVREAKIELLEGRLGRFVMDDKETPQEMYDRMMILVNKIKGLGSEDMTNHFVVKRLLRAFGPRNPTLVSMIWERKDFKRLTPRDILGRIVSHEMQEEEAREVRQIVKNAAMIKNQEVALKGKQEEESSCEESKDEEMAFIVKRFKYFLRKSGYGKGRKDDDKGKRQSKRACFNCGEYGHFIADCPKSNEAKAKGGKKKPKRAHVAEAHMAEVWYSGDEEDPDHEVKLKPKSKDKVEGEGGVATVAFKSSSSSKEHLFNNLSDDDDDSYHYSCFMAQGRKVMTQKPSQTSLDVDSSDEESDNELDDTYHSKDALYKTITAHPNKNGHGXGFSGGSHGPGTSGQTGRNFRVGVSVSQKFPPGXFRANGRAHDMTGSSGHNARRFRPEGNKLGIHILSRTSXTTTRPLELLHMDLFGSMAYISIGGNKYGFVIVDDFSRFTWVYFLHDKSEAQNVFKRFTKQAQNLYDLTIKKVRSDNGEFKNTQVEEFLDEEGIKHEFSTPYDPPQNGIVERKNRTLIEAARAMLDEYKTSDIFWAEAVSTACHAINLLYLHKILKKTSYELLSGDVDPSQAIGTKAIGDIRLVETQDDQEDRDQPPSSTSNSPTSAVSAEPEVPGPIDRNLRTSPGPEVPGSTVRNLRTSGSEDVPTAQVDGIDVPGTLEHTDQAQVPPVHHPRIHHIVQRDHPVDNILELVYVEQPPGFEDPKLPNHVYKLHKTLYGLKQAPRACIMTKSFKMSMMGELTFFLGLQVKQAQEGTFISQTKYVKDILKKFGMEDAKPIKTPMPTNGHLDLDDNGKCVDQKREHHSTGILDGTDEAYSSENPPSDTYSSSEDQPGYTNDNVDIQIHREHHSTGILDGTDEAYSSENLPSDTYSSSEVGGKRLTSARGRGADRRGPPVSDREREKGGGGARAHGSAARGKGGAAAPRGGRTDGPDLPKGRSDGGGTSRPGRAGAARDGGNHGAGGAALTRRRRACGSGARRRPKATDRRRGAAARGGAAATRLSGAHAATRYGEKEKEEGEASPTTVDDGGRRRTTTTAGRAPEPPNEQKERD

SEQ ID NO: 110454 - protein, 1794 aa, Oryza sativa
  Clone ID: PAT_MRT4530_14518C.1.pep
MSHLEGTEGLDDKGDASSTKDTGPKGATIHFDYNKLNVPPHNFVSVPSGRAPQFDGTHYAAWKHKMKLHLISLHPSIWKVVCTGIDVPHDDMELTSEQEQLIHCNAQASNAILSALSLEEFNKVDGLEEAKEIWDILQLAHEGSPAVREAKIELLEGRLGRFVMDDKKTPQEMYDRMMILVNKIKGLGSKDMTNHFVVKRLLRAFDPRNPTLVSMIREKKNFKRLTPSDILGRIVSHEMQEEEAREVRQMVKNAAMIKNQEVALKAKQEEESSCEESEDEEMAFIVKRFKHFLRKSGYGKGRKDDDKGKRQSKRACFNCGEYGHFIADCPKSNEAKAKGGKKKPERAHVTEVNMAEVWYSRDEEDPEVKPKPKLKDKVEGEGRKEMTQKPSHTSLDVDSSDEESDNELDDVLKSFSKPAMQHLAKLMRALDSKEQSLERQEELLILEKKRNLALEESLAKECAKNEQLANELNLANGSLASLRDVNETLQEKFANLDKSHKDLDVQFDTLWNSTSQPNVVSNSSNPSTSNGCARCYNIDLNSCTTNVDAMQALKKENERLGTLVKYGCIKTYHSKDALYKTITAHPNKDGHGLGFSGGSPVSKRVMVNGKECLMFVREGKTPQASEETRPFSGQHPEVPDKMIGSSCPAYSSDGSNWVVDSGCTNHMTGERSMFTSLDEEGGSRENIVFGDDGKGKLQFIIRISIVRDDSSIAFKGVLKGDLYLVDFNVDRVNPEACLIAKSSMGWLCHRRLAHVGMRNLASLLKGEHILGLSNVSFEKDRVCSACQVGKQVGSPHPIKNIMTTTRPLELLHMDLFGPVAYIIIGGNKYGFVIVNDFSRFTWVYFLHDKSKAQDVFKRFAKQAQNLYDLTIKRVQSDSGGEFKNTQVEEFLDEEGIKYEFSTPYDPLQKGIVERKNRTLIEAARAMLDEYKTSDVFWAKAVSTACHAINRLYLHKILKKTSYELLSCKKPNVSYFRVFGSKCFILSKRPRSSKFSSKVDEGFLLGYESNAHAYRVFNKTSGIVEVTRDVTFDESNGSQGEQVVVHVVSDVDPSQAISIKAIGDIRPVETQDDQEDRDQPPSSTSNSPTSVVSAEPEVPGPIDWNIRTSPGPEVPGSLVQNLRTSGSEDVPTAQVHDYVQRDHPVDNILGDIRKGVEDALGDPDWVMAMQEEFNNFTRNQVWTLMERPKKNVIGTKWIFRNKQDEHGVIVRNKARLFQMDVNSAFLNGPISELVYVEQPPGFEDLKLPNHVYKLHKALYGLKQAPRACVSMCARFQAEPKECHLIAVKRILRYLVHTPNLGLWYPKGCDFKLLGYSDSDYAGCKVDRKSTTGTCQFLGWSLVSWSSKKQNSIALSTAEAEYVAAGSCCAQFHWMKQTLKDFGYNFSKIPLLCDNESAIKIANNPVQHSRTKHIDIHHHFLRDHETKRDICLTHVRTESQLADIFTKPLDEKRFCELRMVSMPREKRQKLSQDVPSDSSPLVRGPRGRLGKEKVGDFYSGSQILIHSRRAGSIVIRDAPRSPSPVASESDNGGNEDEPGSESNPLRLYKTRAVDPDPRHPRVNYLKNLLRCAKDRMVSPDTMTADSQDDRFRTLVQIDWYNSMIMRRSYPVVEMKWLDWQYMSSKNNLVFNEVRKDAPKDCLGTTRGLHPYYRVLYSIFRWSLLPKVNDATALPSRHALLLSRMRYNKPDFSIMKLIWTGKEVSDISDDEEFVDPFAAYEAARDIANGEGPSGTTHFFNEESSYSEENSDDEESDAPTENVPTDLDEAVDAAGQDIDSPDSGDTEIISSDGDDDEA

SEQ ID NO: 110455 - protein, 350 aa, Oryza sativa
  Clone ID: PAT_MRT4530_14519C.1.pep
MRKKNNEVFNQVMQVCHNKNLGDILALEYDWNEEVIAQFYATAFFGTTRKGTPYVKWLTEGVRHKISMAQFAKMLGLDDEDLIRPNIHSEAPLPMIKTKFMYAKDAPRTCMGSTHGLHPNYKVLYSIFRWSFLPKVGDATALPSKHAHLLSCMRYNQPPFSVMKLIWYEIANTILEPKRGCIYAPFIIKMIETVTGWSLDLFLLLQLVLLLVPHQVPRVLLPSRRHFRQFFCMCAKTAKKVKKIERRQKEDRREAGKEVLDDSEDEVYVDPFEAYEAASNVAVEGPSTFFNEESSHSVDDDDDDDDGDEGDTEAAAEDAPTDVDEGDTAAQSDESHLSGDTEIVPSDGDE

SEQ ID NO: 110456 - protein, 72 aa, Oryza sativa
  Clone ID: PAT_MRT4530_1451C.1.pep
HNNGVNRRPWGKYKVKIRDQTRHGARLWLGTFGTPEKAAAAYDRAAFRMRGAKAMLHLPPAVAGDGARRGAA

SEQ ID NO: 110457 - protein, 121 aa, Oryza sativa
  Clone ID: PAT_MRT4530_14520C.1.pep
VTTGMGSRYWSLGSPHAGTEENNQATGGMKWGDPRTQGSASLQGYSGPSSVHQPISREPAAGLIRGDPRAQGAQGYGGPSLLHQPISREPAAGLIRGDPRTQGAPITQGAPDWGNVKQPNS

SEQ ID NO: 110458 - protein, 147 aa, Oryza sativa
  Clone ID: PAT_MRT4530_14521C.1.pep
MGSRYWSLGSPHAGTEENNQATGGMKWGDPRTQGSPASLQGYSGPSSVHQPISREPAAGLIRGDPRAQGAQGYGGPSLLHQPISRELKFLCVVITHALHYSGSGFNPGRSQDSRRSHYTSFTDQSITGVRYMRNAGVSGLPNTTNSH

SEQ ID NO: 110459 - protein, 57 aa, Oryza sativa
  Clone ID: PAT_MRT4530_14522C.1.pep
IASCRPFFFFFFYRQHQSSFYQPEKKKQSAAGIVTNQRRKPITTRGNTAVTTALLRT

SEQ ID NO: 110460 - protein, 69 aa, Oryza sativa
  Clone ID: PAT_MRT4530_14523C.1.pep
MSRINSQEADRDRTPRACRDLTAHRCTRCACRLTDYTAVCCYKSQLDAKQLLENPACVLMIGKGKQTMQ

SEQ ID NO: 110461 - protein, 125 aa, Oryza sativa
  Clone ID: PAT_MRT4530_14524C.1.pep
MAGRLTAAGSRVLGGQGAAARAAVSALRHRAGMGLPVGRHIVPDKPLPTNDELVWDNGTPFPEPCIDRLAPHIGKYEALAWLCGGLGFFATLGLAATLNDKASKIPYTPKVYPFDNLREELGDRP

SEQ ID NO: 110462 - protein, 857 aa, Oryza sativa
  unsure (1)..(857): unsure at all Xaa locations
  Clone ID: PAT_MRT4530_14525C.1.pep
FVGHSSRLTHGICFRRPVDRLCALGLPWSLRTLGSSQGVRCCDRGCQLVTKSCQHYVDDIVVKICKAFDHVSDLQETLDNLRAAGMKLNPEKCVFGVRAGKLLGFLVSETGIEANPEKIDDIQQMKPPSNVRQVQKLAGRIAALNRFLSKAAERGLPFFKTLQGAGKFSWTPECQSAFDKLKRYLQSPLALVSPTRGSELWLYLAALPIAVGAALVQETEAGQKKVYFVSEALXGAKVRYIAIEKLAYALVMASRKLKHYFQAHKSIVPSQYPLGEMLQGKEITRRLSKWAAELXPFDLHFVARTAIKSQILADCVAEWTPFSTTNNTAEYEAVLMGLRKAKALGVRRLIIRTDSKLVASQVDKCNTSKEEGIRKYLEAVRSMEKSFASITVEHLPRGQNKEADALAKSAACLGPHSLGVFFEVLYTPSVSIDSLEIMAIDQVKLGEDQDDWRTPFVKHLNGGWLPDNEAKAKQLQLRAARYKLVSGQLYLIGVLQPMLRYVSFSKGKEMVKEIHQGMCGAHQAARTVASKVFCQDIYWPTVLKVCVKQIKKCESCQRHGRNQTAPQYELQPIAPIWPFARWGLDIIDPFTVARNGYRFAIVAIEYFSRWIEAKPLGTITAAAVQKFVRKNIICWFRVPKXFIADNGKXFDSEKFREMCEGLNLEIRFASVAHPQSNGAAERANGKILEALKKRLEGATKGKWPDEMLSVLWALRTTPTRPAKFSPFMLLYGDEAMTPAELGANSPRVMFSGGKDGREVSLELLEGVRVEALEHMRKYAASTLATYNRKVLPTEILPSHLVLRKKAKPVAVXKLESKWEGPNLIKHSSRAGSFRLATLEGEEFDHSWNAASLKRFYV

SEQ ID NO: 110463 - protein, 119 aa, Oryza sativa
  unsure (1)..(119): unsure at all Xaa locations
  Clone ID: PAT_MRT4530_14526C.1.pep
RXXRXIEXXGDXDNSVGDSXXKESFGKFPFMGGRTNAPNXGGGSXCXPPIFHXXHHPXRFPENNXXKGHXSFISFGSVGVHSKSXTQFKGXRPHGRCFGALFTASXIXGYANPKDHHFX

SEQ ID NO: 110464 - protein, 111 aa, Oryza sativa
  unsure (1)..(111): unsure at all Xaa locations
  Clone ID: PAT_MRT4530_14527C.1.pep
MVLLSHFSYSCARIFFFPYTILISSPNASPRQLERKIGQLQDLKNSAQEVSSDDTLQMFHESILQSSHSLEEPHATLKRATDSSRLQFLSEDVAMLXLHECPDMKESGELT

SEQ ID NO: 110465 - protein, 727 aa, Oryza sativa
  Clone ID: PAT_MRT4530_14528C.1.pep
MTNSPSFRRGDHGLSTGSEGDESGVAEKKLRDKSKRAGELDDGHSGFQKIAMLGHPSKRNKLSADDDVGDAARRQGRIGRGFTPTRPSTPASIDKLENAPTTKQRSVRTVTERNESKSGRPLIKKMSERKGNARPRHISSNAQLDSPGSANSSPFWRQVEPFFSYLTTEDIAYLSQQIHLSDDSTASRSIEGDESRKYKGSLEYISQPSTPAGSNKDDHSALQNGYTLNEIDNDVGIAWETSCIEPILDQLVQGIGARGGASVGQRLMQALIDEDKVDNITNNIYRSETYPFDTHEIHFEEGGWKSHSQGYKLESLMNFEAAGKGSNGLMLDSDWKYHDELSHKGNNAMEKAKVWPEFQYSEMCFSDRIIIELSEVGVSIEPVPDLAQSEDEDINSEICKLEGQLHKEVVDKKNLLRKLDGILRTKKESQHREFSRRAMERLLLIAYEKYMAFCGSSSSKNVNRAGKHAALSFVKRTIARCQNYEESGACCFDETPFKDMFVSATSHRSDPDSASQDNITVPKSVQRASTSDASRASSHLTDLSFSKEDPWTNNVKQRELLLDEVVGSITGGTLKTSGLGTSLVSNTKGKRSEREGKGHNRDGSRSGRPSSSNAKGERKNKTKPKQKTANISAPVSSALTRDPQSQAKITPSGNGRDNTSAASARHEEPANASNDAEMPDLSNLELPGMDVDFGGWLNIEDDDGLQDLDLMGLEIPMDDINEINLMI

SEQ ID NO: 110466 - protein, 648 aa, Oryza sativa
  Clone ID: PAT_MRT4530_14529C.1.pep
MVRLIPRLHAPPPPPPRVPAGLPLPLLPAPALAATLLEAVSSSPSLPHLRHLHALAVRLPLPATSLPFLLSRLLRRLAALPPPPHAPLPYALNVFSAVSPPDPFLAAALLRFAFLTQPPLLPFRVFSHLRRAHGAELPFLPFAFSTLAKSATASRSLPAAAAAHAVSVLVGGFDRHRFVENSLIGAYVACGDVGAARKVFDEMVEKDVISWTSIVVAYTRSGDMRSAEEVFGRCPVKDMVAWTAMVTGYAQNAMPVKALEVFDRMAELGMVIDEVSLTGAISACAQLGALRRAAWVQEIAERTGFGNNVVVGSGLVDMYAKCGLIDEASKVFYGMQEKNVYTYSSMIAGLASHGRASEAIALFKEMVNRANVEPNHVTFIGVLTACSHAGMVGEGRYYFAQMKDKYGIMPSADHYACMVDLLGRAGLVDEALDLVRSMSVTPHGGVWGALLGACRIHGKSEIAKVVAEHLFKLEPESIGNYVLLSNILASAGKWEEVSKVRILMRKQRLKKDPAVSLFEGRDGLVHQFFAGDNAHPRTHEIKKALLELVAKLKLEGYVPILSSIVYDVNDEEKERLLMGHSEKLALSFGLLTLGSGCTIRIIKNLRICDDCHLFMQLVSRVESVEIIVRDNMRFHHFKNGECSCGGFW

SEQ ID NO: 110467 - protein, 108 aa, Oryza sativa
  unsure (1)..(108): unsure at all Xaa locations
  Clone ID: PAT_MRT4530_1452C.1.pep
MQLNPKARTRRNKTKAKMWQCAKIVLNVTLSMCGNHLEAPQFNPMSYTKLYCRNRLHRLTXSDSDSADXIVADLDFSRFLFFSRINLRLRLHLDLISFSDADITKFGC

SEQ ID NO: 110468 - protein, 1194 aa, Oryza sativa
  Clone ID: PAT_MRT4530_14530C.1.pep
MASSTKSDLMSGSPDGHGYFSGQRGLYSAASLERSASFRESGDSYAAFPVSGSSRSPAVDSATLLQSLAMDLRTTTLEPKTSRLDVKKSISLILGISPEESTSTPCTGRNSSLPFEEIRRMKNNLSDISNKARERSRAYGAAVTKIERCCPNILRKRSRGDGSSNERSTALLSGGLISKMPPQGHLNADDTELVSPRGEERIKNAGQNRRLRTSMSEMDARTTVLSRGLGSTDRSADPGKVTGGGPAVPEEKIRGLATGIDGWEKPKMKKKRSAIKADVSMTGPSRNVDVDREQKPGMQHKFNNEARARMTNSPSFRSGTVSSVSSISKSDLLSGQNGVGRSLSRSDQDSGFHPTNKRDRQAVLDKEISAPKSHNKLQANSDDWEHPSGMTKLNSTSGSGNPKRTKSTHSLSPPTQWGGQRPQKISRSARKSNLVAIITNTDGQSVSGSLESPSINEESAGLPRRASINCSQQTRRGDHGLSTGSEGDESGVAEKKLRDKSKRAGELDDGHSGFQKIAMLGHPSKRNKLSADDDVGDAARRQGRIGRGFTPTRPSTPASIDKLENAPTTKQRSVRTVTERNESKSGRPLIKKMSERKGNARPRHISSNAQLDSPGSANSSPFWRQVEPFFSYLTTEDIAYLSQQIHLSDDSTASRSIEGDESRKYKGSLEYISQPSTPAGSNKDDHSALQNGYTLNEIDNDVGIAWETSCIEPILDQLVQGIGARGGASVGQRLMQALIDEDKVDNITNNIYRSETYPFDTHEIHFEEGGWKSHSQGYKLESLMNFEAAGKGSNGLMLDSDWKYHDELSHKGNNAMEKAKVWPEFQYSEMCFSDRIIIELSEVGVSIEPVPDLAQSEDEDINSEICKLEGQLHKEVVDKKNLLRKLDGILRTKKESQHREFSRRAMERLLLIAYEKYMAFCGSSSSKNVNRAGKHAALSFVKRTIARCQNYEESGACCFDETPFKDMFVSATSHRSDPDSASQDNITVPKSVQRASTSDASRASSHLTDLSFSKEDPWTNNVKQRELLLDEVVGSITGGTLKTSGLGTSLVSNTKGKRSEREGKGHNRDGSRSGRPSSSNAKGERKNKTKPKQKTANISAPVSSALTRDPQSQAKITPSGNGRDNTSAASARHEEPANASNDAEMPDLSNLELPGMDVDFGGWLNIEDDDGLQDLDLMGLEIPMDDINEINLMI

SEQ ID NO: 110469 - protein, 483 aa, Oryza sativa
  Clone ID: PAT_MRT4530_14531C.1.pep
MATVTDAAAHVLVVPYPAQGHLIPFIDIVRLLASRGGLRLTVVVTPATAPLLAPHLAEHTGDGGGVFALTLPFPSHPAIPAGVENAKGSPPELFAKLVVAFAGLRGPLGSWARDRADTHHRVVAVLSDFLCGWMQPLAAELGVTHVVFSPAGVYAAAVMHPLYRVMPRPDDENDDECPVTFPDIPGCPAYPWRQITRTYRTYKKSDEIAEGFKSNFLWNLESSSFVSNTFRRLEGQYLERPLADLGFRRVRAIGPLAPESDVSGNRGGEMAVAASELCAWLDQFADRTVVYVSFGSMALLQPPHVAALSAALERTGAAFVWAAGSHTALPEGFEERAAAGGRGTVIRGWAPQLSALRHRAVGWFVTHCGWNSILEAVAAGVAMLTWPMVADQFVNARLLVDELRTAVPVSWGGVAAPPTADEVARVLEATVLMAEDGGEASDSEWSHVGARVEELAVEAAAATREGGSSWVEVDELARELRGL

SEQ ID NO: 110470 - protein, 66 aa, Oryza sativa
  unsure (1)..(66): unsure at all Xaa locations
  Clone ID: PAT_MRT4530_14532C.1.pep
FASPXXPTKXXYAGXXIRCRPXAXRHGVRPPHXXHRAVXSHVKTTRTTAAATATPGAVDDSTVAML

SEQ ID NO: 110471 - protein, 229 aa, Oryza sativa
  Clone ID: PAT_MRT4530_14533C.1.pep
MAGAPRGLVLLGVCAVLMVLAVSGEAASVVIGTAKCADCTRKNMKAEDAFKNLQVAIKCKNGNGEYESKAAGKLDGSGAFSVPLDTDLHSSDCIAQLHSATNEPCPGQEPSKIVPLSEGTFVTVAGKTSYPSALCASATICGPIKKKIIDHFHKKPVPPKPDPKPEPPKPKPEPEHPILDHFHKKEKDFFDHFHKKPVPPKPEPKSEPKPQPKPQPAPEYHNPSPPAKH

SEQ ID NO: 110472 - protein, 287 aa, Oryza sativa
  Clone ID: PAT_MRT4530_14534C.1.pep
MVADPPLQKVTLGSTVHGSALLEDGPNPLPSHLSPSPSLLPSPKRTPTCRLSPSSRRLDRSGRGREEGLNLKTPKAERDLSTSIVNDFGDGTYTVAFDEDKIYTTVTDSGEEVEEWLDEIVRIHHRRLDHLIVGLDVEWNPASGFCALGPVAVLQICVGRRCLVFQIIHADYVPDQLGDFLGDGRFTFVGVGIHDDVDKLREHYDLEVENAVDLRYLAAQTIGKPALRSTGLQGLVWEVMDVWMEKPHHVRVSAWDSRQLTLDQVMYACADAFASFEVGRSLYDDYE

SEQ ID NO: 110473 - protein, 305 aa, Oryza sativa
  Clone ID: PAT_MRT4530_14535C.1.pep
LSCICGVHVAVTWASGGGQRPSGEVGRTRCGAGDAASACGGATRWRRAARTTQLVVARRRGGERPLRRLGGAAAWHGVATLPHDRIGSAAADQICYKAAGRHRHAVMGVQRCWMADLLQKNGNDSHSVWPFCAQELETANHILTLNCVFTRQIWLRVLSLFGWAALSPPHGSWLQSWWPSSRACFPEHLRDGFDSLVVLISWQLWKKWNSRKKANKNIQEITAATQPSSATAARPRPAVVRATAARPRPAVVTPDLGERGGRERATAALRRHHPPPLPPSAATAGKGGEVRGGERRGEGRGEAGR

SEQ ID NO: 110474 - protein, 1147 aa, Oryza sativa
  Clone ID: PAT_MRT4530_14536C.1.pep
MELTSEQEQLIHRNAQASNAILFVLSLEEFNKVDGLEEAKEIWDALQLAHEGSPTVREAKIELLEGRLGRFVMDDKETPQEIYDRMMILVNKIKGLGSEDMTNHFVVKRLLRAFGPRNPTLVSMIRERKDFKRLTPSDILGRIVSHEMQEEEAREMRQIVKNAAMIKNQEVALKAKQEEESSCEESEDKEMAFISGDEEDLEVKPKPKPKDKVEGEGGVATVAFKSSSSSKERLFNNLSDDDDDSYHYSCFMAQGRKVMTQKPSHTSLDVDSSDEESDNELDDAYSSGGSSWVVDCGCTNHMTGKRSMFTSLDEEGGSREDIVFGDDGKGKVMGLGIKHEFSAPYGPPQNGIVERKNRTLIEAARAMLDEYKTSDVFWAEAVSTACHAINRLYLHKILKKTSYELLSGKKPNVSYFCVFGSKYFILSKRPRSSKFSSKVDEGFLLGYESNAHAYCVFNRTSGIVEVTRDVTFDESNGSQGEQVVVHVVGDVDPSQAIGTKAIGDIRPVETQDDQEDRDQPPSSTSNSPTSAVSAEPEVPGPIDRNIRTSPGPEVPGSIVWNLRTSGSEDVPTAQVDGIDAAGTLEHIDQAQVPPVHHPRIHHTVQRDHPADNILGDIRKGVTTRSHVASFCQHFSFVSSLEPTTVEDALVYPDWVMAMQEELNNFTRNQVWTLVERPKQNVIGTKWIFRNKQDEYGVVVRNKARLFQMDVKSAFLNGPISELVYVEQPPGFEDLKLPNHVYELHKALYGLKQAPRAWPEVPVIPVQNFRGSGAGSSGVLGPELPVSVQTASNLDSSTVSFNHCTPTLLTLVAVVSMPREKRQKLSQDVPADLSPPVRGPRGRLGKEKVGDFYSESQIPIYSRRAGSIVIHDAPRSPSPAASESDDGGNEDEPGSESNPLRLYKTRAVDPDPRRPRVNYLKNLLKCGKDRMVSPDTLPADSQDDIFKTLVQVDWYNSVIMGRSHPVVEMKWLDWQYMSSKNNIVFNEVRKVCERKHVADLLALHYSWNEEVIGQFYSTAFFGTTKKGLDFVKWTIQGQQYRVSMAQFAVVWGKDVSDISDDKEFVDPFAAYETARDIASSEGPSGTSRFFNEESSHSEESSDDQESDAPTENVPTDPDEAVDAAGQDIDSPHSGDTEIIPSDGDDDEA

SEQ ID NO: 110475 - protein, 1933 aa, Oryza sativa
  unsure (1)..(1933): unsure at all Xaa locations
  Clone ID: PAT_MRT4530_14537C.1.pep
MKLHLISLHPSIWKVVCTGVDVPHDDMELTSEQEQLIHRNAQASNAILSTLSLEEFNKVDGLEEAKEICDTLQLAHEGSPAVREAKIELLEGRLGRFVMDDKETPQEMYDRMMILVNKIKGLGSEDMTNHFVVKRLLREFGPRNPTLVSMIREKKDFKRLTLSDILGRIVSHEMQEEEARKTRRRVKRFKHFLRKSGYGKGRKDDDKGKKQSKRACFNCGEYGHFIADFPKSNEAKAKGGKKKPERAHVAEAHMPEVWYSGDEEDPEVKPKPKPKDKVDGEGGVATVTFKSSSSSKERLFNNLSDDDDDSYHYSCFMAQGRKVMTQKPSHTSLDVDSSDEESDNELDDVLKSFSKPAMQHLAKLMRALDSKEQSLERQEELLILEVGLLASXNPSTSNGCAXLKKENERLGTLVKYGCMKTYHSKDALYKTITAHPNKDGHGLGFSSESPVSKRVMVNGKECLMFVREESKVVAYFNGNYNDEYHTCVWVPKALAYSYDGSSWVVDSGCTNHMTGERSMFTSLDEKGGSRENIVFGDDGKEKLQFIIRVSIVRDDSSIAFKGVLKGDLYLVDFDVDRVNPEACLIAKSSMGWLWHRRLAHVGMRNLASLLKGEHILGLSNVSFEMDRVCSACQAGKQVGSPHPIKNIMTTTRPLELLHMDLFGPVAYISIGGNKYGFVIVDDFSCFTWVYFLHDKSEAQDVFKRFTKQAQNLYDLTIKRVRSDNGGEFKNTQVEEFLDEEGIKHEFSAPYDPPQNGIVERKNRTLIEAARAMLDEYKTSDVFWAEAVSTACHAINRLYLHKILKKTSYELLSGKKPNVSYFRVFGSKFFILSKMPRSSKFSPKVDEGFLLGYESNAHAYRVFNKTSGEQVVIHVVRDVDPSQAIGTKAIGDIRPVETQDDQEDRDQPPSSTSNSPTSVVSAEPEVPGPIDRNLRTSPGPEVPGSTVRNLRTSGSEDVPTAQVDGIDAAGTLGHTDQAQVPLVHHPRIHHTVQRDHPVDNILGDIRKGVTTRSRVASFCQHYSFVSSLEPTRVEDALGDSDWVMAMQEELNNFARNQVWNLVERPKQNVIGTKWIFRNKQDEHVVVVRNKARLVTQGFTQVEGLDFGETFAPVARLESIRILLAYAAHHDFRLFQMDVKSAFLNGPISELVYVEQPPGFEDPKLPNHVYKLHKALYGLKQAPRAWYECLRDFLLKNGFEIGNADTTLFTKKFKSDLFICQIYVDDIIFGSTNASFCEEFSSIMTKRFEMSMMGELTFFLWLQVKQAQEGTFISQTKYVKDILKKFGMEDAKPIKTPMPTNGHLDLDDNGKCVDQKVYRSMIGSLLYLCASRPDIMLSVCMCARFQAEPKECHLIAVKRIQRYLVHTPNLGLWYPKGCDFELLGYSDSDYAGCKVDRKSITGTCQFLGPSLVSWFPKKQNSIVLSTTEAEYVAAGSCCAQLLWMKQTLKDFGYNFTKTPLLCDNESAIKIANNPVQHSKTKHIDIHHHFLRDHETKGDICLTHFCRAEVPVSVQPASNLDSSTVSFNHCTPTLLILVAVVSMPREKRQKLSQDVPADSSPPVHGPRGRLGKEKVGDFFSGSHIPIHSKRAGSIVIRDAPRSPSPVASESDDGGNEDEPGSDSNPLRLYKTRAVDPDPRRPRVNYLKNLLKCGKDRMDDRFRTLVQVDWYNSVIMGRSYPVYSWNEEVIGQFYSTAFFGTTKKGLDFVKWTIQGQQYRVSMAQFAAALGLDDDDLSRPHIFVEDALSSTSTTFLYEKDAPKDCLGTTRGLRPYYRMLYYKVKSYYGISRNLLIKFKDDQIDETSILAQVLSSESAISSLLDMSIRSLPGDHGLPLQQVLPDVPPAMADAVNRGGELLTNLATGTPWEAVAKEVGTGGAQYCTVLSANLQFSFTRNVHLVATEDGYFIRLLQQQQQQQLILSHMGSTYPDIKYCMCV

SEQ ID NO: 110476 - protein, 624 aa, Oryza sativa
  Clone ID: PAT_MRT4530_14538C.1.pep
MKSPLRKFRGFGLHSHRERKDHRPPPAKLDELADAAQEMEEMRNCYDSLLSAAAATMNSVYEFAEAMEEMGTCLLEKTALNYDDDDSGRVLMMLGKAQFELQKFVDNYRTNIINTITNPSESLLKELQVVEEMKELCDHKRQEYEAMRAAYREKGRSRHSKTETLSSEQLQAYFLDYQEDAALFIFRLKSLKQGQFRSILTQAARHHSAQLSFFRRGLKYLEALEPHVKAVAEKQHIEYPLNGLDDDTDNDEYSSYQGNQSDDSELSFDYEINDRDKDFPASRSSMDLDQSNQACSPEPLKEHKQEYTEQIQADFAAPRVKLEIGTQSAPISADNVFDPSTRFRKMNTSNRTNYSYKLPTPDDDKNSTSAHTNRSPHSDQPESKSHVAENLWHSSPLVKGFKPNSMFSGPVKMPSSTEGISAPLVYPYATSDFKKMKREAFSGPIPSKAGLNKPLFSATDLRAPMNYPRAMSTKSYGPGWQSSVAPKFTPRITSLPTTSPRISELHELPRPPANVGAARPGLVGYSGPLVSRRQVPNVPTRASPPSQTASPLPRPPAAMTRSYSIPSNSQRTPILTVNKLLEARHSRESSEVSSPPLTPISLADVSRRSTAETALEKTRMMETL

SEQ ID NO: 110477 - protein, 235 aa, Oryza sativa
  Clone ID: PAT_MRT4530_14539C.1.pep
MKTYHSKDALYKTITAHPNKDGHGLRFSGGSPVSKRVMINGKECLMFVREGKAPQASEVTCPLTGQTPGSSGQNDRKFLPCKTGSSGHFVRKFRASDRPKGLAGSSGYNARKFWPEGLYYDSYAYSSDGSSWVVDSGCTNHMTGERSMFTSLDEEGGSRENIVFGDDGKGKVMGLAQDVFKRFAKQAQNLYDLTIKRVRSNNGGEFKNTQVEEFIDEEGIKHEFSAPYDPPQNGI

SEQ ID NO: 110478 - protein, 68 aa, Oryza sativa
  Clone ID: PAT_MRT4530_1453C.1.pep
RLKPMQLNPKARTRRNKTKAKRWRCAEIVLNADLDFSRFLLCSRINLRLRLHLDLICFSDVDITKFGR

SEQ ID NO: 110479 - protein, 149 aa, Oryza sativa
  unsure (1)..(149): unsure at all Xaa locations
  Clone ID: PAT_MRT4530_14540C.1.pep
MDDQHRGVIXGGGYXGDRRGQEQEEKQRFMKTAMKTVTAERLGGSMLVLIDLSLDGADIVLTVATRVLVIFRRMLVPRGIALPLMMDVFITWGAFAVDALLRLLWMYKYLTGKHLAGADQVHHAKARLAYMARDIKEAAQHRIDQAQAS

SEQ ID NO: 110480 - protein, 107 aa, Oryza sativa
  Clone ID: PAT_MRT4530_14541C.1.pep
MSDLGGKNGENGNEDEASSKGTPPPKGATIPFDYSKLTIPSHNFVSMPSRRAPQFDGTYYAAWKHKMKYCIPHDDMELTSEQEQLIYRNAQASNAILSALNPEEFNK

SEQ ID NO: 110481 - protein, 60 aa, Oryza sativa
  unsure (1)..(60): unsure at all Xaa locations
  Clone ID: PAT_MRT4530_14542C.1.pep
IKRKKRKEEEKKNKEKKXEEGKIKEEWRRKRRQKKXEERRENKKREEEKIRRTGRGQKEE

SEQ ID NO: 110482 - protein, 525 aa, Oryza sativa
  unsure (1)..(525): unsure at all Xaa locations
  Clone ID: PAT_MRT4530_14543C.1.pep
MDGRDRSGPRRLTADDPDGVSDDVTPAAAARRRSSRATAASGTAAKHSWSGGGDSEARACGARAIPTTRGEGEGGGGPEVPGLLVRNLGVSGISTMTREKRQKASQDVSGDESPPIRYPRGRLGKEKVVEGGSGSGTRTSPRFTRQSSNRPVQIRDVDSGQGSDAPNTRGHGRGGGRSSGAGRASHDFPVGSRENPVRLYKTLGFDTTPMHHIGRPKSNYLHQLANAATAPTKPPPPPADPPSSLAAGRRSTSSVVFVGTVVEMKCIDWAYMRKKNNEVFNQATRXCGPAIFSVATHNKNLGDILALEYDWNEEVIAQFYATAFFGTTRKGTPYVKWLTEGVRHKISMAQFAEMLGLDEEDLNRPNIHSEAPLPMIKTMFMYAKDAPRTCMGSTHGLHPNYKAIFCMCAKTAKKVKKIERRQKEDRREASKEVSDDSEDEVYVDPLEAYEAARNVAGEGPSTYFNEESSHSDDDDNDDDGDEGDTEAAAEDAPTDVDEGDTAAQSDESHLSGDTEIVPSDGDEDE

SEQ ID NO: 110483 - protein, 973 aa, Oryza sativa
  Clone ID: PAT_MRT4530_14544C.1.pep
VDEGFLLGYESNTYAYRVFNKTSGIVEVTRDVTFDESNDSQGEQVVVHIVDDADPSKAIGTKAIGDIRPVEMQDDQEDRDQPPSSTSNSPTTRQVSVDPEVPGPNDRNLRTTPGQEVPGPSARMFRAKDSQGVPTAQVDGIDAKGTVKHPNQAQVSSVHHPKIHHTVQRYHPVDNILGDIRKGRPDQNVIGIKWIFRNKQDEHGMVVRNKARLYKMDVKSAFLNGPISELVFVEQPPGFEDPKFPHHVYKLHKALYGLKQAPRAWYECLRDFLLKNGFEIGKADTTLFTKKFKKDLFICQIYVDDIIFGSTNASFCKEFSGIMTKRFEMSMMGEITFFLRLQVKQAQDSTFISQTKYVKDILKKFGMEDAKPIKTPMPTNGHLDLDENGKCVDQNVYRSMIGSLLYLCASHPDIMLSVCMRARFQAEPKECHLVVVKRILRYLVHTPNLGLWYPKGCGFELLGYSDSDYAGCKVDRKSTTGTCQFLGRSFVSWSSKKQNSIALSTAEAEYIAVVNIMSREKRQKASQDVSGDESPPIRFPRGRLGKEKVVEGGSGSGPRTSPSARGRGRGSGRSSGAGRASHNFPVGSRENPIRLYKSLGFDTTPMHHIGRAKSNYLHQLAKCRRDHLIDPETQPEESQDPRFRTFTQLDWYNSVIMARENPVVEMKWIDWAYMRKKSLVLCDSILWHKISMAQLAEMLGLEDEDLNRPNIHSEAPLPMIKVLYSIFRWSLLPKVGDATALPTKHAHLLSHMRYNQPPFSVMKFIWYEIANTILEPKQGCIYAPYIMKMIETVIEVFYIKDGRHNPFRPRAPSSSSPVVPRSIPSTSAGPSSSAPQSSSSSSPIKKALHAIFCMYAKTAKKVKKIERRQKEDRREAGKEVSDDSTDEVYVDPFEAYEAARNIAGEGPSTYFHEESSHSDDDDDDDDDDDEGITEAAAKDAPTYVDKGDSAAQSDTSHLSGDTEIVPSDGDGDE

SEQ ID NO: 110484 - protein, 65 aa, Oryza sativa
  unsure (1)..(65): unsure at all Xaa locations
  Clone ID: PAT_MRT4530_14545C.1.pep
IGPKFTSLYKGATEEATCXVWARWAQPMVRPNLPWRRWMQGFDGRLGLIPNDGWRVLPTIPTVTT

SEQ ID NO: 110485 - protein, 106 aa, Oryza sativa
  Clone ID: PAT_MRT4530_14546C.1.pep
WIPGLQDRHEALVSCKTFSIEVDACLLVGNSHVFVHIHFLGMILFIFLTTSAVVGIYRFPGIAFSPIVIMFYASLIGLVRTRLLCFCFVRSNEYCGDKSLRFIFLY

SEQ ID NO: 110486 - protein, 1355 aa, Oryza sativa
  unsure (1)..(1355): unsure at all Xaa locations
  Clone ID: PAT_MRT4530_14547C.1.pep
MQALKKENERHTIQKTITAHPNKDGHGLGFSGGSPVSKRVMAYSSGGSSWVVDSGYTNHMMGERSMFTSLDEEGGSRENIVFGDDGKGKVMGLDRVNPEACLIAKSSMGWLWHRRLAHVGMRNLASLLNGEHILGLFNVSFEKDRVCSACQVGKQVGSPHPIKNIMTTTRPLELLHIGLFGPVAYISIGGNKYGFVIVDDFSRFTWVYFLHDKSKAQDVFKRFTKQAQNLYDLTIKRVRSDNGGEFKHTQVEEFLDEEGIKHEFSAPYDPPQNGIVERKNRTLIDAARAMLDEYKTSDVFREKAVSTACHAINRLYLHKILKKTSYELLSGPPVHHPRIHHTVERDHPVDNILGDIRKGVTTHSRVASFCQHFSFVSSLEPTRVEDALGDPDWVMAMQEELNNFTRNQVWTLVERPKQNVIGTKWIFCNKQDEHRVVVRNKARLVAQGFTQVEGLDFGETFAPVARIESIRILLAYAAHHDFRLFHMDVKSAFLNGPISELVYVEQPPGFEDPKLPNHVYKLHKALYGLKQAPRDWYECLRDFLLKNGFEIGKADTTLFTKKFMSDLFICQIYVDDIIFGSTNASFCEEFSSIMTKRFEMSMMGELTFFLGLQVKQALEGTFISQTKYVKDILKKFGMEDAKPIKTSMPTNGHLDLDDNGKCVDQKVYRSMIGSLLYLCASRPDIMLSVCMCARFQAEPKECHLIAVKRILRYLVHTPNLGLWYPKGCDFELLGYFDSDYAGCKVDRKSTTGTCQFLGRSLVSWSSKKQNSIALSTAEAKYVAAGSCCAQLLWMRQTLKDFGYNFTKIPLLCDNESAIKIANNPVQHSRTKHIDICHHFLKDHETKGDICLTHARSSGHPSLELPGVGGINTQGEPSLVTSSPPRFPNPSHRYSAPIGDFLFQPWKFDSSPWNQPHWWLGGSSRDRFAISPLKARSSDVVGPELPVSVQTASNLDSATVSFNHCTPTLLILVAVVIMPPASESDDGGNEDEPGSESNPLRLYKTRAVDPDPKRPRVNYLKNLLKCGNDRMVSPDTLPADFQDDRFRTFVQVDWYNSVIMGRSHPVVEMKWLDWQYMSSKNNIVFNEVRKVCERKHMADLLALQYSWNEWSLLPKVGDATALPGRHALLLSRMRYNKPDFSIMKLIWSEIYETVCEPKRGCIYAPYIMKMIEAKTGICYFKDNQRKPFRAHAPTTLATPTTRVTRASTSAAPSSSAAPQRSESSSPIKKALRAIFCMCAKTAKKVKKIVRHQKXDWIAAGKDVSDISDDEEFVDPFAAYETARDIASGESPSGTSHFFNEESSHSEESSDDEESDAPIENVPTDPDEAVDAAGQDIDSPHSGDTEIIPSDGDNDEA

SEQ ID NO: 110487 - protein, 138 aa, Oryza sativa
  unsure (1)..(138): unsure at all Xaa locations
  Clone ID: PAT_MRT4530_14548C.1.pep
MRFMAYAWFPQGSLAPLMQMVSCQVVDRKKFMFELSRGGHVAVEFLEGVFVFPPSVEDVWVYVVSFSSMLGSVVHPLFXNTLKWVFTNCRQGCFVEISQSQGLKVHIPPQVLSPAAKNKRREFKYVKGVILNPIPYNH

SEQ ID NO: 110488 - protein, 918 aa, Oryza sativa
  Clone ID: PAT_MRT4530_14549C.1.pep
MDVKSAFLNGPISELVYVEQPPGFEDPKMPNHADTTLFTKKFENDLFICQIYVDDIIFGSTNATFCKEFSSIMTKRFEMSMMGELTFFLGLQFKQAQEGTFISQTKYVKDILKKFGMKDAKPIKTPMLTNGHLNLDENGKCVDQKVYRSMIGSLLYLCASRPDIMLSVCMCARFQAEPKECHLIAVKRILRYLVHTPNLGLWYPKGCDFELLGYSDSDYAWCKVDRKSTTGTCQFLGRSLVSWSSKKQNSIALSTAKAEYVAAGSCCAQLLWMKQTLKDFGYNFTKIPLLCDNESAIKIANNPVQHSRTKHIDIRHHFLRDHETNGDICLTHVRTESQLADIFTKPLDEKRFCELRISSMPREKRQKASQDVSGDESPPIRFPRGRLGKEKVVEGGSGSGTRTSPRFTRQSSNRSVQIRDVDSGQASDAPNTRGRGRGGGRSSGAERASHDFPVGSRENPVRLYKTLGFDTTPMHHIGRPKSNYLHQLATNYLHQLAKCRRDRLIDPETQPEESQDPRFRTFTQLDWYNSVIMARENPVVEMKWIDWAYMRKKNNEVFNQVMQVCHNKNLGDILALEYDWNEEVIAQFYATVFFGTTRKATPYVKWLTEGVRHKISMVQFAEILGLEDEDLNRPNIHSEAPLPMIKTKFMYTKDAPRTCMGSTHGLHPNYKVLYSIFRWSLLPKVGDATALPSKLAHLLSRMRYNQPPFSVMKLIWYEIANTILEPKRGCIYAPFIMKMIETVTGVFYIKDGRHNPFRPRVPPSSSPVVHTSIPSTSAGPSSSAPPRSSSSSPIKKALQAIFCMCAKTAMKVKKIERHQKEDRREVGKEVSDDSEDEVYVDPFEAYEAARNVAGEGPSTYFNEESSQSDDDDDDEDDTEAAAEDAPTDVDEGDTAAQSDESHLSGDTEIVPSDGDGDE

SEQ ID NO: 110489 - protein, 445 aa, Oryza sativa
  Clone ID: PAT_MRT4530_1454C.1.pep
MDEEYDVIVLGTGLKECILSGLLSVDGLKVLHMDRNDYYGGDSTSLNLNQLWKRFRGEDKPPAHLGSSKDYNVDMVPKFMMANGTLVRTLIHTDVTKYLSFKAVDGSYVFSKGKIHKVPATDMEALKSPLMGLFEKRRARNFFIYVQDYNEADPKTHQGLDLTTMTTRELIAKYGLSDDTVDFIGHALALHKDDRYLNEPAIDTVKRMKVYAESLAPFQGGSPSIYPLYGLGELPQGHARLSAVYGGTYILNKPDCKVEFDMEGKVCGVTSEGETAKCKKVVCDPSYLPNKVRKDRKVARAIAIMSHPIASTNDSHSVQIILPQKQLGRKSDMYVFCCSYTHNVAPKGKFIAFVSTEAETDNPQSELKPGIDLLGQVDELFFDIYDRYEPVNEPSLDNCFVSTSYDATTHFETTVTDVLNMYTLITGKAVDLSVDLSAASAAEEY

SEQ ID NO: 110490 - protein, 2003 aa, Oryza sativa
  unsure (1)..(2003): unsure at all Xaa locations
  Clone ID: PAT_MRT4530_14550C.1.pep
MLDLGGKNGENGNEDEASSKGTPPPKGATIPFDYSKLTIPSHYFVSMPSGHTPQFDGTYYDAWKHKVKLHLISLHPSIWKVVCTGIDIPHDDMELTSGQEQFIHRNAQASNAILSALSPEEFNKVDGLEEAKEIWDTLQLAHEGSPAVREAKIELLEGRLGRFVMDVKETPQEMYDRMMILVNKIKGLGKXLLRAFGPRNPTLXLSMIRERKHFKRLTPSDILGRIVSHEMQEEEAREVRQMVNNAAMIKNQEVALKAKQEEESSCEESEDEEMAFIVKRFKHFLRKSGYDKGRKDDDKGKRQSKRACFNCGEYGHFIADCPKSNEAKAKGGKKKPERAHVAEAHMAEVWHSGDEEDPEVKPKPKSKDKVEGEGGVATVAFKSSSSSKECLFNNLSDDDDDSYHYSCFMAQGRKSFSKPAMQHLAKLMRALDSKEQSLERQEELLILEKKRNLALEESLAKECAKNKQLANELNLANGSLASLRDVNETLQEKFANLDKSHKDLEVQFDTLWNSTSQPNVVSNSSNPFTSNGCARCYDIDLNSYATNIDAMQALKKENERLSTLVKYGCMKTYHSKDVLYKTITAHPNKDGHELGFSGGSPVPKRVMVNGKECLMFVREGKAPQASEVTGLVSCQGPGTSGQTGRNLWVGVSVSQKFPPGSSGRFARKFRANGRAQDMTGSSGHNARRFQPDGLYYDSYVISKNSEGKVVAYFNVNYNDEYRTCVWVPKALVTNIKGPKLRQAYSSGGSSWVVDSGCTNHMTGERSMFTSLDKENGTRENIVFGDDGKGKLGYNCLFTDEDVTVFRRDDSSVAFKGKLKGDLYLVDFDVDRVNPETCLIAKSSMGWLWHRRLAHVGMRNLATLLKGEHILGLTNVTFEKDRSEAQDVFKRFAKQAQNLYDLTIKRVRSDNGGEFKNTQVEEFLDEVGIKHEFSAPYDPPKNGIVERKNRTLIEAARAMLDKYKTSDIFWAEAVSTACHAINCLYLHKILKKTSYELLSGKKPNVSYFRVFGSRCFILSKRPRSSKFSPKVDEGFLLGYESNAHAYRVFNKTFGIVEVIRDVTFDESNGSQGEQVVVHVVGDVDPSQAIGTKAIGDIRPVETQDDQEDRDQPSSSTSNSPTSSQESVDPEVPGPDDRILRTSPSQEVPGPSARKFRAEDSQGVPVDGIDAEGTVEHPDQAQVPSVHHPRIHHTVQRDHPVDNILGDIRKGITTRSRVANFCQHYSFVSSLEPTRVEDALGDTDWVMAMQEELNNFTRNQVWTLLERPDQNIIGTKWIFRNKQDEHRVVVRNKVRLVAQGFTQVEGLDFGETFAPVARLESIRILLAYAAHHDFRLFQMDVKSAFLNRPISELVYVEQPPGFEDPKLPNHVYKLHKALYGLKQAPRACSIMTKRFEMSMMGELTFFLGLQVKQAQEGTFISQTKYVKDILKKFGMEDAKPIKTPMPTNGHLDLDDNGKCVDQKVYRSKSVCMCAHFQAEPKECHLIAVKRILRYLVHTPNIGLWYPKGCDFELLGYSDSDYAECKVDRKSTTGTCQFLGRSLVSWSSKKQNSIALSTAEAEYVAAGSCCAQLLWMKQTLKDFGYNFTKIPLLCDNESTIKIANNPVQHSRTKHIDIRHHFLRDHETKGDICLTHVRTESQLADIFTKPLDEKRFCELRISTMPREKRQKASQDVSGDKSPPIRFPRGRLGKEKVVDXGSGSSTRTCPRFTXIMARENPVVEMKWIDWAYMRKKNNEVFNQVMQVCHNKNLGDILALEYDWNEEVIAQFYATAFFGTTRKGTPYVKWLTEDDEDLNRPNIHSEASLPMIKTKFMYAKDAPRTCMGSTHGLHPNYKVLYSIFHWSLLPKVGDATALPSKHAHLLSRMRYNQPPFNVMKLICPFLAECLKEFHSTYDDELLQWNGAELMTRVIRNMSDKADDNSGHLDIKFEPSVAFYPISSTDITRYFSEADSTDERAQHDALFSRIVNDSTTFHLWNSITSSLVPEPNSLVERILNRYCLHCLDVL

SEQ ID NO: 110491 - protein, 111 aa, Oryza sativa
  unsure (1)..(111): unsure at all Xaa locations
  Clone ID: PAT_MRT4530_14551C.1.pep
FFXKPPKGPRXRPLGKIGQXKTXGGNFQFQKXKXPXFXEKGLRXFFLGFXXKPRGRFPPGGIGXPPQGPKKNWFWGPRGXTPKIXFPKFXWGGETQWEPKKILIKNFWXLN

SEQ ID NO: 110492 - protein, 40 aa, Oryza sativa
  Clone ID: PAT_MRT4530_14552C.1.pep
GRFFESYYNLLAVVLQRRDWENPGVTQLNCLAAHTPFASW

SEQ ID NO: 110493 - protein, 119 aa, Oryza sativa
  Clone ID: PAT_MRT4530_14553C.1.pep
IRENQKLREELRRTETIVSIYTKHRWWMEEQASRSYEMIRFTEYRPSLIHRVVSDRDAIFLGTGSYGSVLQCKIGEKTVAVKIPNNRDSRQPLPSMREFNQEASIKIYSAIYLLIFLLI

SEQ ID NO: 110494 - protein, 295 aa, Oryza sativa
  Clone ID: PAT_MRT4530_14554C.1.pep
MPVEYVGLPLLRFRYLIYFFCDPGNGIVRHMGFPVCKTGGPQSTRKPSPQVFSEFYLEAKGIDIRPSEGALVQGVEDGCLETPKKYKIKADRNSRSIARENPLHIVDVPCKFVKDFLSSEREREHRKFRAWEAGSSGVPYQEVPGGKNGENGNEDGASSKETPSPKGATIPFDYSKLTIPPHNFVSVPSGRVDVPNDDMELTSEQEQLIHRNAQASNAILSALSLEEFNKVDGLEEAKEIWDTLQLAQEGSPTVREAKIELLEGRLGRFVMDDKETPQEMYDRMMILVNKIKGLG

SEQ ID NO: 110495 - protein, 459 aa, Oryza sativa
  Clone ID: PAT_MRT4530_14555C.1.pep
MGSSEVQGGRGWGKKRRIQRREKSKREREKGKRRSSSSSRLNSNLAACIFSQEFNCKKKKKKKKSTTSPVAVAEAYCGWIMETVSVCGLHPGVAVTGFCPACLRDRLAGLHPPSDLRRCKSFSYYARSSSYLEPHPQQDALVLPDAADAPTNTKLALGSLGKRWQEWRRKSKLKHHHPPPATATDPALLARRSCDAFSTRTMLDEPRASYHPTLFVPRSDDQIPVEEEERAYVPGGSAQTRDYYLDSSSSSRRRRSVDRKSSSDAGDQIPRMVAAAANARVSPATELYHQPHTFHYHQPSFEPPPLLARERQEAKSKPKNKGIKGWSIWGLLHKKSSTTNSVGATASAFAGEARAAPPELRARGYDGQMLRCNSSVSARSSFSGIGSSFNGGRLGMRRADEVLLERNFSARYSSSSSCRYQFPKNDYSNSIPNNSGAGAGSRPPRSSTLPRTSLGLYYY

SEQ ID NO: 110496 - protein, 179 aa, Oryza sativa
  unsure (1)..(179): unsure at all Xaa locations
  Clone ID: PAT_MRT4530_14556C.1.pep
SSCAFTRLGDIAGVVAAAAAAVRWWGRSRSRVGDVARGRVRHLRLEIRLTTRRRARRPGEPTRPRRRRRRREXSMIHHPPRRRRRRRSRRRRRRATRRTPPRTARSRGRRSRTRCGRGRRRGACLACLAGPARPPRAPSSRPRSATRRTGTSPPPSPPTPCSDVDNGHRRRARACGCTR

SEQ ID NO: 110497 - protein, 125 aa, Oryza sativa
  Clone ID: PAT_MRT4530_14557C.1.pep
ISPLETSQKADPVEPAAKIVRQTSQFKRWGRKHPFVRYGLPLISLTVFGAVGLAHLIQGSKEVTKEKEDMEWEVVETTKALSRTGPVEGAYKPKKLSLEDELKALQQKVDINNYDYKRIPRPNEK

SEQ ID NO: 110498 - protein, 125 aa, Oryza sativa
  Clone ID: PAT_MRT4530_14558C.1.pep
MADGAMRYLGRRINNDQQQGGRGAVAWIVHRRRLLLDSGRAMMLLGAIVLTSRQLIITTSSGATHSVDAELYHAYDVVLVAFLLWLLGVALATLSLVAPRAQLPGLAFANAAVAMALRNHILRDL

SEQ ID NO: 110499 - protein, 99 aa, Oryza sativa
  unsure (1)..(99): unsure at all Xaa locations
  Clone ID: PAT_MRT4530_14559C.1.pep
QRSGAIELICIRILGAGNHXYAHIGDVIVAVIKEAVPKMPLERSDXVRRAVIVRTCKELKRDNGMIIRYDDXVINQEGNPKGTRVFGELRLMNFTKRVS

SEQ ID NO: 110500 - protein, 527 aa, Oryza sativa
  Clone ID: PAT_MRT4530_1455C.1.pep
MLSLLDIGPNQCTILIPRTEAYKLQCIKECCRKAKGLTCPYGNNNARHIHLDSELMRGGRPRLHDVCMSLGSWQRTTATYLPRKRLSWSGDERATNEQILSTQLIYSLLARCCLLRRHRELWNIRVRTPMGQCFNRISLRPMGGTSQVREVIGVPVIFENRLSMLRSTTLSKRGNNSKAEYNQRTQQATLMMQTCKGIQGRVSPPPPAGNGHPPYATVNPQADQPNTPADPTPSCSPLAENVSQRKAILQVRQLPIPACGKRCKSSRVSREPEKGHADVSKGPDGTDMQAPHVSGSRGGHTVDTVHHGRGGIVDRDHGSGPRAATGKAARAWARPRPARPSGGERRRRPGRTATSDGGAAHGGQRRGDRGRGRGGAGMVFIGLGGGDSGREGRIRGGNWWEVGRRRGGNGGRISRGKWGKLTREEEVGGDRIVCARGSYTGTGGAAMWSGFGDYGGWSRRSKPMQLNPKARTRRNKTKAKRWRYAEIVLNSDSDFSRFLLCSRINLRLRLHLDLISFSNADITKFGR

SEQ ID NO: 110501 - protein, 64 aa, Oryza sativa
  Clone ID: PAT_MRT4530_14560C.1.pep
MERIENGGRKIHGGDRQQGGKRGGGWEPRSYKDGDRALAGDYSRSGGHLDARASYFGLMKMGNG

SEQ ID NO: 110502 - protein, 186 aa, Oryza sativa
  unsure (1)..(186): unsure at all Xaa locations
  Clone ID: PAT_MRT4530_14561C.1.pep
PVWQEKPPFYIVHRTKKNEEEKGTELQIDYYSHYTSGASCSTAGPGNASAAAKFGGIATSEPWKGSTPCAGTRPPSFPPLNGAPSCARPPGDIGDIADASASDFAGTCGGTGPADPGAGTATGPGPVEAGPAPGCSGRTSKPDLGRGLRAGPXPWVIASAPAATWAXAAXYGSGSXSCCGXLLSDQ

SEQ ID NO: 110503 - protein, 68 aa, Oryza sativa
  Clone ID: PAT_MRT4530_14562C.1.pep
FLFVFFFFFFFFFFFFFFFFFGEKNKDSNIAFLNNNLSKLQKGPLPFTNPPLNFKQILKTMPSPNYIT

SEQ ID NO: 110504 - protein, 58 aa, Oryza sativa
  Clone ID: PAT_MRT4530_14563C.1.pep
MASPRIATAILAHASSSTVASGRGHAILAHASSCPTVATRQQPPVITAMPCCFRQRGK

SEQ ID NO: 110505 - protein, 96 aa, Oryza sativa
  Clone ID: PAT_MRT4530_14564C.1.pep
SLLERHLGLQPGVPARNTAVEPATVALRLLIERHGRRRGAPCCPPPSRRSRRARPTSKALGCELQPAVKQLPRGGDGTSFCSHKKTNAFDPVAWRV

SEQ ID NO: 110506 - protein, 52 aa, Oryza sativa
  unsure (1)..(52): unsure at all Xaa locations
  Clone ID: PAT_MRT4530_14566C.1.pep
QVLPPFHNVKLYSIAHIHLDVNKSRHIHMHRFINIXINVGNARKSYIMKRRE

SEQ ID NO: 110507 - protein, 135 aa, Oryza sativa
  Clone ID: PAT_MRT4530_14567C.1.pep
MALSLSTSFLPTQAAAAATRTTLRSLVPSQRMRCSMRKKGLHPEIYEDAKVYCNGELVLVTGGTKPEYTVDVWSGNHPYYVGDTSAMVVMDSQIEKFRKKWGHIKEYWPEDQWREMHPDGDPEFDPEEEGSAGAS

SEQ ID NO: 110508 - protein, 2157 aa, Oryza sativa
  Clone ID: PAT_MRT4530_14568C.1.pep
MSDLGGKNGENGNEDGASSKETPSPKGATIPFGYRKHTIPPHNFVSVPSGRAPQFDGTHYAAWKHKMKLHLISLYLSIWKVVCKGVDVPHDDMELTSEQEQLIHRNAQASNAILSALSPEEFNKVDGLEEAKEIWDTLQLAHEGSPAVREAKIDLLEGRLGRFVMDDKETPQEKYDRTMILVNKIKGLGSEDMTNHFVLKRLLRALGPRNPTLVSMIRERKDFKRLTPSDILGRIVSHEMQEEEARERFKHFLRNSGYGKGRKDDDKGKRQSKRACFNCGEYGHFVANCPKSNEAKAKGGKKKPEHAHVAEAHMAEVFYSGDEEDPEVKPKPKPKDKVEGEGGVATVAFKSSSSSKKRLFNNLSDDDDDFYHYSCFMAQGRKVMTQKRSHTSLDVDSSDEESDNELDDVLKSFRKPAMQHLAKLMRALDSKEQSLERQEELLILEKKRNLALEESLAKECAKNEQLANELNLANGSLASLSDVNETLQEKFASLDKSHKDLEVQFDTLWNSTSQPNVVSNSSNPSTSNGCARCYNIDLNSHTTNVDAMQALKKENERLGTLVKYGCMKTYHSKDALYKTINHLNMDGHGLGFSGGSPVSKRVMAYSSGGSSWVVDSGCTNHMTGERSMFTSLDEGAGSRENIVFGDDGKGKVMDLGKIAISKNQSLSNVLLVNSLRVNPEACLIAKSSMGWLWHRRLAHVGMRNLASLLKGEHILGLYNVSFEKDCVCSACQAGKQVGSPHPIKNIMTTTRPLELLHMDLFGPVAYISIGGNKYGFVIVDDFSRFTWVYFLHDKSEDQDVFKRFAKQAQNLYDLTIKRVQSDNGGEFKNTQMEEFLDEEGIKHEFSAPYDPPQNGIVERKNRTLIEATRAMLDEYKTSNVFWAEAVSTACHAINRLYLHKILKKTSYELLSGKKPNVSYFRVFGSKCFILSKRPRSSKFSPKVDEGFLLSYESNAHAYCVFNKTSGIVEVTRDVTFDESNGSQGEQVVVHVVGGVDPNQAIGTKAIGDIRPVETQDDQEDRDQPPSPASNSPTSVVSAESEIPGPIDRNLRTSLGPEVPGSIVRNLWISGSEDMPTAQVDGIDAEGTLEHSDQAQVPPVHHPRIHHTVQREHPVDNILGDIRKGVTTRSRITSFCQHFSFVSSLEPTRVEDVLGDPDWVMAMQEELNNFTRNQVWTLVERPKQNVIATKWIFRNKQDEHGVVVRNKARLFQMDVKSAFLNGPISELVYVEQPPGFEDPKLPNHVYKLHKALYGLKQAPRAWYECLRDFLLKNGFEIGKADTTIFTKKFKSDSFICQIYVDDIIFGSTNASFCEEFSSIMTKRFEMSMMGELTFFLGLQVKQAQEGTFISQTKYVKDILKKFGMEDAKPIKTPMPTNGHLDLDHNGKCVDQKVYRSMIGSLLYLCASRLDIMLSVCMCARFQAEPKECHLIAVKRILRYLVHTPNLGLWYPKGCGFELLGYSDSDYAGCKVDRKSTTGTCQFLGWSLVSWSSKKQNSIALSTAEAEYVAADSCCAQLLWMRQTLKDFGYNFTKIPLLCDNESAIKIANNPVQHSRTKHIDIRHHFLRDHETKGDICLTHVTTESQLADIFTKPLDEKRFCELRSELNILDSRNIRLEVPVTPVRNFRGSGGINTQGEPEPVVIMPREKRQKLSQDIPADSSPPIPIHSRRAGSIVIRDAPRSPSPTASESDDGGNEDEPGSESNPLRLYKTRAVDPDPKRPRVNYLKNLLKCGKDRMVSPDTLPADSQDDRFRTLVQVDWYNSVIMGRSHPVVEMKWLDWKYMSSKNNIVFNEVRKVCEHKHAADLLALQYSWNEEVIGQFYSTAFFGTTKKGLDFVKWTIQGQQYRVSMAQFVAALGLDDDDLSRPHIFVEDALSPTSTTFMYEKDAPKDCLGTTRGLHPYYRVLYSIFRWSLLPKVGDATALPGRHALLLSRMRYNKPDFSIMKLIWSEIYETVCEPKRGCIYAPYIMKMIEAKTGICYFKDNQYKPFRPHAPTTSATPTTRVTSASTSAAPSFSAAPQRSESSSPIKKALKAIFCMCAKTAKKVKKIERRQKEDWIAVGKDVSDISDDEEFVDPFAAYETAQDIGSGEGPSGTSRFFNEESCHSEESSDDEESDAPTENVPTDPDEAVDAAGQDIDSPHSGDTEIIPSDGDIDEA

SEQ ID NO: 110509 - protein, 164 aa, Oryza sativa
  Clone ID: PAT_MRT4530_14569C.1.pep
MLRIFLFDATLFHPLQRRERCRVIADSGASTECHRRFSVVAPVTVDQTKPSLRASIFSSASSSKAPKNLQEPSLEQAERTLSSPAPTTVSISDSVPPMSQEMKRRRPPTSYYACCCWIGISGMGVNDECPASTTVVASQRCLAAAASNRSCRRCQKKARAKEAV

SEQ ID NO: 110510 - protein, 74 aa, Oryza sativa
  Clone ID: PAT_MRT4530_1456C.1.pep
MAAVVVAQPSVVSATEGVAGTVCSVTSRYGETSYRGGVRTAAEMRDLNGVGDGDYRVLLDASGAKLFADSMHTA

SEQ ID NO: 110511 - protein, 1450 aa, Oryza sativa
  Clone ID: PAT_MRT4530_14570C.1.pep
MELTSEQEQLIYRNAQASNAILSALNPEEFNKVDGLEEAKEIWDTLQLAHEGCPAVREAKIELLEGRLGRFVMDDKETAQEMKDFKRLTPSDILGRIVSHEMQEEEAREVRQMMKNAAMIKNQEVALKAKQEEESSCEESEDEEMAFIVKRFKHFLYKSGYGKGRKDDDKGKRQSKRACFNCGEYGHFIADCPKSNEANAKGGKKKPERAHVAEAHMAEVWYFGDEEDPEVKPKPKSKDKVEGEGGVATVAFKSSSSSKERLFNNLSDDDDDSYHYSCFMAQGRKVMTQKPSQTSLDVDSSDEESDNELDDVLKSFSKPAMQHLAKLMRALDSKEQSLERQEELLILEKKRNLVLEESLAKECAKNKQLANELNLANGSLASLRDVNETLQEKFANLDKSHKDLEVQFDTLWNSTSQPNVVSNSSNPSTSNALKKENEKLCTLVKYGCIKTYHSKDALYKTITAHPNKDGHGFGFSGRSPVSKRVMVNGKECLMFVREGKAPQASEVTGLVSCQGPGTSGQTGRNLRVGVSVSQKFPPESSGRFAKKFRANGRAQDMTGSSGHNARRFRPDGLYYDSYVISKNLEGKVGAYFNGNYNDEYRTCVWVPKALAYSSGGSSWVVDSGCTNHMTGERSMFTSLDEENGTRENIVFGDDGKGKLQFIIRFSIMDDSSVAFKGKLKGDLYLVDFDVDRVNPEACLIAKSSMGWLWHHRLAHVGMQNLATLLKGEHILGLTNVTFEKDRVCSACQAGKQVGNPHPIKNIMTTTRPLELLHMDLFGPVAYISIGGNKYVFVIVDDFSRFTWVYFLHDKSKAQDVFKRFAKQAQNLYDLTIKRVRSDNGGEFKNTQVEEFLDEEGIKHEFSAPYDPPQNGIVERKNRTLIEAARAMLDEYKTSDVFWAEAVSTACHAINRLYLHKILKKTSYELLSGKKPNVSYFRVFGSKCFILSKRPCSSKFSPKVDEGFLLGYESNAHAYRVFNKTSGIVEVTRDVIFDESNGSQGEQVVVHVVGDVDPSQAIGTKAIGDIRPVETQDDQEDRDQPPSSTSNSPTSVVSAEPEVPGPIDRNLRTSPGPEVPGSTVRNLRTSGSEDVPTAQVDGIDAAGTLEVEDELGDPDWVMAMQEELNNFIRNQVWTLVERPDQNVIGTKWIFRNKQDEHGVVVRNKARLYQMDVKSAFLNGPISELVFVEQPPGFEDPKLPNHVYKLHKALYGLKQAPRAWYECLRDFLLKNGFEIGKADTTLFTKKFENNLFICQIYVDDIIFGSTNASFCEEFSSIMTKRFEMSMMGELTFFLGLQVKQAQEGTFISQTKYVKDIVKKFGMEDAKPIKTPMPTNGHLDLDENGKCVDQKVYRSIIGSLLYLCASRPDIMLSVCMCARFQAEPKECHLIAVKRILRYLVHTPNLGLWYPKGCDFELLGYSDSDYAGCKVDRKSTTGTCQFLGRSLVSWSSKK

SEQ ID NO: 110512 - protein, 163 aa, Oryza sativa
  Clone ID: PAT_MRT4530_14571C.1.pep
MGYVEDDKGYIEDDKGYVEEESAHAQPAAVYANKKMVYAAKAQLTRLVRPSQSRDGLHGIHDCGSVIAQFDGSESRKLRIVLTLTTWSQPTLAGIKLVIPNRGSAISQCDGSESRRLRIVLTLTTWSHPTLASIKLVILLLLAASYPLVFRFTLALSVLNLLP

SEQ ID NO: 110513 - protein, 616 aa, Oryza sativa
  unsure (1)..(616): unsure at all Xaa locations
  Clone ID: PAT_MRT4530_14572C.1.pep
MLDLGGKDGEIGNEDGASSKGTPSPKGATIPFDYRKLTIPSHNFVSVPSGRAPQFDGTHYAAWKHKMKLHLISLHPSIWKVVCTGIDVPHEDMELTSEKEQLIHRNAQASNAILSALSPEEFDKVDGLEEAKEIXDTLQLAHEGSPAVREAKIELLEGRLGRFVMDDNETPQEMYDRMMILVNKIKGLGSEDMTNHFVVKRLLRAFGPRNPTLVSMIHERKDFKRLTPSDILGRIVSHKMQEEEAREVRQMVKNAAMIKNQEVALKAKQEEMAFIVKRFKHFLRKSGYGKGRKVDDKGKRQSKRACFNCGEFGHFIADCPKSNEAKAKGGKKKLERAHVAEAHMAEVWYSGDEEDPEVKPKPKSKDKVEGEGGVATVTFKSSSSSKERLFNNLSDDDDDSYHYSCFMAQGRKVMTQKPSHTSLDVESSDEESDNELDDVLKSFSKPAMQHLAKLMRALDSTEQLLVRQEELLILEKKRNLALEESLAKESAKNKQLANELNFANGSLASLRDVNETLQEKFACLDKSHKVQIDTLWNSTSQPNVVSNSSNPSTSNGCARCYNIDLNSYATNIVEMQALKKENERLGTLVKYGCMKTYHSKDALYKTITAHPNKDGH

SEQ ID NO: 110514 - protein, 58 aa, Oryza sativa
  Clone ID: PAT_MRT4530_14573C.1.pep
QGPGGVLREATAGCRAACGAYPTDAPEGFSTCVDVWNGIEASAARMTVGCFDTGVLFL

SEQ ID NO: 110515 - protein, 659 aa, Oryza sativa
  Clone ID: PAT_MRT4530_14574C.1.pep
MSDLGGKNGENGNEDGASSKGTPSPKGATIPFDYSKLTIPPHNFVSVPSGRAPQFDGTHYAAWKHKMKLHLISLHPSIWKVVCTGVDVPHDDMKLTLEQEQLIHRNAQASNANSLRLESGGVQQEEAHEVRQMVKNAAMIKNQEVALKAKQEEESSCEESEDEEMAFIVKRFKHFIRKSGYGKGRNDDDKGKRQSKRAWFNCGEYGHFIADCPKSNKAKAKGGKKKPERAHVAEAHMAEVWYSGDEEDLEVKPKPKPKDKVEGECGVATVAFKSSSSSKECLFNNLSDDDDDSYHYSCFMAQGRKVMTQKPSHTSLDVDSNDEESDNELDDVLKSFSKPAMQHLAKLMRALDSKEQSLERQEELLILEKKRNLALEESLAKECAKNEQLANELNLANGSLASLRDANETLQEKFASLDKSHKDLEVQFDTLWNNTSQPNVVSNSSNPSTSNGCARCYNIDLNSHATNVDAMQALKKENKRLGTLVKYGCMKTYHSKDALYKTITAHPNKDGHGLGFSGGSPVSKHVMVNVKECLMFVREGKAPQASEVTCPLTGQTPGSSGQNDRKFLPCKTGSSRKFRASDRPKGLTGSSGYNARKFRPEGLYYDLYVISKNSEGKVVAYFNGNYNDEYRTCVWVPKGLVTNIKGPKLRQVWVPKSQA

SEQ ID NO: 110516 - protein, 89 aa, Oryza sativa
  Clone ID: PAT_MRT4530_14575C.1.pep
NTRIGKYTEKHRNNCLIGPQEKRKNRMREIDSKEFFQEANMTCLQLYSEIFRNHEHWNRWITIHTKARPAAAAAGLCLVSFDTIIHSRT

SEQ ID NO: 110517 - protein, 583 aa, Oryza sativa
  Clone ID: PAT_MRT4530_14576C.1.pep
MGWLWHHRLAHVGMQNLATLLKGEHILGLTNVTFEKDRVCSACQAGKQVGNPHPIKNIMTTTRPLELLHMDLFGPVAYISIGGNKYVFVIVDDFSRFTWVYFLHDKSKAQDVFKRFAKQAQNLYDLTIKRVRSDNGGEFKNTQVEEFLDEEGIKHEFSAPYDPPQNGIVERKNRTLIEAARAMLDEYKTSDVFWAEAVSTACHAINRLYLHKILKKTSYELLSGKKPNVSYFRVFGSKCFILSKRPCSSKFSPKVDEGFLLGYESNAHAYRVFNKTSGIVEVTRDVIFDESNGSQGEQVVVHVVGDVDPSQAIGTKAIGDIRPVETQDDQEDRDQPPSSTSNSPTSVVSAEPEVPGPIDRNLRTSPGPEVPGSTVRNLRTSGSEDVPTAQVDGIDAAGTLEVEDELGDPDWVMAMQEELNNFIRNQVWTLVERPDQNVIGTKWIFRNKQDEHGVVVRNKARLYQMDVKSAFLNGPISELVFVEQPPGFEDPKLPNHVYKLHKALYGLKQAPRAWFEMSMMGELTFFLGLQVKQAQEGTFISQTKYVKDIVKKFGMEDAKPIKTPMPTNGHLDLDENGKCVDQK

SEQ ID NO: 110518 - protein, 548 aa, Oryza sativa
  Clone ID: PAT_MRT4530_14577C.1.pep
MSALGGKDGKIGNEDGASSKGTPSPKVATIPFDYSKLTIPSHNFVSVPSGRAPQFDGTHYAAWKHKMKLHIISLHPSIWKVVCTGIDVPYEDMELTSEQEQLIHHNAQASNAILSALSPEEFNKVDGLEEAKEIWDTLQLAHEGSPAVREAKIELLEGRLGRFVMDDKETPQEMYDRMMILVNKIKELGSEDMTNHFVVKRFLRAFGLRNPTLVSMIWERKDFKRLTPSDILGRIVSHEMQEEEAREAKQEEESSGEESEDEEMAFIVKRFKHFLRKSGYGKGRKDDDKGKRQSKIACFNCGEFGHFIADCPKSNEAKAKGGKKKPERAHVAEAHMAEVWSSGDEEDPEVKPKPKSKDKVEGEGGVATVAFKSSSSSKERLFNNLSDDDNDSYHYSCFMAQGRKVMTQKPSHTSLDVYSSNEESDNELDDVLKSFSKPAMQHLAKLMRALDSKEQLLERQEELLILEKKRNLALEESLAKECAKNEQLANELNLANGSLASLRDVNETLQEKFACLDKSHKDLEVQFDTLWNSTSQPNVVMLGVTILI

SEQ ID NO: 110519 - protein, 246 aa, Oryza sativa
  Clone ID: PAT_MRT4530_14578C.1.pep
MDLLGVSYVSNPRGLVSKVAKHVYKLHKALYGLKQAPRAWYECLRDFLLKNGFEIGKADTTLFTKKFKSDLYICQIYVDDIIFGSTNASFCEEFSSIMTKRFEMSMMGKLTFFLGLQVKQAQEGTFISQTKYVKDILKKFGMEDAKPIKTPMPTNGHLDLDDNGKCVDQKVYRSMIGSLLYLCASRPDIMLSVCMCARFQVEPKECHLIVVKRILRYLVHTPNHGLCYSKGCGFELLGYFESDIAG

SEQ ID NO: 110520 - protein, 1078 aa, Oryza sativa
  Clone ID: PAT_MRT4530_14579C.1.pep
MAEVWYSEDEEASEAKPKPKPKDKVEGEGGVATVAFKSSSSSKERLFNNLSDDNDDSYQYSCFMAQGRKAYSSGGSSWVVDSGCTNHMTGERSMFTSLDEENKTHENIVFGDDGKGKGEHILGLTNVTFEKDRVCSAFQAGKQVGNLHPIKNIMTTTRPLELLHMDLFGPVAYISEAQDVFKRFAKQAQNLYDLTIKRVRSDNGREFKNTQVEEFLDEEGIKHEFSAPYDPPQNGIVERKNQTLIEAARAMLDEYKTSDIFWAEAVSTACHAINRLYLHKILKKTSYELLSVTRDVTFDESNGSQGEQVVVHVSRRRMTKKIGTNLRHRHPIALHQVKSLLTRKFRDQMIGTSGPLQARKFRVHLPGISGQRTVKACLRHKVEDALGDPDWVMAMQEELNNFTRNQVWTLVERPDQNVIGIKWIFRNKQDEHGVVVRNKARLVAQGFTQVEGLDFDVKSAFLNGPISELVYVEQPPGFEDPKLPNHVYKLHKALYGLKQAPRAWFEMSMMGELTFFLGLQVKQAQEGTFISQTKYVKDILKKFMMEDAKPIKTPMPTNSHLDLDDNGRKFRASLSGTSGDESPPIRFPRGRLGKEKVVEGGSGSGTRTSPRFTRQSNNRPVHIRDVDSGQGSDAPNTRGCGRGGGHSCGAGRASHDFPIGSRENPVRLYKSLGFDTTPMHHIGRPKSNYLHQLAKCRRDRLIDPETQPEESQDPRFRTFTQLDWYNSVIIARDNPMVEMKWIDWTYIRKKNNEVFNQAMQVCHNKNLGDILALEYDWNEEVIAQFYATALFGTTRKGTPYVKWMTEGVRHKISIAQFAKILGLEDEDLNSPNIHSEAPLPMIKTKFMYTKDAPRTCMGTTHGLHSNYKVLYSIFRWSLLPKVGDATALPSKHAHLLSRMRYNQPPFSVMKFIWYEIANTILEPKRGCIYAPFIMKMIETVTGVFYIKDGRHNPFHPRVPPSSYPVIPRSIPSTSAGPSSSAPPQSSSSSPIKKALQAIFYEVYVDPFEAYEAARNVAGEGPSTYFNEESSRSDDDEEEDDAEAAAENAPTDVDTAAQSDESHLSGDTEIVPSDGNEDE

SEQ ID NO: 110521 - protein, 109 aa, Oryza sativa
  unsure (1)..(109): unsure at all Xaa locations
  Clone ID: PAT_MRT4530_1457C.1.pep
IQLNMKARTRRNKTKAKGWRCAEIVLNVTLSTCGNHLEAYQLNPMLYTKSYCRNPLHRLTXSDSDPANPXIVADLDSSRFLLCSRIDLXLRLHFDIIFFSDAYITKFGR

SEQ ID NO: 110522 - protein, 132 aa, Oryza sativa
  Clone ID: PAT_MRT4530_14580C.1.pep
MPSANDDSLADTTTRRNAENFLAILLKVVSSPEVAGIDASGVANGGGLRSNGKDSPAVVDNVGFTATARLGGGMLREGAWMWIKRDGVKRRFARHDVGSMERERFGDGDDSSATASVVFFATDDENVGDGEA

SEQ ID NO: 110523 - protein, 2049 aa, Oryza sativa
  Clone ID: PAT_MRT4530_14581C.1.pep
MLDLGGKDGEIGNEDGASSKGTPSPKGATIPFDYRKLTIPSHNFVSVPSGRAPQFDGTHYAAWKHKMKLHLISLHPSIWKVVCTGIDVPHEDMELTSEKEQLIHRNAQASNAILSALSPEEFDKGSPAVREAKIELLEGRLGRFVMDDNETPQEMYDRMMILVNKIKGLGSEDMTNHFVVKRLLRAFGPRNPTLVSMIQERKDFKRLTPSDILGRIVSHKMQEEEAREVRQMVKNAAMIKNQEVALKAKQEEESSGEESEDEEMAFIVKRFKHFLRKSGYGKGRKVDDKGKRQSKRACFNCGEFGHFIADCPKSNEAKAKGGKKKLERAHVAEAHMAEVWYSGDEEDPEVKPKPKSKDKVEGEGGVATVTFKSSSSSKERLFNNLSDDDDDSYHYSCFMAQGRKVMTQKPSHTSLDVESSDEESDNELDDVLKSFSKPAMQHLAKLMRALDSTEQLLVRQEELLILEKKRNLALEESLAKESAKNKQLANELNFANGSLASLRDVNETLQEKFACLDKSHKVQIDTLWNSTSQPNVVSNSSNPSTSNGCARCYNIDLNSYATNIVAMQALKKENERLGTLVKYGCMKTYHSKDALYKTITAHPNKDGHGLGFSGGSPVSKRVMVNGKECLMFVREGKAPQASEVTNLVSSQGPGTSGQTGQNLRVGVSVSQKFPPGSSGQFARKFRANGRAQDITGSSEHNARRFWPDGLYYDSYVIFKNSEGKVVAYFNGNYNDEYRTCVWVPKALAYSSGGSSWVVDSGCTNHMTGERSMFTSLDEENGTRENIVFGDDGKGKLGYNCLFTDEDVTVFRRDDSSVAFKGKLKGDLYLVDFDVDRVNPEACLIAKSSMGWLWHRRLAHVGMRNLATLLKGEHILRLTNVTFEKDRVCSACQAGKQVGNPHPIKNIMTTTRPLELLHMDLFGPMVYISIGGNKYDFFIVDDFSRFTWVYFLHDKSEAQDVFKRFAKQAQNLYDLTIKRVRSDNGGEFKNTQVEEFLDEVGIKHEFSAPYDPPQNGIVERKNRTLIEAARSMLDEYKTSDIFWAEAVSTACHAINRLYLHKILKKTSYELLSGKKPNVSYFRVFGSKCFILSKRPRSSKFSPKVDEGFLLGYESNAHAYRVFNKTSGIVEVTRDVTFDESNGFQGEQVVVHVVSDVDPSQAIGTKAIGDIRPVETQDDQEDRDQPSSSTSNSPKLSQVSVDPEVPGPDGRNLRTSPGQEVPGPSARKFRAEDSQGVPMAQVDGIDAEGTVEHPDQAQVPSVHHPRIHHTVQRDHPVDNILGDIRKGVTTRSRVASFCQHYSFVSSLESTRVEDALGDPDWVMAMLFQMDVKSAFLNGPISELVFVEQPPGFEDPKLPNHVYKLHKALYGLKQAPRAWYECLRDFLLKNGFEIGKADTTLFTKKFKSDLFICQIYVDDIIFGSTNASFCEEFSSIMTKRFEMSMMGELTFFLGLQVKQAQEGTFISQTKYVKDILKKFGMEDAKPIKTPMPTNGHLDLDDNGKCVDQKDVSGDESPPIRFPRGRLGKEKVVEGGSGSGTRTSPRFRRQTSNRPVQIRDVDSGQGSDAPSSRGRGRGGGRSSGAGRASHDFPVGSRENLVRLYKTIGFDTTPMHHIGRPKSNYLHQLAKCRRGRLIDPETQPEESQDPRFRTLTQLDWYNSVIMARDNLVVEMKWIDWTYMRKKNNEVFNQAMQVCHNKNLGDILALEYDWNEEVIAQFYATAFFGSTRKGTPYVKWMTEGVRHKISIAQFAEILGLEDEDLNRPNIHSEAPLPLIKTKFMYTKNAPRTCMGPTHGLHPNYKVLYSIFRWSLLPKVGDATALPSKHAHLLSRMRYNQPPFSVKLIWYEIANTILEPKRGCIYAPFIMKMIESVTGVFYIKDGRHNPFRPRVPPSSSSVAPRSIPSTSAGPSSSAPPPSSSSSPIKKALQAIFCMCAKTAKKVKKIERRQKEDRREAGKEVSDDSEDEVYVDPFEAYEAARNVAGEGPSTYFNEESSQSDDDDDDDDDEDDIDAAAEYVPTDVEEAVDTAAQSDESHLSGDTEIVPSDGDGDE

SEQ ID NO: 110524 - protein, 103 aa, Oryza sativa
  Clone ID: PAT_MRT4530_14582C.1.pep
ARGGVLLVVGTEDGKGHNLLGAGNNLQILVQPVVLNQLTGTRKMTNRSNKTTKQVSRVLGSACESSCILLLVFVGLCINRTTESYKFCCKMGSPYSIFPFFSL

SEQ ID NO: 110525 - protein, 78 aa, Oryza sativa
  Clone ID: PAT_MRT4530_14583C.1.pep
PLFRLHLSFSLPLSISTLACYCPLLFISPSPSLSLWTLCFVLLSYLSSLSLSQLSVKWYMLEIFWGSSSDSSARDPLF

SEQ ID NO: 110526 - protein, 458 aa, Oryza sativa
  Clone ID: PAT_MRT4530_14584C.1.pep
ALPWQARPAAGAGGCPSGSGASTHAHYLFDETPLRRARLPARAMEAPPVKSGWRVMAPAHAGGREDRLSDLPEGVLHRVMSFLDSRQAVRTCVLSRRWRDVWRTVPRVHADFCDFTLNWTSDDDEVDEAAVAEDEVVFNRFVNRLLELRDPNASIRSFFLRFCRSDGGDDGSAEGNRWISYALQKNVRILEVSVLSYALELDHSVFSSRYLRTMDFSNVVMNQGFFKQLEMGCPELEELFLDECFIVDDEISSQTLKVLTLDATHFCCGFKTSISSPSITSLALHYPMSGKPVLNDMEALVSTSMLLCHVKDDDFAANDLRDYLWSLYNVEILDFSYHGKKLTMENNLQLCPKFINLVSLTLGPWCLDANFYGLIVFLQNSPILEKLTLELAMYRTGKLQRIIGQIEERSFTCEHLTSVEVICLEDDPLVNDVVNFFVNSGMSSVQIHIKQWSQSEYE

SEQ ID NO: 110527 - protein, 194 aa, Oryza sativa
  Clone ID: PAT_MRT4530_14585C.1.pep
LRHLRLAHVGMRNLATLLKGEHILRLTNVTFEKDRLCSACQAGKQVGNPHPIKNIMTTTRPLELFRMDLFGPVAYISIGGNKYGFVIVDDFSRFTWVYFLHDKSEAQDVFKHFAKQAQNLYDFTIKRVRSDNGGEFKNTQVEEFLDEEGIKHEFSAPYDPPQNGIVERKNRTLIEAARAMLDEYKTSDIFWAEA

SEQ ID NO: 110528 - protein, 344 aa, Oryza sativa
  unsure (1)..(344): unsure at all Xaa locations
  Clone ID: PAT_MRT4530_14586C.1.pep
TIIVKTKQIGSALNRKVYLRTQLIRKTTGTRRRGATAARPGAAAAAAPPRGGQTGRRTRPGGGRGRRRWRRRRGLAGVAARGPWRRGLGFGRRGVEERGEASSSLXFIAECPNGHRPAPSADMACHGSAYVSVGTHMEKAAAAAEFAGRRSFTTMPLANGDSSADTTTRRNAEDFLAILLKVVSSPEVAGIDASGVASGGGLQSLGAHWNLIAAWRGLGNSGNGKDSPAVVDNVGFTATARLSGGMLREGDDFGAMAWLEMDHVGRNSDDIMAAAPGASSGALVGKVAFPLLQWIKRDGVKMRFARHDVGSLERERFDDGDDSSATASVIFFAIDDENVGDGEA

SEQ ID NO: 110529 - protein, 118 aa, Oryza sativa
  Clone ID: PAT_MRT4530_14587C.1.pep
MAAATTSSRPLGMGMDGGGGGRRADVDGGHGDPPAPEGVRRSSFLEFAAPSSLSRTVAASTFCIAASSSSPAAAASIRTRRGGRPGNGRGCGGALGVGGQRGDGRWAATRTARPCLAR

SEQ ID NO: 110530 - protein, 469 aa, Oryza sativa
  Clone ID: PAT_MRT4530_14588C.1.pep
MGNCASAIDSFFFTKRANNENDDDDAAPGMSASKRTTSSTTTGKLSTLSNSTFIPSTISGVSTDDAYPDGQILESRNLRIFTFAELKNATKNFRTDTVLGEGGFGKVYKGWVDERTMNPSKSSTGVVVAVKKLNPESVQGTEQWESEVNFLGRISHPNLVKLLGYCKDNDELLLVYEFMAKGSLENHLFRRGAVYEPLPWSLRLKILIGAARGLAFLHSSERQIIYRDFKASNILLDSNFNAKLSDFGLAKHGPDGGLSHVTTRVMGTYGYAAPEYVATGHLYVKSDVYGFGVVLLEMLSGLRALDPSRPSGKLNLVDWAKPLLADRRKLSQLMDSRLEGQYHSRGALQAAQLTLKCLSGDPKSRPSMKEVVEALEKIKLIKSKSREPRNSSSLFYTSDEIQCRSFKNNEIQCSAMKKEEFANPCQGREKCFFFGYIFIGRTLIDTVYKNIDIFGVVKIANCSKSLDRK

SEQ ID NO: 110531 - protein, 75 aa, Oryza sativa
  Clone ID: PAT_MRT4530_14589C.1.pep
MASSSLPLHLSTTVQRSDLADDRLPLLGAKGSMSPPSPAPSLMGVFAFTDRLASTADWCFCLYDWRTPPLLMGFI

SEQ ID NO: 110532 - protein, 290 aa, Oryza sativa
  Clone ID: PAT_MRT4530_1458C.1.pep
MDTTTTMAPLPLLTTTSLLLFFFLASSFAADVVVAGGGGGGGGYDGGGDGEGGGGGDGEGGGGGGGAKMPHVNHGRYKCGPWVDGHATFYGGRDASGTTEGGACGYKDADGYGAMTAAVSPALFDNGAGCGACYELKGDSGKTVVVTATNQAPPPVNGMKGEHFDLTMPAFLSIAEEKLGVVPVSYRKVACVRQGGIKYTITGNPSYNMVMVKNVGGAGDVVKLTVKGTKRVKWTPLQRSWGQLWKTEANLTGESLTFRVMTGDHRKATSWRVAPRDWTYDNTYQAKKNF

SEQ ID NO: 110533 - protein, 39 aa, Oryza sativa
  Clone ID: PAT_MRT4530_14590C.1.pep
TYLTTRWDGILKLLESQLVPSNRGAASTGSYLKMKGDYY

SEQ ID NO: 110534 - protein, 83 aa, Oryza sativa
  Clone ID: PAT_MRT4530_14591C.1.pep
MAAPSLDMDMDMAAHVLGEEEASHEQIVMEHREFREAEGEETGLFGKSAFAALKAATIEICYLPLKAASRNTPSWTDSARRDL

SEQ ID NO: 110535 - protein, 61 aa, Oryza sativa
  Clone ID: PAT_MRT4530_14592C.1.pep
MAWPQLACQITGSSPPNLTCQSLPRDGRNGVILLLLAGGGCGRGCLVVGSPASSGTLAISA

SEQ ID NO: 110536 - protein, 462 aa, Oryza sativa
  Clone ID: PAT_MRT4530_14593C.1.pep
MSSSSSSSAAAAHKAGAWYAVPDLSLRDHRFAVPLDHSSPSPSAPTITVFAREVVAAGKEDLPLPYLLFLQGGPGFESPRPTEASGWMKKACEEYRVVLLDQRGTGLSTPLTTSSLSQITSAAEQVEYLKHFRADSIVKDAEFIRLHLVPDAKPWTVLGQSYGGFCAVTYLSFAPEGLKSVLLTGGLPPLGSACTADTVYRACFKQVQQQNEKYYARYPQDIQVIHELVRYLNESEGGGVSLPSGGRLTPKMLQCLGLSGLGSGGGFERLHYLFERVWDPILVPGAKKTISYYFLKEFERWLGFDQNPLYALLHESIYCQGSPSKWSAHKIGSECESLFDPIKAIKEGRPVYFTGEMVFPCIFDEIHALRPLKETAHMLAHKEDWPPLYDVNVLNNNKVPVAAAVYYEDMYVNFNIAKETASQIAGIRLWITNEYMHSGIRDGGSHVFDHLMGLLNGKKPLF

SEQ ID NO: 110537 - protein, 73 aa, Oryza sativa
  Clone ID: PAT_MRT4530_14594C.1.pep
ACTMIEFGKLVSVKKFSHEFQSFVQSHPEVPMHMRKLADANINRVATAMFFTSLALTGAGFYKLIFNKGKVQH

SEQ ID NO: 110538 - protein, 237 aa, Oryza sativa
  Clone ID: PAT_MRT4530_14595C.1.pep
MIDRYPLCHQVFSMVSMKKIINSNIRPDLTEKISSSIVWVRDYLREVEGGSRLFEMGRRRKVKQREETELGAISKLRGRTTRLRILTYADNVVIFINPTQGDVKAFADILDRFVTNLQKSSVAAIRCDSIDLTGVLDGVPAMRANFPLKYLGLPLVRGRLRKMNLQPVFDKISGRVAGGEKTWVSWENHARQICAFDTTNLPPFSHAKIDLHFHMWLLKRYACKNRFSHADLLSGCM

SEQ ID NO: 110539 - protein, 1109 aa, Oryza sativa
  Clone ID: PAT_MRT4530_14596C.1.pep
MELGACTDELLDIIKPLCIIIYTLVTVCGYKSVIKFFPHQVSDLEPAVALLEECHKMSSATALRQESTGEMETKCVVLLWLYILVLIPFDISSVDTSIATADHVDGPETVPLVTRILDICKDYLCSSGPMRRMSGLLLARLLTRPDMPKVFSSFMEWAQRILLSVTDDFVDQFRSIGIVEALASIFKIGNRKVLCDAVSGIWNDCSVVMKTNIASRSSLLRKFLVKLAQRVALISLPPRSPSWRYQSISSSLGANLSTSTDGTGTSSGSTKQVNIDQTDTSSLEEDMDVPEIVEEIIDLLLTGLRDSDTIVRWSAAKGVGRITARLTPALSEEVLSSILQLFSPGEGDGSWHGGCLALAELARRGLLLPSSFPDVIPVIIKVNCRRAASAAFQENVGRQGNFPHGIDIVNAADYFALASRSNSYLNVAVFVAQYKEYLHPFAEELLCNKISHWERSLRELAAQALSMLVQYDMNYFAGYALEKLVPCTLSSDLCTRHGATLAAGEIALKLYQLGFTFTTDMQKALSGIVPAIEKARLYRGKGGEIMRSAVSRFIACISMSGISLNEKTKRSLLETLNENLRHPNAQIQCAAVDALKHFIPTYLVSSGEKTANGIITKYLTLLDDPNVAARRGAALALGTLPYEFLVLKWMPVISKLCSSCTIEDKPDDPDAEARVNSVRGLILVCETLTASVEHSSSFGDSMYSYIKDKVMQALFRALDDYAVDNRGDVGSWVREAAMDALERCTFILCKRDNIAVKITPVAEHESKSIDIDTNAVNTRCQLFDSSIAQDLVAGIAKQAVEKIDKIREIAVKTLKRILYNEELFVPSIPYRELLEQIIPNSADLEWAVPAVSYPRFVKLLQVSCYSKPVLSGLVISTGGLQESLRKASTSALVDYLQDSDINTNDEGKNREYLLSCDLLWVLEHYQKCDRVVTPTLKTVETLLSKKVFLREGHCEFYSGLIKSLGPELKGSKDFAKLSAGLSILGYISSQSDGNGSTAFSQLLTFLGHRYPKIRKAAADQVYLVLLQNDSLIAAENMEKAQEVIAETCWEGDVEEARRKRSELNEMAGFGAATSQKPGNEQTRRKTEERNAASTDENKSYSSLVDFSGY

SEQ ID NO: 110540 - protein, 53 aa, Oryza sativa
  unsure (1)..(53): unsure at all Xaa locations
  Clone ID: PAT_MRT4530_14597C.1.pep
PXKNXIRDRNCTNSLGFDTKSXXRIXSXWEILPNSKRLGLKPESFXNVAPPLL

SEQ ID NO: 110541 - protein, 108 aa, Oryza sativa
  Clone ID: PAT_MRT4530_14598C.1.pep
RTCGNGGTPRHATRRVERPRTTTGSNFQFPARTRACLADPRRRCGLPMVWFTALPRFFAFPFSTPSPPLSVEHISSPRGGLLGHLDPAPPLPAPNCGRQRAMSGGMSR

SEQ ID NO: 110542 - protein, 224 aa, Oryza sativa
  Clone ID: PAT_MRT4530_14599C.1.pep
MGVREDSRPLGGLDGLYGVQLAGRSMYSDDEAVKTSIIDPLAREPQEGVGTSRRLLIRRLWQQRPPCLRPIHCSLSCDKHPGETIANVVTSIPFIVLGLQTPRRCQLTVMCQSCRKNLNTALYANSLIGVGIASSLYHTSRGRIRKYMRWADYTMIATTTLVSFAKRASMEPELRMAHNLHKMSSLLGGALFIADDAFPETPYLHAAWHLAAALGVGTCNKLLE

SEQ ID NO: 110543 - protein, 109 aa, Oryza sativa
  unsure (1)..(109): unsure at all Xaa locations
  Clone ID: PAT_MRT4530_1459C.1.pep
MQLNPKARTRRNKTKAKGWRCAEIVLNVTLSMYGNHLEVPQFNPMSYTKSYCRNRLHRLTXSDSDSADPXIVADLDSSRFLLCSXIDLRLRLHFDLIFFSDADITKFGC

SEQ ID NO: 110544 - protein, 441 aa, Oryza sativa
  unsure (1)..(441): unsure at all Xaa locations
  Clone ID: PAT_MRT4530_145C.1.pep
MTNPTRRKHRPTTRQRRKHRQINPPHPPAAATDDAAAIPEAPAVAAAIGIPDDVFFSHIFVNLPVRSLSRFRAVCRSWHAAVDDPALLPPANAYPASGGGGPRARARARAVAVAVAVPSHITSETDPMLHKSIPNGGRIARRIIPTHCDGLVAVATCGGATFVCNPATQELVVLPPGTSGRSRRGPSPVSTESTAAIGFDPWRNRYVVARCFYYRKSGNHYPPVYNVGHEIFTLGGGAXRMAGGLQDPPRAISPDGRPAACTRGGGASFYWFIDEHEPCALLRFSLRDEAFDVVPVPPGLHGLHVRRXRLADLAGELCYVHRVRTGVATHEVWMAAAAVDDDEPEWWLRYRVDLWGYAWGLVAGERWFHSFGATAGDDGVDEEATLVTMLYKELCWHRERSKPVVKDVNVRGSRYSCEPTPTIHHVIRYVESLVSITAPNY

SEQ ID NO: 110545 - protein, 438 aa, Oryza sativa
  Clone ID: PAT_MRT4530_14600C.1.pep
MEDPYTSFFKNPYYYYCTSASSFPTAPAAAAAAAHLPPPLPPPYAALYPTAGGVGVGVGAHHHHQYPPAAFFHPPPVHQQHQAPPSPPLREALPLLSLSPTPARRGGVVDAAADSDSDDDDDGDCCYHHLQDQEGAAAGSTATPAAAAARAPLFADLNCIPTCCGDDNDGGDPMDVEVAGTTADIDAAVALRIGLPAGGTEADLLSGLTGAGVEHEEEEEDCKVDGGGSGGDDEVVPLGFSSTPIGKLNKGQYWIPTPSQILIGPTQFSCPVCFKTFNRYNNMQMHMWGHGSQYRKGPESLRGVQPTAMLRLPCYCCAAGCRNNIDHPRARPLKDFRTLQTHYKRKHGLKPFLCRKCGKAFAVKGDWRTHEKNCGKLWYCLCGSEFKHKRSLKDHARAFGHAHTALDADDDDGAVSDADAVVRPSSSMAASSLQPPPR

SEQ ID NO: 110546 - protein, 250 aa, Oryza sativa
  Clone ID: PAT_MRT4530_14601C.1.pep
MGVREDSRPLGGLDGLYGVQLAGRSMYSDDEAVKTSIIDPLAREPQEGVGTSRRLLIRRLWQQRPPCLRPIHCSLSCDKHPGETIANVVTSIPFIVLGLQTPRKNLNTALYANSLIGVGIASSLYHTSRGRIRKYMRWADYTMIATTTLCLSRALRNEHPKLLMAASTLLLPFQPLVVSAVHTGIMEVSFAKRASMEPELRMAHNLHKMSSLLGGALFIADDAFPETPYLHAAWHLAAALGVGTCNKLLE

SEQ ID NO: 110547 - protein, 252 aa, Oryza sativa
  Clone ID: PAT_MRT4530_14602C.1.pep
MDSNLAVLLAIVVAVVCVARTTPPAFAQTVQVWSECSPQNYTAGSAYGTSLRGVLKDVVDAAVSGGGYAVANDAGGAAHGLAICYADAPPEVCRLCLAMAAGNLSLACPRAVGGAMLYNNCLLRAGDAAQFGAALSRLMDRLALAAASSSSSSRGRRFAFGQTNITGDGGDSLYAFVQCVDDLSPDDCRRCLQSIAASLPMTRGGRAYSLTCYTRFEVVPFYRPPTATNLVVVASTAPAPESALLPTESRGE

SEQ ID NO: 110548 - protein, 170 aa, Oryza sativa
  Clone ID: PAT_MRT4530_14603C.1.pep
MLGLRGLVAASPVTAPRCRGRCSAATAATSAPEKTAGHVGRLPLAIVPAAAASLSLVLWSSPVHAGIMSGFKGMESVPGPDLPRVEFLEKWNAENQKKYAEFDSRFKSSQVLKDLLEKSKQNKLKNEREIQDKYCLRGAEWGVGDCSTEGMSDQEKEDFIAELKKRTGQE

SEQ ID NO: 110549 - protein, 1355 aa, Oryza sativa
  Clone ID: PAT_MRT4530_14604C.1.pep
MELTSEQEQLIHRNAQASNAILSALSPEEFNKVDGLEEAKEIWDTLQLAHEGSPVVREAKIKLLEGRLERFVMDDKETPQEMYDRMMILVNKIKGLGSEDMTNHFVVKRLLRAFGPRNPTLVSIIRERKDFKRLTPSDILRRIVSHEMQEEEAREVRQMEKNAAMIKNQEVALKAKQEEELSCKESEDEEMAFIVKRFKHFLRKSGYGKGRKDGDKGKWKSKRACFNCGEYGHFIADCPKSNEAKAKGGKKKPERAHYSGDEEDPEVKPKPKPKEKVEGEGGVATVAFKSSSSSKKRLFNNLSDDDDDSYHYSCFMAQALKVMTQKPSHISLDVGSNDEESDNELDDVLKSFSKPTMQHLAKLMRALDSKEQSLERQEELLILEKKKNLALEESLAKECAKNEQLANELILANGSLASLRDVNGTLQEKFVNLDISHKDLEVQFVTLWNSTSQPNVVSNPSNPSTSNGCARCYNIDLNSYATNVDAMQALKKENERLGTLVKYGCMKTYHSKDALYKTIIAHPNKDGHRLGFSGGSPVSKRVMDPNLFGSVAYISIGGNKYGFVIVDDFSRFTWVYFLHDKSEAQDVFKHFAKQAQNLYDLTIKRVRSDNGGEFKNTQVEEFLDEEGIKHEFSAPYDPPQNSIVERKNRTLIEAVRAMLDEYKTSDVFWAEAVSTACHAINRLYLHKILKKTSYELLSVTRDVTFDESNGSQGEQVVVHVIGDVDPSQAIGTKAIGDIRPVETQDDQEDRDQPPSSTSNSPTSAVSAEPEVPGPIDQNLQTSPGPEVLGSPVRNLRTNGSEDVPTLQVPLVHHPRIHHTIQRDHPVDNILGDIRKGVTTRSRVASFCQHYSFVSSLEPTRVEDVLGDPDWVMAMQEELNNFTHNQVWTLVERPKQNVIGTKWIFRNKQDEHVVVVRNKARLVAQGFIQVEGLDFGETFTPVARLESIKILLAYAAHHDFRLFQIDVRSAFLNGPISELVYVEQPSGFEVPKLPNHVYKLHKALYGLKQAPRAWYECLRDFLLKNGFEIGKADTTLFTKKFKSDLFICQIYVDDIIFGFTNASFCEEFSTVMTKRFEMSMMGELTFFLGLQVKQAQEGTFISQTKYVKDILKKFGMEDAKPIKTPMPTNGHLDLNDNGKCVDQKVYRSMIGSLLYLCASRPDIMLSVCMCARFQAEPKECHLIAVKRILRYLVHTPNLGLWYPKGCDFELLGYSDSDYAGCKVDTKSTTGTCQFLGRSLVSWSSKKQNSIVLSTAEAEYVVAGSCCAQLLWMKPTLKDFGYNFTKIPLLCDNESAIKIANNPIEHSRTKHIDIRHHFLRDHETKGDICLTHVRTETQLADIFTKPLDEKRFCELRS

SEQ ID NO: 110550 - protein, 91 aa, Oryza sativa
  Clone ID: PAT_MRT4530_14605C.1.pep
MPLSWAARWSSGSLMLKDIMFTPLPCSSITFGFLSDDGLTRAVMSNCVSVEASRPLTMDVPVWPVAPMIATFMLGCLLEGRGVCLTIPAGS

SEQ ID NO: 110551 - protein, 594 aa, Oryza sativa
  Clone ID: PAT_MRT4530_14606C.1.pep
MGGFEDDEPPSKRARASSVEPASLLDSFSCLKPAAPLGSTMARPLPSQGKEVMVGSKGVIKRDEFVRIITKALYSLGYEKSGAVLEEESGITLHSPTVNLFRRQVLDGNWDSAVVTLKKVGLLDENIVKSAIFLILEQKFLELLRNDNVMGAIRTLQSEITPLGVNKKRVHELSGCIISSPQHVLLGFSKLGIESSNSRLKLLEELQKVLPPTVMVPERRLENLLEQALTVQREACYFHNSIDGLSLYTDHHCGKDQLPSCTVQVLRAHRDEVWFLQFSNNGKYLASASNDKSAIIWKVDEDGELLLKHTLTGHDKPVMMVAWSPDDCQLLTCGMEEVIRCWDVESGKCLHVYEKSGIGLISCGWFPDGKHILSGLTDHNFCLWDLDGKEVDCWKGQRSSKTSDFAVSNDGKLIISMNRESTIRLFDRETKQERLIEEDNTITSFSLSEDGDFLLVNLISEAIHLWNIRNCPIRVNRYAGHKRSRFVIRSCFGGSEQAFIASGSEDSQIYIWHRATGDLIETLPGHTGTVNCVSWNPANPHMLASASDDHTIRIWGLKKANLKRKDVGSSNGIYANGNTPSNGVVHQCNGNSSK

SEQ ID NO: 110552 - protein, 113 aa, Oryza sativa
  Clone ID: PAT_MRT4530_14607C.1.pep
HMQLRGIKYILLGATGVLALPSGLWSGFLACFSLATFLSLSAARSSFSFCSFSLTHFFFQSSPLRRSSTSFRWVSLSIHTTKSHRGGGGFGTSIGFFDFSFFPFGFGFSRVYV

SEQ ID NO: 110553 - protein, 1778 aa, Oryza sativa
  Clone ID: PAT_MRT4530_14608C.1.pep
MSDLGGKNGENGNEDEASSKGTPPPKGATIPFDYSKLTIPSHNFVSVPSGRAPQFDGTYYAAWKHKMKLHLISLHPNIWKVVCTGIDIPHDDMELTSEQEQLIHRNAQASNAILFALSPEEFNKIDGLVEAKEIWDTLQLAHEGSPAVREAKIELLEERLGRFVMDDKETPQEIYDRMMILVNKIKGLGSEDMTNHFVVKKLLRAFGPRNPTLVSMIRERKDFKRLTPSDILGRIVSHEMQEEEAREVRQMVKNAAMIKNQEVALKAKQEEMAFIVKIFKHFLRKSGYGKGRKDDDKGKRQSRRACFNCGEYGHFIADCPKSNEAKAKGGKKKPEHAHVAEAHMAEVWYSGDEEDPEVKPKPRSKDKVEGEGGVATVAFKSSSSSKERLFNNLSDDDDDSYHYSCFMAQGCKVMTQKPSQTSLDVDSSDEESDNELDDVLKSFSKPAMQHLAKLMRALDSKEQSLERQEELLILEKKRNLTLEESLAKKCAKNEQLANELNLANGSSASLRDVNETLQEKFANLDKSHKDLEVRFDTRWNSTSQPNVVSNSSNPSTSNGCARCFNIDLNSYATNIDAMQALKKENERLGTLVKYGCMKTYHSKDALYKTITAHPNKDGHGLGFSGGSPVSKRVMVNGKECLMFVREGKAPQASEVTSLVSCQGPGTSGQTGRNFRVGVSVSQKFPPGSSGQFAKKFRANGRAQDMTGSSGHNARRFRPEGLYYDSYAYSSGGSSWVVDSGCTNHMTGEMSIFTSLDEENGTRENIVFGDDGKGKIIGLAFISIGGNKYGFVIVDNFSRFTWVYFLHDKSEAQDVFKRFAKQAQNLYDLTIKRVRSDNGGEFKNTQVEEFLDEEGIKHEFSAPYDPPQNGIVEKKNRTLIEAAREMLDEYKTSDSFWTEAVSTTCHAINRLYLHKILKKTSYELLSGKKPNVSYFHVFASKCFILSKRPRSSKFSPKVDEGFLLGYESNAHAYRVFNKTSGIVEVTRDVTFDESNGSQGEQVVVHVIDDADPREAIGSKAIGDIRPVETQDDQEDRDQPSSSTSNSPTTSQESVDPEVPGPDDRNLQTSPGQEVPGPSARKFRAEDSQGLPTTQVDGIDAVGTVEHPDQAQVSSVHHPRIHHTVQRDHPVDNILGDIRKGVTTRSRVANFCQHYSFVSSLEPTRVEDALGDPDWVMAMQEELNNFTRNQVWTLVERPDQNVIGTKWIFRNKQDEHGVVVRNKARLIVQGFTQVEGLDFGETFAAVACLESIRMLLAYAAHHDFRLYQMDVKSAFLNGPISELVYVEQPPGFEDPKLPNHVYKLHKALYGLKQAPRVWYECLRDFLLKNGFEIGNTYTTLFTKKFENDLFICQIYVDDIIFGSTNASFCEEFSSIMAKRFEMSIMGELTFFLGLQVKQAQEGTFISQTKYVKDILKKFEMEDAKPIKTPMPTNGHLDLDENGKCVDQKGCDFELLGYSDSDYAGCKVDRKSTTGTCQFLGRSLVSWSSKKQNSIALSTTEAEYVAAGSCCAQLLWMKQTLKDFGYNFTKIPLLCDNESAIKIANNPVQHSRTKHIDIRHHFLRDHETKGDIFLTHKRQKASQDVSGDESPPIRFPRGRLGKEKVIEGGSGSGTRTSPRFTRQSSNRPVQIRDVDSGQGSDAPNTRGRGRGGGRSSGAGRASHDFPIGSRENPVQLYKTLGFDTTPMHHIGRPKSNYLHQLAKCRRDLITARENPMVKMKWIDWTYMRKKNNEVFNQVMQVCHNKNLGDILALEYDWNEEVIAQFYATAFFGTTRKGIVTP

SEQ ID NO: 110554 - protein, 85 aa, Oryza sativa
  Clone ID: PAT_MRT4530_14609C.1.pep
IWPGEGLDTDQAVRSNAPHIITSDGLRCRPSSSRSFGVLAPDLIWGVRLNFTVSVIAHPSRRIVELLHRTPLQRLATRACTVPTC

SEQ ID NO: 110555 - protein, 165 aa, Oryza sativa
  Clone ID: PAT_MRT4530_1460C.1.pep
MDTTTTMAPLPLLTTTSLLLFFFLASSFAADFVVAGGGGGGGYDDGGDSEGGGGGGAKMPHVNHGRYKCGPWVDGHATFYGGRDASGTTEGGACGYKDADGYGAMTAAVSPALFDNGAGCGACYELKGDSGKTVVVTATNQAPPSVNGMKGEHFDLTMPAFLSIA

SEQ ID NO: 110556 - protein, 67 aa, Oryza sativa
  Clone ID: PAT_MRT4530_14610C.1.pep
FPTPPNPQPRRGRNGGARVLHGRGRRQPPPHRLRWRAVRLHPTSHRRTLVLDPLFLRDLCLERDPRV

SEQ ID NO: 110557 - protein, 538 aa, Oryza sativa
  Clone ID: PAT_MRT4530_14611C.1.pep
MTREKRQKASQDVSGDESPPIRFPRGRLGKEKVVEGGGGSGTRTSPRFTRQSNNRPVQIWDVDSGQGSDAPNTRGRGRGGGHSSGAGRASHDFPVGSRENPVRLYKSLGFDTTPMHHIGRPKSNYLHQLAKCRRDRLIDPEIQPEESQDPRFRTFTQLDWYNSVIMARENPVVEMKWIDWVYMRKKNNEVFNQAMQVCHNKNLGDILALEYDWNEEVIAQFYATAFFGTTRKGTPYVKWLTEGVRHKISMAQFAEILGLEDEDLNRPNIHSEALFPMIKTKFMYAKDAPRTCMGTTHGLHPNYKMLYSIFRWSLLPKVGDATALPSKHAHLLSRMRYHQPPFSVMKLIWYEIANTILEPKRGCIYAPFIMKMIESVTGVFYIKDGRHNPFHPRAPLASSLVVPRSIPSTSAGPSSSAPLSSSSSSPIKKTLQAIFCLCAKTAKKVKKIERRQKEDRREAGKEVSDDSEDEVYVDPFEAYEAARNVAGEGPSSYFNEKSSHSDDDDDDDDDDDDDDDEGDTEAAAEDAPTDVDEGDTTA

SEQ ID NO: 110558 - protein, 1991 aa, Oryza sativa
  unsure (1)..(1991): unsure at all Xaa locations
  Clone ID: PAT_MRT4530_14612C.1.pep
MVKNAAMIKNQKVALKAKQEEESSCEESEDEEMAFIVKRFKHFFHKSGYGKGRKDDDKGNKQSKRACFNCGEYGHFIADCPKSNEANAKGGKKKPERAHVVEAHMAEVWYSGDEEDPEVKPKPKSKDKVEGEGGVATVAFKSSSSSKEHLFNNLSDDDDDSYHYSCFMAQGRKVMTQKPSQTSLDVDSSDEESDNELDDVLKSFSKPDMQHLAKLMRALDSKEQSLERQKELLILEKKRNLALEESLAKECAKNEQLANELNLANGSLASLRNVNETLQEKFANLDKSHKDLEVQFDTLWNSTSQPNVVSNSSNPSTSNGCARCYNIDLNSYATNIDAMQALKKENERLGTLVKYGCMKTYHSKDALYKTITAHPYKDGHGLGFSGGSPVSKRVMVNGKECLMFVREGKAPQVSEVTGLVSCQEPGTSGQTGRNLRVGVSVSQKFPPGSSGRFARKFWANGRAKDMTGSSGHNARRFRPDGLYYDSYVISKNLEGKVVAYFNGNYNDEYHTYVWVPNALAYSSGGTSWVVDSGCTNHMTGERIMFTSLDEENETRENIVFGDDGKGKLGYNCLFTDEDVTVFRRDDSSVAFKGKLKGDLYLVDFDVDRVNPEACLIAKSSMGWLWHRRLAQVGMRNLATLLKGEHILGLTNVTFEKDRVCSACQAGKQVGNPHPIKNIMTTTRPLELLHMDLFGPVAYISIGGNKYGFVIVDDFSRFTWVYFLYDKSEAQDVFKRFAKQAQNLYDLTIKRVRSDNGGEFKNTQVEVFLDEVGIKHEFFAPYDPPQNGIVERKNRTLIEATRAMLDEYKTSDIFWAEAVSTACHAINRLYLHKILKKTSYELLSGKKPNVSYFRVFGSRCFILSKRPCSSKFSPKVXRGFLLGYESNAHAYRVFNKTSSIVEVTREPYIEXESVDPEVPGPDDRNLRTSPGQEVSGPFARKFRAEDSQGVPTAQVDGIDAEGTIEHPDQAQVPSVHHPRIHHTVQRDHPVDNILGDIRKGVTTRSRVANFCQHYSFVSSLEPTRVEDALGDPDWVMAMQEELNNFTRNQVWTLVERPDQNVIGTKWIFRNKQDEHGVVVRNKARLVAQGFIKVEGLNFGETFAPIARLESIRILLAYAAHHDFRLFQMDVTSAFLNGPISELVYVEQPPGFEDPKLPNHVYKLHKALYGLKQAPRACSIMTKRFEMYMMGELTFFLGLQVKQAQEGTFISQTKYVKDILKKFGIEDAKPIKTPMPTNGHLNINDNGKCVDQKVYRSMLGSLLYLCASRHDIMLSVCMCARFQAEPKECHLIAVKRILRYLVHTPNLGLWYPKGCDFELLGYSDSDYAGCKVDRKSTTGTCQFLGRSLVSWSSKKQNSIVLSTAEAEYVAAGSCCAQLLWMKQTLKDFGYNFTKIPLLCDNESAIKIANNPVQHSRTKHIDIRHHFLRDHETKGDICLTHVRTESQLADIFTKPLDEQRFCELRISTMPREKRQKASQDVSGDESPPIRFPHGCLGKEKVVEGGSGSGTRTSSRFTRQSSNRLVQIRDVDSGQGCDAPNTRGRGRGGGRSSGAGRASHDFPVGSRENPVRLYKTLGFDTTPMHHIGRPKSNYLHQLAKCRRDRLIDPETRPEESHDPRFRTFTQLDWYNSMIMARENPVVEMKWIDWAYMRKKNNEVFNQVMQVCHNKNLGDILALEYDWNEEVIAQFYATAFFGTTRKGTPYVKWLTEGVRHKISMAQFAEMLGLDDEDLNRPNIHSEAPLPMIKTKFMYAKDAPRTCMGSTHGLHPNYKVLYSIFCWSLLPKVGDATALPSKHAHLLSRMRYNQPPFSVMKLIWYEIANTILEPKRGCIYAPFIMKMIETITGVFYIKDGHHNPFRPRAPPSSSPVVPRSIPSTSAGPSTSAPPSSSSSSPIKKALQAIFYMCAKTAKKAYEAARNVVGEGPSTFFNEESSHSDDDDDDDDDDDDDDGDQGDTEAAAEDAPTDVNEGDTAAQSDESHLSGDIEIVPSDGDE

SEQ ID NO: 110559 - protein, 2098 aa, Oryza sativa
  Clone ID: PAT_MRT4530_14613C.1.pep
MTRETLLAPRIKGATIHFDYSKLNVPPHNFVSVPSERAPQFDGTHYAAWKHKMKLHLISLHPSIWKVVCTGIDVPNDDMELTSEQEQLIHRNAQASNAILSTLSPEEFNKMYDRIMILVNKIKGLGNEDMTNHFVVKRLLRAFGPRNPTLVSMIRERKDFKRLTPSDILGIIVSHAMQEEEAREVRQMVKNAAMIKNQEVALKAKQEEVSSCEEIEDEEMAFIVKRFKHFLRKSGYGKGRKDDDKGKRQSKRACFNCGEYGHFIADCPKSNEAKAKGGKKKLERAHVAEVWYSGDEEDPEVKPKPKPKDKVEGEGGVATVAFMSSSSSKERLFNNLSDDDDDSYHYSCFMAQGRKLMRALDSKEQSLERQEELLILEKKRNLALEESLATKCAKNEQLANELNLANGSLAILRDVNETLQDKFANLDKSHKDLEVQFDTLWNSTSQPNVVSNPSNPSTSNDCARCYNIDLNSCATNVDAMQALKKENERLGTLVKYGYMKTYHSKDALYKTITAHPNKDGHGLGFSSGSPVSKRVMVNGKECLMFLREGKAPQASEVTCPFTGQTLGSSGQNDGKFLPCKTGSSEHFVRKFRTSDESKGLTGSSWYNARKFRPEGLYYDLYVISKNSEGKVVAYFNGNYNDEYRTCVWVPKALVTNIKGPKLMTGERCMFTSLDEQGGSRENIFFGDDGKGKDCVCSACQAGKQVGSPHPIKNIMTTTRPLELLHMDLFGPVAYISIGGNKYGFVIVDDFSRFTWVYFLHDKSKAQDVFKRFAKQAQNLYDLTIKRVRSDNGGEFKNTQVEKFLDEEGIKHEFSAPYDPPQNGIVERKNRTLIEAARAMLDEYKTSDVFWAEAMSDVDPSQAIGTKAIGDIRLVETQDDQEDRDQPPSSTSNSPTSAVSAEPEVPDPIDQNLRTSPGPIPPVHHPRIHNTVQRDHPVDNILGDIRKGVTTRSRVACFCQHYSFVSSLEPTRVEDALGDPDWVMAMQEELNNFTRNQVWTLAERPKQNVVGTKWIFRNKQDEHGVVVRNKAQIVAQGFTQVEGLDFGETFAPVAHLESIRILLAYAAHHDFRLFQMDVKRAFLNGPISELVYVEQPPGFEDPKLPNHVYKLHKALYGLQQAPRAWYECLQDFLLKNGFEIGKADTTLFTKKFKSDLFICQIYVDDIIFGSTNASFCEEFSSITTKSFEMSMMGELTFFLGIQVKQAQEGTFISQTKYVKDILKKFGMEDTKPIKTPMPTNGHLDLDNNGKCVDQKVYRSMIGSLLYLCASRPDIMLSVCMCARFQAEPKECHLIAVKRILRYLVHTPNLGLWYPKDCDFELLGYSDSDYAGCKVDRKSTTGTCQFLGRSLVSWSYKKQNSIALSTTEAEYVAAGSCCAQLLWMKQTLQDFGYNFTKITLLCDNESAIKIANNPVQHSRTKYIDICHHFLRDHETKRDICLTHVRTETQLADIFTKPLDEKRLCELRSELNILDSRNIRFLFLIVEFSSIPLNLGLTALCSVRPEVPVTLVRNIRGSGFCRPEVPVFLVRNFRSLSSQPANLDSSNFYFNHCTSTLLILVAVVSMPHEKRQKLSQDVPADSSPPVHGPRRRLGKEKVGNFYSGSQIPIHSRRAGSIVIGDAPRSPSPVASKSDDGGNEDEPSSESNPLRLYKTRVVDPDPRRPSVNYLKNLLKCGMDRMVSPDTMPADSQDDRFRTVVQVDWYNSVIMGRSHPVVEMKWLDWQYMSLKNNLVFSEVRKVCERKHVADLLALQYSWNEEVIGQLYSTAFFGTTKKGIEFVKWTIQGQQYRVSMAQFAAALELDDDDLSRPHIFVENALSPTSTTFLYEKDAPKDCLGTTRGLRPYYRVLYSIFRWSLLPKVGDTTALPDRHALLLSRIRYNKPDFSIMKLIWSEIYEIVCELKRGCIYAPYIMKMIEAKIGISYFKDNQHKPFRPHVPSSSAPPSTRATRASTSAARSSSAAPQRSESSSPIKKALRAIFCMCAKTAKKVKKIERRQKEDWIAAGKDVSNISDEEEFVDPFAAYETAQDIASGEGPSGTSHFFNEESSHSKESSDDEESDAPTENVPTDPDEAVDIAGQDIDSPHSGDTEIIPSDGDDDEA

SEQ ID NO: 110560 - protein, 105 aa, Oryza sativa
  Clone ID: PAT_MRT4530_14614C.1.pep
MVIVQQVRDIRQSKRQCNELWLDSRSGRNQIFALAWRQRPMGDDVPDNAKVQHHSGGGGSGRAAVRWRRQWLQAVVPPCPPPDPAGGEVADLGNCSGGGALPSAR

SEQ ID NO: 110561 - protein, 914 aa, Oryza sativa
  unsure (1)..(914): unsure at all Xaa locations
  Clone ID: PAT_MRT4530_14615C.1.pep
ASPCWNEEFGISSKXEHILGLSNVSFENDRVCSACQAGKQVGSPHPIKNIMTTXRPLELLHMDLFGPMAYISIGGNKYGFVIVDDFSRFTWVYFLHDKSEAQDVFKRFAKQAQNLYDLTIKKVRSDNGGEFKNTXSEEFLDEEGIKHEFSAPYDPPQNGIVERKNQTLIEAARAMLDEYKTSDVFWAKAVSTACHAINRFYLHKILKKTSYELLSGKKPNVSYFRVFGSKCFILSKRSRSSKFSPKVDEGFLLGYESNAYAYRVFNKTSGIVEVTRDVTFDESNGSQGEQVVVHVVGDVDPSQAIGTKAIGDIRQVETXDEQEDRDQPPSSTSNSPTTSDSEDVPTAXVDGIDAAGTLEHTDQAHVPLVHHPRIHHIVQRDHPVDNILGDIRQGVTTRSRVTSFCQYYSFVSSLEPTRVEDALGDPDWEMAMQEELNNFTRNQVWTSWAPSRXFRNKKEEHGVVVRNKARLVAQGFTQVEGLDFGETFAPVARLESIRILLAYAAHHNFRLFQMDVKSAFLNGPISELVYVEQPPGFEDPKLPNHVYKLHKALYGLKQAPRAWYECLQDFLLKNGFEIGKADTTLFTKKFKSDLFICQIYVDDIIFGSTNASFCEEFSSIMTXRFEMSMMGELTFFLGLQVKQAQEGIFISQTKYVKDILKKFGMEDAKPIKTPIPTNGHLDLDDNGKSVDQKVYRSMIGSLLYLCASRPDIMLSVCMCAHFQAEPKECHLIAVKRILRYLVHTPNLGLWYPKDCDFELFGYSDSDYAGCKVDRKSTIGTCQFLXLVSWSSKKQNSIALSTTEAEYVAAGSCCAQLLWMKQTLKDFGYNFSKIPLLCDNESAIKIPNNLVQHSRTKHIDIHHHFLRDHETKGDICLTHVRTESQLADIFTKPLDEKRFCELRSELNILDSRNIR

SEQ ID NO: 110562 - protein, 1311 aa, Oryza sativa
  unsure (1)..(1311): unsure at all Xaa locations
  Clone ID: PAT_MRT4530_14616C.1.pep
GGRRRRRRRGCEWERQSAGEGEGSESRAARETGTGRGAPPLEKAGEAVAREAGGTERDGAVANDDDDDGDMFEEEEDARNSSLAAAARAIEEGGAAALASDXGRWPLPAARPPVAPPPTTAASPVAAITAVASPVAXLPTPSSSRRLSQRREREREMRKGETALVVSSSATANTASSPSSPTTVTVDASALRAALGVPQPDAPSSAGAPVDRPEPDLSSLFAALGVPPPHQHDEQPAGAASGGAPLVDDTVDALHAQAVSVLNVKALVPVVXTSARRTTLSGAASSDLSTRTVVARCNSFGDLYSFPANFFNTMASSFAASTTTLWHRRLGHLGHEALARLAHSSVIPSPKGGSSTICHACQLGRHIRLPFTTLFSRAKGNFELIHCDLWTSPVPSVSGFKYYLVILDDCSHYVWTFPLRLKSDTFTTLSHFFAYVRTQFSTPIRSIQCDNGREFDNSAARTFFLTNGVTMRMSCPHTSPQNGKAERTLRSLNNIVRSLLFQANLPGSFWVEALYTATYLMNRHPTKTLQRHTPYFALHGVHPSYTHLRVFGCRCYPNLSATTPNKLXPPRSTMCIFLGYPSDHKGYRCFDPITNRVIISRYVVFDENTFPFAENSTVDTCTTDLFFLDDFTAPVQAPIGSGRPSGARPGPSPSTRLLGGPSTTPPGPPPALPTSPRPANSPAVSGPPSTPTPXGWPSTRRSRTSPAPRPPRSTSSMLGRALPQARPRRPXDGSSSASSPFLPPLMIPTRARSARVPLPRPLITGFGKSPVDNDHGMTTRGKAGVPVPTTRMNLQAATLSPIPRTYRAALADTNWRDAMQEEYSALMANRTWDLVPPPPGANIVTGKWIFRHKFHADGSLDRYKARWVLRGFSQRPGIDFDETFSPVVKPATVRTVLNLAVSRGWPIHQLDVKNAFLHGTLAEAVYCIQPSGFVNTAHPNSVCRLNKSLYGLKQAPRAWYNRFATFLQSIGFIEAKSATSLFIYRRDSDVIYLLLYVDDIVLTASSTSLRRXTISSMQTEFSMKDLGELHHFLGVSVSRQSSGLFLSQRQYCLEILERAGMTDCKPCNTPVDTTSKLSSTDGSPVADPKDYRSLAGALQYLTFTRPNIQYVVQXICLHMHDPRETHLTALKRILRYVRDTTDLGLHIRQSSSHDLVAYSDVDWAGCPDTRKSTSGYAVFLGDNLVSXSSKRQNTVSRSSAEAEYRAVANAVAETCWLRQLLTELHAPPVRDTLVYCDNVSAVYLSTNPVQHQRTKHVEIDLHFVREKVAIGSVRVLHVPTTSQYADIFTKGLPTPVFTEFRSSLNVRSNNV

SEQ ID NO: 110563 - protein, 448 aa, Oryza sativa
  unsure (1)..(448): unsure at all Xaa locations
  Clone ID: PAT_MRT4530_14617C.1.pep
MSHQEGNGEIDEGDKGDASSTEEIASKGATIHFDYSKLNVPSHNFVSVPSGRAPHFDGTHYAAWKHKMKWHLISLHPSIWKVVCTGIDVPHDGMELTSEQEQLIHRNAQASNAILSALSPEEFNKVDGLEEAKEIWDTLQLAHEGSPAVREAKIELLEERLGRFVMDDKETPQEMYDRMMILVNKIKGLRSEDMTNHFVVKRLLRAFGPRNPTLVSMIHERKDFKRLTSSDILGRIVSHEMQEEEAREVRQMVKNAAMIKNQEVALKAKQEEESSCEESEDEEMALIVKRFKHFLRKSGYGKGRKDDDKGKRQSKRACFNCGEYGHFIADCPKSNEAKAKGGKKKPERAHVAEAHMAEVWYSEDEEASEAKPKPKPKPKDKVEGEGSVATIAFKSSSSSKERLFNNLSDDDDDSYHYSCFMAQGRKVMTQXPSHTSLDDDSSDEESDN

SEQ ID NO: 110564 - protein, 81 aa, Oryza sativa
  Clone ID: PAT_MRT4530_14618C.1.pep
MSLAVRVIRDKMNIDAKVLLLCAAAVQASAARPLLRETAVVGGGDEGSQVGGGVVAGGNQSPAAYDDEKRLSPGGPDPQHH

SEQ ID NO: 110565 - protein, 409 aa, Oryza sativa
  Clone ID: PAT_MRT4530_14619C.1.pep
FQSLVFKIFVLGRDSELTFFLGLQVKQAQEGTFISQTKYVKDILKKFGMEDAKPIKTPMPTNGHLDLDDNGKCVEQKGCDFELLGYSDSDYAGCKVDRKSTTGTCQFLGRSLVSWSSKKQNSIALSTAEAEYVAAGSCCAQLLWMKQTLKDFGYNFTKIPLLCDNESAIKIANNPVQHSRTKHIDIRHHFLRDHKTKGNICLTHKRQKASQDVSGDESPPIRFPRGRLGKEKVVEGGSGSGTRTSPRFTRQSSNRPVQIRDVDSGQGSDAPSSRGRGRGGGRTSRAGRASHDFPVGSRENPVQLYKTLGFDTTPMHHIGRPKSNYLHQLAKCRRDLIIARDNPMVEMKWIDWTYIRKKNNEVFNQAMQVCHNKNLGDILALEYDWNEEVIAQFYATALFGTTRKGTPYV

SEQ ID NO: 110566 - protein, 67 aa, Oryza sativa
  Clone ID: PAT_MRT4530_1461C.1.pep
FSLFMQPDILIHYNMSIIPSTCVLYGHSYLLSWTSIRGFLALLHCANWLIVSAGPCASIGRSIYPNS

SEQ ID NO: 110567 - protein, 169 aa, Oryza sativa
  Clone ID: PAT_MRT4530_14620C.1.pep
MQYDYACSTLSKSAYVLSHDLQDHVGDEQCLIVGALAILACGSVFVGSKGFNSVSFKKRRTKKNEKDGCETGLVVKATTKFIFVWNFTIVLSARLVITGSTAKLEGDKRVWPPMMVLKLIGHQQPVACSSSFSSMLLYYLSLDLSGFHAILGHYKRGFSSPLNNKWHNP

SEQ ID NO: 110568 - protein, 512 aa, Oryza sativa
  Clone ID: PAT_MRT4530_14621C.1.pep
MPLRSATRQLSFELLGEGGLAAADDADDDLSPRSFPDTTSDGQRRRRRRSKRKRGLRSPPIEEEEKEGTPRRGGVVGVSDLVSVSVVERESSDAERSAASCVTYVGVGVELRQRSVSGSGRVVSREDATSSCGSSARESAAAAAAVPEAAPAAWRPEANGGGKKLEKEDSLDWERYMKENGNVLGEVERLDNSPFRYFLGELYGGNSLRGTISAGNDKKRQRVYNTMFHVPWRCERELIVAGFFVCLDSFLSLLTIMPARIAITVWRVLKTRQFLRPNAADLSDYGCFVVLALGVASLQMIAQAITLSTCIIAHNNALLALLVSNNFAEIKSNVFKRVSKENLHNLVYYDIIERFHITSFLLFVLAQNILEAEGPWFDSFLINASLVFMCEVLIDAIKHSFLAKFNEIKPVAYSEFLEDLCKQILNDKTDDRQKDLTFIPLAPACVVIRVLTPVYATLLPAGPFIWRVFWILLWSVLTYFMLAVFKILVGLVLRCLATWYVNLRLKNKQHVD

SEQ ID NO: 110569 - protein, 1765 aa, Oryza sativa
  unsure (1)..(1765): unsure at all Xaa locations
  Clone ID: PAT_MRT4530_14622C.1.pep
MSYLGGKNGENGNEDEASSKGTPPPKGATIPFDYSKLTIPSHNFVSVPSGRAPQFDGTYYAAWKHMMKVHLISLHPSIWNVVCTGIDIPHDDMELTSEQEQLIHRNAQASNAILSALSPEEFNKVDGLEEAKEIWDTLQLTHEGSPAVREAKIELLEGRLGRFVMDDKETPQEMYDRMMILVNKIKGLGSEDMTNHFVVKRLFGPRNPTLVSMIRERKDFKRLTPSDILGRIVSHEMQEEEGREVRQMVKXVSLKAKQEEESSCEESEDEEMTFIVKRFKHFLRKSGYGKGRKDDDKGKRQSKRACFNCGEYGHFIADCPKSNKAKAKGGKKKPERAHVAEAHMAEVWYSRDEEDPEVKPKPKSKDKVEGEGGVATVAFKSSSSSKERLFNNLSDDDDDSYHYSCFMAQGRKVMTQKPSETSLDVDSSDEESDNELDDVLKSFSKPAMQHLAKLMRALDSKEQSLERQEELLILEKKRNLALEESLAKECAKNEQLANELNLANGSLASLRDVNETLQEKFANLDKSHKDLEVQFDTLWNSTSQPNVVSNSSNPSTSNGCARWYNIDLNSYATNIDDMQALKKENERLGTLVKYGCMKAYHSLDALYKTITAHPNKDGYRLGFSGGSPVSKCVMVNGKECLMFVREGKAPQASEVTSLVSCQGPGTSGQTGRNIRVGVSVSQKFPPGSSGQFARKFRANDHAQDMTGSSGHNAWRFRKEGLYYDSYAYSSDGSSWVVDSGCTNHMTGERSMFTSLDEXNGTRENIVFGDDGKGKVIGLAYISIGGNKYGFVIVDDFSRFTWVYFLHDKSEAQDVFKRFAKQAQNLYDLTIKRVRSDNGGEFKNTQVEEFLDEEGIKHEFSTPYDPPQNSIVERKNRTLIEAARAMLDEYKTSDIFWVEAVSTACHAINRLYLHKILKXSYFRVFGSKCFILSKRPCSSKFSPKVDEGFLLGYKSNAHAYRVFNKTSGIVEVTRDVTFDESNGSQEEQVVVHVVDDADPRQAIGSKAIGDIRPVETQDDQEDRDQPSSSTSNSPTTSQESVDPEVPGPDDRNLRTSLGXEVPGPSPRKFGAEDSQGVPTAQVDGIDAEGTVEHPDQAQVPSVHHPRIHHTVQRDHPVDNILGDIRKGVTTRSRVANFCQHYSFVSSLEPTRVEDALGDPDWVMAMQEELNNFTCNLVWTSVERPDQNVIGTKXIFCNKQDEHGVVVRNKARLVAQGFTQVEGLDFGETFAPVARLESIQMLLDYAAYHDFRLYQMDVKSAFLNGPILELVYVEQPPGFEDPKLPNHVYKLHKAQNGLKQXPRAWYECLRDFLLKNSFEIGKADTTLFTKKFENDLFICQTYVDDIIFGSTNASFCEEFSSIMTKRFEMSMMGELTFFLALQVKQAQEGTFISQTKYMKDILKKFGMEDAKTIKTPMPTNGHRDLDENGKCVDQKGCDFELLGYSDSDYAGCKVDRKSTTGTCQFLRQSLVSWSSKKQNSIALSTAEAEYVAADSCCAQLLWMKQTLKDFGYNFTKIPLLCDNESATKIANNPVQHSRTKHIDIRHHFLRDHETKGDICLTHKRQKASQDVSGDESPPIRFPRGRLGKEKVVEGGSGSGTRTSPRFTRQSSNRPVQIRDVDSGQGSDAPNTRGRGRGGCRSSRAGRASHDFPVGSRENPVRLYKTLGFDTTPLHHIGRPKSNYLHQLAKCRRDLIMARENPVVEMKWIDWAYMRKKNNEVFNQVMQVCHNKNLGDILALEYDWNEEVIAQFYATAFFGTTRKGTPYV

SEQ ID NO: 110570 - protein, 1748 aa, Oryza sativa
  unsure (1)..(1748): unsure at all Xaa locations
  Clone ID: PAT_MRT4530_14623C.1.pep
MSDLGGKNGENGNEDGASSKETPSPKGATIPFDYSKLTIPPHNFVSVPSGRAPQFDGTHYAAWKHKMKLHLISLHPSIWKVVXCIGVDVPNDDMELTSEQEQLIHRNAQASNAILSALSLEEFNKVDGLEEAKEIWDTLQLAQEGSPTVREAKIELLEGRLGRFVMDDKETPQEMYDRMMILVNKIKGLGSGDMTNHFVVKRLLRAFGPRNPTLVSMIRERKDFNRLTPSDILGRIVSHEMQEEEAREVRQMVKNAAMIKNQEVALKAKQEEMAFIVKRFKHFLRKSGYGKRRKDDDKGKRQSKRACFNCGEYGHFIADCSKSNEAKAKGGKKKPERAHVAEAHMAEVWYSGDEEDPEVKPKPKLKDKVEGEGGVATVAFKSSSSSKERLFNNLSDDDDDSYHYSCFMAQGRKVMTQKPSHTSLDVDSSDEESDNELDDVLKSFSKPAMQHLAKLMRALDSKVQSLERQEELLILEKKRNLALEESLAKECAKNEQLANELNLANGSLASLRDVNETLQEKFASLDKSHKDLEVQFDTLWNSTSQPNVVSNSSNPSTSNGCARCYNIDLNSHATNVDAMQALKKENERLGTLVKYGCMKTYHSKDALYKTITAHPNKDGHGLGFSSGSPVSKRVMVNGKECLMFVREGNAPQASEMTCPLTGQTPGTSGQNDRKFLSCKTGSSGHFVRKFWASDRPKGLAGSSGYNARKFRPEGLYYDSYAYSSGGSSWVVDSGCTNHMTGEMSMFISLDEEGGSRENIVFGDDGKGKVMGLAYISIGGNKYGFVIVDDFSRFTWVYFLHDKSEAQDVFKRFAKQAQNLYDLTIKRVRSDNGGEFKNTQVEEFLDEEGIKHEFSAPYDPPQNGIVERKNRTLIEAARAMLDEYKTSDVFWAEAVSTACHAINRLYLHKILKKTSYELLSGKKPNVSYFRVFGSKCFILSKRPRSSKFSPEVDEGFLLGYESNAHAYRVFNKTSGIVEVTRDVTFDESNGSQGEQVVVHVVGDVDPSQAIGTKAIGDIRPVETQDDQEDRDQPPSSTSNSPTSAVSAEPEVPGPIDRNLRTSPGPEVPGSTVRNLQTSGSEDVSTAQVDGIDVEGTLEHSDQAQVXPVHHLRIHHTVQRDHPVDNILGDIRKGVTTRSRVASFCQHFSFVSSLEPTRVEDALGDPDWVMAIQEELNNFARNQVWTLVERPKQNAIGTKWIFRNKQDEHGVVVRNKAWLVAQGFIQVEGLDFGETFAPITRLESIRILLAYAAHHDFRLFQMDVKSAFLNGPISELVYVEQPPGLKDPKLPNHVYKLHKALYGLKQAPKAWYECLRDFLLKNSFEIGKADTTLFTKKFKSDLFICQIYVDVIIFGSTNVSFCEEXSSIMTKRFEMSMMGELTFFLGLQVKQAQEGTFISQTKYVKDILKKFGMEGAKPIKTPMPTNGHLDLDDNGKCVDQKGCDFKLLGYSDSDYAGCKVDRKSTTGTCQFLGRSLVSWSSKKQNSIALSTAEAEYVAAGSCCAQLLWMKQTLKDFGYNFTKIPLLCDNESAIKIAINPVQHSRTKHIDIRHHFLRDHETKGDICLTHKRQKLSQDVPGDSSPPVRGPRGRLGKEKVGDFYNGSQILIHSRRAGSIVIRDAPRSPSPAASESDDGGNEDEPGSESNPLRLYKTRAVDPDPKRPRVNYLKNLLKCGKDMIMGRSHPVVEMKWLDWQYMSSKNNIVFNEVRKVCERKHVADLLALQYSXNEEVIGXFYSTAFFGTTKKRLDF

SEQ ID NO: 110571 - protein, 105 aa, Oryza sativa
  unsure (1)..(105): unsure at all Xaa locations
  Clone ID: PAT_MRT4530_14625C.1.pep
MADEAKAKGNAAFSAGRYEEAVRHFTDAIALAPGNHVLYFNRSAALGLVHRYSEGLADAXKTGELKPDWAKGYSRLGAVHLASGGSQSAVXAYEKGFRPQPPPTE

SEQ ID NO: 110572 - protein, 81 aa, Oryza sativa
  unsure (1)..(81): unsure at all Xaa locations
  Clone ID: PAT_MRT4530_14626C.1.pep
IINTARINACKGRXTLTDYTGTKGAIVALTRALALXIAEEAIRINCIPPWPIWTPLISACIADDNVRKLGSHVPMAPSGQS

SEQ ID NO: 110573 - protein, 66 aa, Oryza sativa
  Clone ID: PAT_MRT4530_14627C.1.pep
RGRGIVSATGKGRVAAAEKRRLGVSPPAGGPPPFQAAAAAATTGLTSPLLHSSPLLAAAASPCNYD

SEQ ID NO: 110574 - protein, 171 aa, Oryza sativa
  Clone ID: PAT_MRT4530_14628C.1.pep
MATSNRYFLLRSCLNGHRAVTAVDVKLPAMEGACLRLVVNPQQPTTLLAVFLLLLVAAAVAPPHVLAADHVVGGSIWSIPPRPGLYRAWADNRTFVAGDNLVFRFETGMYNVVQVGRREFDDCTADDPYRDWTDGPAVVTLGSAAVRYFICTVGNYCSLGVKVYVASQNAP

SEQ ID NO: 110575 - protein, 72 aa, Oryza sativa
  Clone ID: PAT_MRT4530_14629C.1.pep
IWKWRFLFGRKFLMNFYCVNFPAKCKRLSPRQMFRMVACISLLFFLSCLIKAATLFCTGFILCPSERVYCVL

SEQ ID NO: 110576 - protein, 109 aa, Oryza sativa
  unsure (1)..(109): unsure at all Xaa locations
  Clone ID: PAT_MRT4530_1462C.1.pep
IQLNPKARTRRNKTKAKGWXCAEIVLNVTLSMCGNHLETYQLNPMLYIKSYCRNRLHRLTXSDSDPTDPXIVADLDSSRFLLCSSIDLRLXLHFNLIFFSDADITKFGR

SEQ ID NO: 110577 - protein, 150 aa, Oryza sativa
  unsure (1)..(150): unsure at all Xaa locations
  Clone ID: PAT_MRT4530_14630C.1.pep
DGPQWRQRQLRLVFAPSLPLCGGAXIHPPPMPTRGGRGGRGGRGGRGGQPGELGQPGEPGQGGGRGGRGGRGGQPGELGQPGEPGQGGGRGGHGGTGGQPGEPGQPGQGGGPGGRGGSAFGPHGGDGGTGGTGGFLGIGGRGGRGGDGGL

SEQ ID NO: 110578 - protein, 264 aa, Oryza sativa
  unsure (1)..(264): unsure at all Xaa locations
  Clone ID: PAT_MRT4530_14631C.1.pep
MNPSYRRISESDDEFIHFVLPTLGDSSQSSCIRRPMHTSKLTGGCRVHEILTGHERLCKRNFRMEVDIFHALVNKLREKEYLTGTXVSVEEHIAIFLYTVAKNATNETLQDWFQHSPDTIHRYFKAVQEAITNLTSVYIRAPSLHPHPILRKPQFYPFFQNCIGAIDGTHIPMKLPLDEQESYRNRKQTISQNCMVACDFDLKFVHIHPGWEGSASDARVLHDALNHGFQVPGGKFYLVDAGYANTPQSLAPRRSPRPATTCHL

SEQ ID NO: 110579 - protein, 47 aa, Oryza sativa
  Clone ID: PAT_MRT4530_14632C.1.pep
LFHSRIAKSISPKDSVHLPSVVKELLLCHKAFNNIHFLYEEILRDGS

SEQ ID NO: 110580 - protein, 209 aa, Oryza sativa
  unsure (1)..(209): unsure at all Xaa locations
  Clone ID: PAT_MRT4530_14633C.1.pep
DGSATACGTVDSLQRRLPTPSPRPQTGQVGLHGRTGSSPPATRERRLHGVRVDESAYDSNDRRWPEASTDLTSVYIGAPCLHPHTILRKPQFYPFFQNCIGAIDGTHIPMXTPLDEQESYRNRKQTISQNCMVACDFDLKFVHIHPGWEGSASDARVLHNALNHGFQVPGGKFYLVDAGYANTTCCCSSPPPAGNNFSEPNKIAIGQAL

SEQ ID NO: 110581 - protein, 517 aa, Oryza sativa
  Clone ID: PAT_MRT4530_14634C.1.pep
MEVTSTPAMLLYAALFAAALLYLAVAVRRGRGAGLPPGPTGLPLVGSLLSLDPELHTYFAGLAARYGPIFSIRLGSKLGVVVTSPALAREVLRDHDLVFSNRDTPDAACSISYGGGQNIVWNPVGPTWRLLRRICVHEMIGPAGLDSLHGLRRREFMATLHHLRARSGEPVNVGAQMFLTVMNVVTGALWGGNVGSESERTTVGKEFRELVADITELLGAPNVSDFFPALAPLDIQGIRNKSDLLKDRFDDIFARIIQKRTESDHAAAAGETASDFLEYMLKLEKEGGDGKTAFTMTNVKALLMDMVIGGTETTSNTVEWGMAEMLQNRGTLRKVREELDAVVGRDGVVEESHLPKLHYLNLVVKETLRLHPALPLMVPHCPGEDATVGGHRVPAGARVFVNVWAIQRDPAVWKDPEHFIPERFLPADGGGGRRLDFTGSEQEYMPFGSGRRICAGVAMAERMVAYSLAMLVQAFDWELPAGERLDLAERFGIVMKKATPLVAVPTPRLSNPQLYSA

SEQ ID NO: 110582 - protein, 249 aa, Oryza sativa
  Clone ID: PAT_MRT4530_14635C.1.pep
YNLLSVSQLCKLGYNCLFTDEDVTVFRRDDSVVFKGKLKGDLYLVDFDVDRVNPEACLIVKSSMGWLWHRRLTHVGIRNLATLLKGEHILGLTNVTFDKDRVCSACQARKQVGNPHPIKNIMTTTRPLELLHMDLFGSMAYISIGGNKYGFVIVDDFSRFTWVYFLHDKSEAQNVFKRFTKQAQNLYDLTIKKVRSDNGEFKNTQVEEFLDEEGIKHEFSTPYDPPKNGIVERKNRTLIEAARAMLDGY

SEQ ID NO: 110583 - protein, 152 aa, Oryza sativa
  unsure (1)..(152): unsure at all Xaa locations
  Clone ID: PAT_MRT4530_14636C.1.pep
DIELPEVHSIRPSILHPLHTTRSQDFLGLDYTQSAGLLHDTNYGDSVIIGIIDSGIWPESPSFKDDGLGPLPSKWKGKCLAGQAFGSNQCNRKIIGARWYDKHLNPDNLKGQYKSARDADGHGTHVASTAAGVLGANVSFHGLAVGYXRGAA

SEQ ID NO: 110584 - protein, 1849 aa, Oryza sativa
  Clone ID: PAT_MRT4530_14637C.1.pep
MTRETLLAPRIKGATIHFDYSKLNVPPHNFVSVPSERAPQFDGTHYAAWKHKMKLHLISLHPSIWKVVCTGIDVPNDDMELTSEQEQLIHRNAQASNAILSTLSPEEFNKMYDRIMILVNKIKGLGNEDMTNHFVVKRLLRAFGPRNPTLVSMIRERKDFKRLTPSDILGIIVSHAMQEEEAREVRQMVKNAAMIKNQEVALKAKQEEVSSCEEIEDEEMAFIVKRFKHFLRKSGYGKGRKDDDKGKRQSKRACFNCGEYGHFIADCPKSNEAKAKGGKKKLERAHVAEVWYSGDEEDPEVKPKPKPKDKVEGEGGVATVAFMSSSSSKERLFNNLSDDDDDSYHYSCFMAQGRKVMTQKPSHISLDVDSSDEESDNELDDVLESFSKPAMQHLAKLMRALDSKEQSLERQEELLILEKKRNLALEESLATKCAKNEQLANELNLANGSLAILRDVNETLQDKFANLDKSHKDLEVQFDTLWNSTSQPNVVFNPSNPSTSNDCARCYNIDLNSCATNVDAMQALKKENERLGTLVKYGYMKTYHSKDALYKTITAHPNKDGHGLGFSSGSPVSKRVMVNGKECLMFLREGKAPQASEVTCPFTGQTLGSSGQNDGKFLPCKTGSSEHFVRKFRTSDESKGLTGSSWYNARKFRPEGLYYDLYVISKNSEGKVVAYFNGNYNDEYRTCVWVPKALVTNIKGPKLMTGERCMFTSLDEQGGSRENIFFGDDGKGKDCVCSACQAGKQVGSPHPIKNIMTTTRPLELLHMDLFGPVAYISIGGNKYGFVIVDDFSRFTWVYFLHDKSKAQDVFKRFAKQAQNLYDLTIKRVRSDNGGEFKNTQVEKFLDEEGIKHEFSAPYDPPQNGIVERKNRTLIEAARAMLDEYKTSDVFWAEAMSDVDPSQAIGTKAIGDIRLVETQDDQEDRDQPPSSTSNSPTSAVSAEPEVPDPIDQNLRTSPGPIPPVHHPRIHNTVQRDHPVDNILGDIRKGVTTRSRVACFCQHYSFVSSLEPTRVEDALGDPDWVMAMQEELNNFTRNQVWTLAERPKQNVVGTKWIFRNKQDEHGVVVRNKAQIVAQGFTQVEGLDFGETFAPVAHLESIRILLAYAAHHDFRLFQMDVKRAFLNGPISELVYVEQPPGFEDPKLPNHVYKLHKALYGLQQAPRAWYECLQDFLLKNGFEIGKADTTLFTKKFKSDLFICQIYVDDIIFGSTNASFCEEFSSITTKSFEMSMMGELTFFLGIQVKQAQEGTFISQTKYVKDILKKFGMEDTKPIKTPMPTNGHLDLDNNGKCVDQKVYRSMIGSLLYLCASRPDIMLSVCMCARFQAEPKECHLIAVKRILRYLVHTPNLGLWYPKDCDFELLGYSDSDYAGCKVDRKSTTGTCQFLGRSLVSWSYKKQNSIALSTTEAEYVAAGSCCAQLLWMKQTLQDFGYNFTKITLLCDNESAIKIANNPVQHSRTKYIDICHHFLRDHETKRDICLTHVRTETQLADIFTKPLDEKRLCELRSELNILDSRNIRPEVPVFLVRNFRSLSSQPANLDSSNFYFNHCTSTLLILVAVVSMPHEKRQKLSQDVPADSSPPVHGPRRRLGKEKVGNFYSGSQIPIHSRRAGSIVIGDAPRSPSPVASKSDDGGNEDEPSSESNPLRLYKTRVVDPDPRRPSVNYLKNLLKCGMDRMVSPDTMPADSQDDRFRTVVQVDWYNSVIMGRSHPVVEMKWLDWQYMSLKNNLVFSEVRKVCERKHVADLLALQYSWNEEVIGQLYSTAFFGTTKKGIEFVKWTIQGQQYRVSMAQFAAALELDDDDLSRPHIFVENALSPTSTTFLYEKDAPKDCLGTTRGLRPYYRVLYSIF

SEQ ID NO: 110585 - protein, 426 aa, Oryza sativa
  Clone ID: PAT_MRT4530_14638C.1.pep
MPREKRQKLSQDVPADSSPPVHGPRGRLGKENVGDFYSGSQIPIHFRRDGSIVIRDAPRSPSPAASESDNGGNEDEPGSESNPLRLYKTRDDRFRTLVQVDWYNSVIMGRSHPVVEMKWLDWQYMSSKNNLVFNEVRKVCERKHVADLLALQYSWNEEVTGQFYSTAFFGTTKKGLDFVKWTIQGQQYSVSMAQFAAALGLDDDDLSRPHIIVEDALSPTNTTFMYEKDAPKDCLGTTRGLRPYYRVLYSIFRWSLLPKVGDATALSGRHALLLSRMRYNKPDFSIMKLIWSEIYETVCEPKRGCIYAPYIMKMIEAKTGICYFKDNQHKPFCPHAPTTSTTSTARVTRASTSAAPSSSAAPQRSESSSPIKKALRAIFCMCAKIAKKVNKIERRQKEDWIAAGKDDSDISDDEEFVDPFAAYETA

SEQ ID NO: 110586 - protein, 126 aa, Oryza sativa
  unsure (1)..(126): unsure at all Xaa locations
  Clone ID: PAT_MRT4530_14639C.1.pep
ITRMGFRAITTCRLPLTNPXDTQQTKRSFSEPGAECTNSSGTPPEFILESYTHXGRSLXSAKLQGTPPELPLTFYLFSNVHKRYNSVSCNSAQRVVCLKSEVSSSFYSLHMTVMAVGNVLNAPPPS

SEQ ID NO: 110587 - protein, 108 aa, Oryza sativa
  unsure (1)..(108): unsure at all Xaa locations
  Clone ID: PAT_MRT4530_1463C.1.pep
MQLNLKARTRXNKTKAKGWRCAEIVLNVTLSMCGNHLEAYQLNPMSYTKSYCRNRLYRLTQSNSTQPILIVADLDSSRFLFYSRINLRLRLHFDLILFSDADITKFGR

SEQ ID NO: 110588 - protein, 197 aa, Oryza sativa
  Clone ID: PAT_MRT4530_14640C.1.pep
MTREKRQKASQDVSGDESPPIRFPRGRLGKEKVVEGGSGSGTRTSPRFTRQSSNLTVQIRDVDSSQGSDAPNTRGRGRGGGRSSGAGRASHDFPVGSRENPVRLYKTLGFDTTPLHHIRRPKSNYLHQLAKCRRDCLIDPETQPEESQNPRFRTFTQLDWYNSVIMARENPVVEMKWIDVASQNDSKIYPRNSAKNN

SEQ ID NO: 110589 - protein, 109 aa, Oryza sativa
  unsure (1)..(109): unsure at all Xaa locations
  Clone ID: PAT_MRT4530_14641C.1.pep
WLRLHCSGPVFPFRPTRSVEEVELRRRVVGVGGRVGGCRXPSSYAFLLRLGSVPFFSLAILRPLASSFFPLSPVFSCGFFCSRFFLPRLFYIPLAPYCFSIHASTLMSD

SEQ ID NO: 110590 - protein, 53 aa, Oryza sativa
  Clone ID: PAT_MRT4530_14642C.1.pep
AITCGAHRWGTPSGVDTASACPPLRVTRSGSKEVVAAGLGTHGLPFERASASA

SEQ ID NO: 110591 - protein, 171 aa, Oryza sativa
  unsure (1)..(171): unsure at all Xaa locations
  Clone ID: PAT_MRT4530_14643C.1.pep
GHHNSFRPRAPPSFSPVVPRSVPSTSAGPSTSAPPSSSSSSPIKKALQAIXFCMCAKTAKKVKKIERRQKEDRREAGKEVLDDSEDEVYVDPFEAYEAASNVAVEGPSTFFNEESSHSVDDDDDDDDGDEGDTEAAAEDAPTDVDEGDTAAQSDESHLSGDTEIVPSDGDE

SEQ ID NO: 110592 - protein, 285 aa, Oryza sativa
  unsure (1)..(285): unsure at all Xaa locations
  Clone ID: PAT_MRT4530_14644C.1.pep
NFLLKNGFEIGKADTTIFTKKFKSDSFICQIYVDDIIFGSTNASFCEEFSSIMTKRFEMSMMGELTFFLGLQVKQAQEGTFISQTKYVKDILKKFGMEDVKPIKTPMPTNGHLDLDDNGKCVDQKVYRSMRGSLLYLCASRPDIMLSVCMCACFQAEPKECHLIAVKRILRYLVHTPNLCLWYPKGCGFELLGYSDSDYAKCKVDRKSTTGTCQFLGRSLVFWSSKKQNSFGXQTLKDFCYNFTKIPLLCDNESAINIGNNPVQHSRTKHIDIRHHFLRDHETKG

SEQ ID NO: 110593 - protein, 106 aa, Oryza sativa
  Clone ID: PAT_MRT4530_14645C.1.pep
MRNLATLLKGEHILGLTNVTFEKDRSEAQDVFKRFAKQAQNLYDLTIKRNTQVEVFLDEVGIKHEFFAPYDPPQNGIVERKNRTLIEATRAMLDEYKTSDIFWAEA

SEQ ID NO: 110594 - protein, 42 aa, Oryza sativa
  Clone ID: PAT_MRT4530_14646C.1.pep
KNTYGLFWAKIDPLRNVIDALAHSKISRYKDTTLCQFLKDRS

SEQ ID NO: 110595 - protein, 153 aa, Oryza sativa
  Clone ID: PAT_MRT4530_14647C.1.pep
MASPPPPPPSAAAPGSPPSAQVVGNAFVHQYYNILHQSPDLVHRFYQDGSRIGRPASPAAAEMDTVTTMEAINAKIVSMDIVRAEIKAVDAQESLGGGVTVLVTGHLTGSDDVRREFSQSFFLAPQEKGYFVLNDILRYVGGEGDQEVEPEPE

SEQ ID NO: 110596 - protein, 51 aa, Oryza sativa
  Clone ID: PAT_MRT4530_14648C.1.pep
ELVPNSARVYLISTMLTCSGALVTSCSVNECKCYLSQFRANIKEVREALDQ

SEQ ID NO: 110597 - protein, 184 aa, Oryza sativa
  unsure (1)..(184): unsure at all Xaa locations
  Clone ID: PAT_MRT4530_14649C.1.pep
GRVARKFRANGRAEDMTGSSGHNARRFQPDGLYYDSYVISKNSEGKVVAYFNXEYNDEYRTCVWVPKALAYSSGGSSWVVDSGCTNHMTGERSMFTSLDKENGTRENIVFGDDGKGKVIGLGYNCLFTDEDVTVFKRDDSSVPFKGKLKGDLYLVDSNVNRVNPETCLMAKSSMGGLWHRKLPH

SEQ ID NO: 110598 - protein, 108 aa, Oryza sativa
  unsure (1)..(108): unsure at all Xaa locations
  Clone ID: PAT_MRT4530_1464C.1.pep
MQLNPKARTRRNKTKAKRWRCAEIVLNMTLSMCGNHLEAPQFNPMSYTKLHCRNRLHRLTXSDSDLANPXVVDLDFSRFLLYSRIKLRLRLHLDLISFSDADITKFGR

SEQ ID NO: 110599 - protein, 340 aa, Oryza sativa
  Clone ID: PAT_MRT4530_14650C.1.pep
EVEPEPELELSFPPSQQPDSVPAPSANGTSVPREQEAFSQPEQHVADPAPNAQEADLNGEEVYNPPNNTEGPVVEETPIPEVIDEVPNNVAVAMPTPPAPAPAPVPQEEAPKKSYASIVKVMKEIPPQISAIPSRPAPPKQEKQVAPAPVAPVADAPTFSPNPESSNIQEAEVDAHAIYVRNLPLSATPEQLEEAFKKFGAIKPDGIQVRSHKIQGFCYGFVEFEDPSSVQSAVAGSPVTISDRQCYVEEKRTAGSRGGGRGRFAPGRGGNFRGEGMRGRGNYTGGRGNGRGEFNYRSDYGGRGAGRGGSSRGGDVGYQRVDHSAGRAARAPSGTSAVAK

SEQ ID NO: 110600 - protein, 66 aa, Oryza sativa
  Clone ID: PAT_MRT4530_14651C.1.pep
MSFPGASVSSLFSRRGAIASTLARLPPQRGCRGRRRIEAAPGAAASSPPPSHRGRCACRRPEPAIG

SEQ ID NO: 110601 - protein, 133 aa, Oryza sativa
  Clone ID: PAT_MRT4530_14652C.1.pep
MVVPLLTKKIVKKRVKQFKRPHSDRYIGLKTSWRRPKGIDSRVRRKFKGCTLMPNIGYGSDKKTRHYLPNKFKKFVVHNVSELELLMMHNRTYCAEIAHNVSTRKRKEIVERAAQLDIVVTNKLARLRSQEDE

SEQ ID NO: 110602 - protein, 821 aa, Oryza sativa
  Clone ID: PAT_MRT4530_14653C.1.pep
MGRRSKQKVEDMAEELCFVCKDGGDIRVCDFKNCLKGYHPHCVGKEESFLDSAEQFICELHKCVSCKRNSEYHCLCCPSSSVCGECLGKVEFAQFRKQSQTKGLCNNCLKLALFVEKNSEANSDGETVEFRYTENYLVLFKDYWETIKDNEGLALIDLQQANICLRTSLSCKQGRDSEKPPDEDYRADKNSLSVNDGAEQPFPVDVKVQPSEAKMSLKRKKSNKKTYVGWGSKELIEFLSCIGKDTTKPLDEFILTGVVKEYIQQKNLFKDRKRKSVICDDKLHSLFRKRKVKSNMILNLLEIHLAANAASEDDFLDDSEDDEGRIMRKRPCNTLKAAETSERDPKRNKKCFAALNHNNLKLIYLRRTLIMNLMGQDTFEQKVVGSLVRVKNDDNHYSYQMPKKHYQLGLVTGIRKSPQEYKIKDKRTDILLCVSNLWDDIKISMLSEEDIEEDECNDLLLLAKKGLFKRPTVADLEEKAASIHVDIVNHYATQCATGHVPNSVKVLMEDSRGATGHIADSVKVLMEGLPGGATARVADVFNVDMAKSQDASGQVTDYLEVVEEETPEDASGQVADILDVVEEEPPEDASGQVADILELVEEETSEDASGQVASILEVVEEETPEAPGKDLCNGGIPGSGLQNKMHNAQDGGTAQGSDMCNGGNTSRRLNDRKSVIVIDSDSDEDEDPHPEQHEPERAAPRAAMDVVMAPTHGAPVAMNGTSAPTLPCAKRGKNGTTAPKGRVPAIAALHALQSMNAPGEHEYIWNYADPQGKVQGPFTMEHMRNWHRNRFFPPDFRVWRLGQTQNDSVLLTEAMGLKFSS

SEQ ID NO: 110603 - protein, 49 aa, Oryza sativa
  Clone ID: PAT_MRT4530_14654C.1.pep
LLHSWCIDLPGLSVLLRRVVGRHVPSGFHSNPAEGRAATRSGPRVGVKT

SEQ ID NO: 110604 - protein, 234 aa, Oryza sativa
  unsure (1)..(234): unsure at all Xaa locations
  Clone ID: PAT_MRT4530_14655C.1.pep
MLTSAXRPARVGELAGARTVGRGIGGHLRVEDIEMNPMVLTTTTNGARRRPATRRGGAAARVDGGERAPVVGGDGEGAAEVPHLRVHLTVATASGGDGGDGGATRPKTAGGGGGLGARGDGATMHGRGRERGQTEEDDERMLYIASDXRDRTPNERNRLGKKSNSVFRDKXKRTRFGSNPQRFASILGGKERGEREEQNPSKTRRIRARIXGGSEVEDGGSGSAWRRRPEVEDG

SEQ ID NO: 110605 - protein, 96 aa, Oryza sativa
  Clone ID: PAT_MRT4530_14656C.1.pep
MPTTGMESTRSGSRARKVVEEEEVEAVAAAGANAAGWHIGVRSCPAAGDHGPPRPQLPCAATSAPPAPLPQDIDAFLPPVLAEVARHWPCGWEQLS

SEQ ID NO: 110606 - protein, 75 aa, Oryza sativa
  Clone ID: PAT_MRT4530_14657C.1.pep
MRGAGTRRSYGMGASEREAAAGPSPATPASGEAMGGLSRTAGAGVTAPRGKHGYRTEVTAVFILLYPAVTARLPA

SEQ ID NO: 110607 - protein, 118 aa, Oryza sativa
  Clone ID: PAT_MRT4530_14658C.1.pep
FWTPPPPFKDVFNSPPFPACPPLNVPPLLCPVFPVSFFCLGCVCPRTPLLALPLRCGMQGGPFWVIKFQPLMCIGGFSPDQLVGTFVLGPKLLPPEKWNLNQEEIKKKKKKKKKKKRT

SEQ ID NO: 110608 - protein, 151 aa, Oryza sativa
  unsure (1)..(151): unsure at all Xaa locations
  Clone ID: PAT_MRT4530_14659C.1.pep
GTRALRLQHGRRGGHLAVRRLASGCLLLRRPAAPGLVNVAAAGEEEERRGAAPVVLDGSPPPIVLVHGIFGFGGGRLGGLSYFAGAXEKKDDRVLVXPDLGSLTSIHDRARELFYYLKGGQVDYGEEHSKVFGHXRFGRTYDXGHYPVWDE

SEQ ID NO: 110609 - protein, 109 aa, Oryza sativa
  unsure (1)..(109): unsure at all Xaa locations
  Clone ID: PAT_MRT4530_1465C.1.pep
MQLNPKARTRRNKTKAKRWRCAEMVLNVTLSMCGNHLEAPQFNPMSYTKLYCQNRLHWLTXSDSDPADPXIVADLDFSRFLLCSRINLRLQLHLDIISFSDADITKFGR

SEQ ID NO: 110610 - protein, 188 aa, Oryza sativa
  Clone ID: PAT_MRT4530_14660C.1.pep
MATTSAAVAQALARGSGGGGGYAPAESGDDGGQGKLATATSVSYRPNPHGGGGHAPLPPPQNPRRPNLVGAEEVAVAARRRGGMWMGSRWRRCRFVDESAMAAPRLQRWGEGRRHTTTTATAADGSLNDGSGDSGGTPYVSVGAQSRRQWCSEWMGEEESVGGERKGREHHAWGPRLASQFGLAIFGH

SEQ ID NO: 110611 - protein, 74 aa, Oryza sativa
  Clone ID: PAT_MRT4530_14661C.1.pep
KAGLRIRATSWVCNHIHSAYAWDSCYQQQEPLPLMDRVLVDPEKYAVKIMTGAPCLITRVYITLDHLFWVYRVK

SEQ ID NO: 110612 - protein, 70 aa, Oryza sativa
  unsure (1)..(70): unsure at all Xaa locations
  Clone ID: PAT_MRT4530_14662C.1.pep
MTSYLIQRYNEEEAILLDILYWLVASDAFDPSXHKIPGGRPALGYLAAGVLSCPYGLSIIRHVHGTQAVA

SEQ ID NO: 110613 - protein, 365 aa, Oryza sativa
  Clone ID: PAT_MRT4530_14663C.1.pep
MLLTRASPTFLPSTAAAAAAMLLTRASPTFLPSTSAASPSPQQAPSSPTFGRSQYRRGGGLVSVSSPVAGQRCAARRRSVMAAAGAVPAAKLENADALIDSVETFIFDCDGVIWKGDKLIDGVPETLDMLRSKGKRLVFVTNNSTKSRKQYGKKFETLGLNVNEEEIFASSFAAAAYLQSIDFPKDKKVYVIGEDGILKELELAGFQYLGGPSDGDKKIELKPGFYMEHDKDVTWIRTFAGCLVVATNRDAVTHLTDAQEWAGGGSMVGAILGSTKQEPLVVGKPSTFMMDYLAKKFGITTSQICMVGDRLDTDILFGQNGGCKTLLVLSGVTSVQMLQSPDNSIQPDFYTNQISDFLTLKAATV

SEQ ID NO: 110614 - protein, 82 aa, Oryza sativa
  Clone ID: PAT_MRT4530_14664C.1.pep
SSVPGDRPFGIDFITAAANDDHIAICMTERVPVVIFFWSFPPLDWVTQLQNAGVKVWKQMGSLAEATQAKAQGFMRSSRVDR

SEQ ID NO: 110615 - protein, 154 aa, Oryza sativa
  Clone ID: PAT_MRT4530_14665C.1.pep
WSDGVIRGRDLRPSPWPGFNFCGTVEHWMPPWPPPTQPMPLTYPSKFGLVFTIDGVHIDWNLVVAVHKIFWSVMIKSMRHVPSISSELDDIQGKSTMIFIDVTIPEGCNPKKSGSATTETIFNSFSELLDVHLTTIEMLVSKRSQEIRCWQGAL

SEQ ID NO: 110616 - protein, 503 aa, Oryza sativa
  Clone ID: PAT_MRT4530_14666C.1.pep
MHWLFLRPLFFIFAGRKFRCSCTRNLRALSSQPVILASLNFCLTTALQFVDSCCKKVVEGGSGSGTRTSPRFTRQSSNRPVQIRDADSGQGSDAPNTRGRGRGGGRSSGAERASHDFPIGSRENPIRLYKTLVFDTTPMHHIGRPKSNYLHQLAKCRRDRLIDPESQPEESQDPRFRTFTQLDWYISVIMARENSVVGMKWIDWAYMRKKNNEVFNQVTQVCHNKNLGDILAMEYDWNEEVIAQFNVKTFFGTTRKGTPYVKWLTEGVGDATALPSKHAHLLSHMRYNQPPFSVMKLIWYEIANTILEPKRSCIYAPFIMKMIETITGVFYIKDGRHNPFRPHAPPSSSPVVPRSVPCTSAGPSTSAPPSSSSSSPIKKALQAIFCMCAKTAKKVKKIERRQKEDRREAGKQVSDDSEDEVYVDPFEAYEAARNVAGEGPSTFFNEESSHSDDDDDDGDEGDAEAAAEDAPTDVDEGDTVAQSDESHLSDDTEIVPSDGDGDE

SEQ ID NO: 110617 - protein, 123 aa, Oryza sativa
  Clone ID: PAT_MRT4530_14667C.1.pep
MVSPDTLPADFQDDRFRTFVQVDWYNSVIMGRSHPVVEMKWLDWQYMSSKNNIVFNEVRKVCERKHMADLLALQYSWNEWSLLPKVGDATALPGRHALLLSRMRYNKPDFSIMKLIWSEIYET

SEQ ID NO: 110618 - protein, 1499 aa, Oryza sativa
  unsure (1)..(1499): unsure at all Xaa locations
  Clone ID: PAT_MRT4530_14669C.1.pep
MSDLGGKNGENGNEDGASSKGTSLSKGATIPFDYSKLTIPPHNFVSVPSGRAPQFDGTHYAAWKHKMKLHLISLHPSIWKIVCTGVDVPHDDMELTSEQEQLIHRNAQASNAILSALSPEEFNKFDGLEEAKEIWDTLQLAHEGSPAETPQEMYDRMMILVNKIKGLGSEDMTNHFVVKRFLRAFGPRNPTLVSMIRERKDFKRLTPSDILGRIVSHEMQEVEAREVRQMVKNAAMIKNQEVALKVKQEEESSCEESEDEEMAFIVKRFKHFLRKSGYGKGRKYDDKGKRQSKRACFNCDEYGHFVADCPRSNEAKAKGGKKKPERAHVAEAHMAEVWYSADEEDLEVKPKPKPKDKVEGEGGVATVTFKSSSSSKERLFNNLSNDDEDSYHYSCFMAQGCKVMTQKPSHTSLDVDSSDEESDNELDDVLKSFSKPAMQHLAKLMRALDSKKQSLERQEELLILEKKRNLALEESLAKECAKNEQLANELNLANGSLASLRDVNETLQEKFASLDKSHKDLEVQFDTLWNSTSQPNVVSNSSNPSTSNGCARCYNIDLNSHATNVDAMQALKKENERLGTLVRYGCMKTYHSKDALYKTITAHPNKDRHGLGFSGGSPVSKRVMVNGKECLMFVREGKAPQASEAYSSGGSSWVVDSGCTNHMTGEGSMFTSLDEKGGSRENIVIGDDGKGNVMGLGKIAIFKNQSLSNVLLVNSLSYNLLSVSQLCKLGFNCLFTDVDVTIFRRDDSCIAFKGVLKGDLCLVDFDVNRVNPEACLIAKSSMGWLWHRRLVHVGMRNLASLLKGEHILGLSNVSFEKDRVFSACQAGKQVGSPHPIKNIMTTTRPLELLHMDLFGPVAYISIGEGAKRQWRRIKNTQVEEFLDEEGIKHEFSAPYDPPQNGIVERKNRTLIEAARAILDEYKTLDVFWAEAVSTACHAINRLYPHKILKKTSYELLSGKKPNVSYFRVFGSKCFILSKRPRSSKFSPKVDEGFLLCYKSNAHAYRVFNKTSGIVEVTRDVTFDESNDSQGEQVVVHVVGDVDPNQAIGTKAIGDIRPVETQDDQEDRDQPPSSTSNSPTSAVSAEPEVLGPIDRNLRTSPGPEVPGSTVRNLRINGSEDVPTAQVDGIDAEGTLEHSDQAQVPPVHHPXRIHHTIQRDHPXEDALGDPDWVMAMQEELNNFTRNQVWTLVERPKQNVIGTKWIFRNKQDEHGVVVRNKARLFQMDVKSDFLNGPISELVYVEQPPGFEDPKLPNHVYKLHKALYGLKQAPRAWYECLRDFLLKNGFEIGKADTTLFTKKFKSDLFICQIYVDDIIFGSTNASFCEEFSRIMTKSVCMCAHFQAEPKECHLIAVKRILRYLVHTPNLGLWYPKGCGFELLGYSDSDYAGCKVDRKSTTRTCQFLGRSLVSWSSKKQNSIALSTTEAEYVAAGSCCAQLLWMRQTLKDFGYNFTKIPLLCDNESAIKIAKNPVQHSRTKHIDIRHHFLRDHETKGTYALPM

SEQ ID NO: 110619 - protein, 80 aa, Oryza sativa
  Clone ID: PAT_MRT4530_1466C.1.pep
MGWMPFATTVNDRAATGWVEECDDGRTAPPTTIVIVAATTRALTLARHCLRCHNHPDRRICRHRAPCHRSSPPSSSPQTH

SEQ ID NO: 110620 - protein, 1713 aa, Oryza sativa
  unsure (1)..(1713): unsure at all Xaa locations
  Clone ID: PAT_MRT4530_14670C.1.pep
MSDLGGKDGEIGNEDGASNKGTPSPKGATIPFDYNKLTIPSHNFVSVPSGRAPQFDGTYYAAWKHKMKLHLISLHPSIWKIVCTGIDVPHXDMELTSEQEQLIHRNAQASNAILSALSPKEFNKVDGLEEAKEIWDTLQLAHEGSPAVREAKIEFLEGRLGRFVMDDKETPQXMYDRMMILVNKIKGLGSEDMTNHFVVKRLLRAFGPRNPTLVSMIRERKDFKRLTPSDILGRIVSHEMQEEEAREVRQMVKNAAMIKNQEVALKAKQEEESSGEESQDEEMAFIVKRFKHFLRKSGYGKGRKDDDKGKRQSKRACFNCGEFGHFIADCPKSNEAKAKGGKKKTERAHVAEAHMAEVWYSRDEEDPEVKLKPKSKDKVEGEGGVATIAFKSSSSSKERLFNNLSDDDDDSYHYSCFMAQGRKVMTQKPSHTSLDVDSSDEESDNELDDVLKSFSKPAMQHLAKLMRALDSKEQLLERQEELLIHEKKRNLALEESLAKECAKNEQLANELNLANGSLASLRDVNETLQEKFACLDKSHKDLEVQFDTLWNSTSQPNVVSNSSNPSTSNGCAKCYNIDLNSYATNIDAMQALKKENERLGTLVKYGCMKTYHSKDALYKTITAHPNKDGHGHGFSGGSPVSKRVMVNGKECLMFVREGKAPQASEITNLVSSQGPGTSGQTGQNLWVGVSISQKFPPGSSGRFARKFRANGRAQDMTGSSRHNARRFRPDGLYYDSYAYSSGGSSWVVDSGCTNHMTGERSMFTSLNDENGTRENIVFGDDGKGKLGYNCLFTDEDVTVFRRDDSSVAFKGKIKGDLYLVDFDVDRVNPEACLIAKSSMSWLWHRRLAHVGMRNLATLLKGEQSSGSLMSHLRKIRVRSDNGGEFKNTQVKEFLDEVGIKHEFSAPYDPPQNGIVERKNQTLIEAARSMLDEYKTSDIFWVEAVSTTCHAINRLYLHKILKKTSYELLSGKKPNVSYFRVFGSKCFILSKRPRSSKFSPKVDEGFLLGYESNAHAYRVFNKTSGIVEVTRDVTFDESNGSQGEQVVVHVVGDVDSSQAIGTKAIGDIRPVKTQDDQEDRDQPSSSTSNSPTLSQVSVDPEVPGPDGRNLRTSPSQEVPGPSARKFRAEDSQGVPTAQVDGIDAEGTVEHPDQAQVPSVHHPRIHHTVQRDHPVDNILGDIRKEVTTRSRVANFCQHYLFVSSLEPTRVEDALGDLDWVMAMQVELNNFTRNQVWTLVERPDQNVIGTKWIFRNKPDEHGVVVRNKARLVAQGFTQIEGLDFGETFTPVAHLESIRILLAYAAHHDFRLFQMDVKSAFLNGPISELVYVEQPPGFEDPRLPNHVYKLHKALYGLKQAPRAWYECLRDFLLKNGFEIGKADTTLFTKKSKSDLFICQIYVDDIIFGSTNASFCEEFSSIMTKRFEMSMMGELTFFLGLQVKQVQEGTFISQTKYVKDILKKFGMEDAIPIKTPMPTNGHLDLDDNGKCVDQKVYRSMIGSLLYLCTSRPDIMLSVCMCARFQAEPKECYLIAVKRILRYLVHTPNLGLWYPKGCDFELLGYSDSDYAGCKVDRKSTTGTCQFLGRSLVSWSSKKQNSIALSTAEVEYVATGSCCVQLLWMKQTLKDFGYNFTKIPLLCDNESAIKIANNPVQHSRTKHIDIRHHFLRDHETKGDICLTHVRTESILADIFTKPLDEKRFCELRSELNILDSRNIR

SEQ ID NO: 110621 - protein, 1620 aa, Oryza sativa
  unsure (1)..(1620): unsure at all Xaa locations
  Clone ID: PAT_MRT4530_14671C.1.pep
MSDLGGKNGENGNEDGTSSKETPSPKGATIPFDYSKLTIPPHNFVSVPSRRAPQFDGTHYAAWKHKMKLHLIFLHPSIWKVVCIGIDVPHDDMELTSEQEQLIHRNAXASNPILSALSPEEFNKVDGLEEAKEIWDTLQLAHEGSPAVREAKIELLEERLGRFVMDDKETPQEMYDRMMILVNKIKGLGSEDMTNHFVVKRLLHAFGPRNPTLVSMIWERKAFKRLTPSDILGRIVSYEMQEETAREVRQMVKNPTMIKNQEVALKAKHEEMTFIVKRFKHFLRKSGYGKGRKDDDKGKRQSKRACFNCGEYGHFIADCLKSNEAKAKGGKKKPERAHVAEAHMAEVWYSADEEDLEVKPKPKPKDKVEGEGGVATVTFKSSSSSKERLFNNLSNDDEDSYHYSCFMAQGCKVMTQKPSHTSLDVDSSDEESDNELDDVLKSFSKPAMQHLAKLMRALDSKKQSLERQEELLILEKKRNLALEESLAKECAKNEQLANELNLANGSLASLRDVNETLQEKFASLDKSHKDLEVQFDTLWNSTSQPNVVSNSSNPSTSNGCARCYNIDLNSHATNVDAMQALKKXNERLGTLVRYGCMKXYHSKDALYKTITAHPNKDRHGLGFSGGSPVSKRVMVNGKECLMFVREGKAPQAIEVTCPLTGQTLGSSGQNDRKFLPCKTGSSGHFVRKFRASDRPKGLXRKFRPEGLYYDSYAYSSGGSSWVVDSGCTNHMTGEGSMFTSLDEKGGSRENIVIGDDGKGNVMGLAYISIGGNKYGFVIVDDFSRFTWVYFLHDKSEAQDVFKRFAKQAQNLYDLTIKRVRSDNGGEXKNTQVEEFLDEEGIKHEFSAPYDPPQNGIVERKNRTLIEAARAILDEYKTLDVFWAEAVSTACHAINRLYPHKILKKTSYELLSGKKPNVSYFRVFGSKCFILSKRPRSSKFSPKVDEGFLLCYKSNAHAYRVFNKTSGIVEVTRDVTFDESNDSQGEQVVVHVVGDVDPNQAIGTKAIGDIRPVETQDDQEDRDQPPSSTSNSPTSAVSAEPEVLGPIDRNLRTSPGPEVPGSTVRNLRINGSEDVPTAQVDGIDAEGTLEHSDQAQVPPVHHPXRIHHTIQRDHPVDNILGDIRKGVTSRSRIASFCQRFSFVSSLEPTRVEDALGDPDWVMAMQEELNNFTRNQVWTLVERPKQNVIGTKWIFRNKQDEHGVVVRNKARLVAQGFTQVEGLNFXETFAPVARLESIRILLAYAAHLDFRLFQMDVKSDFLNGPISELVYVEQPPGFEDPKLPNHVYKLHKALYGLKQAPRAWYECLRDFLLKNGFEIGKADTTLFTKKFKSDLFICQIYVDDIIFGSTNASFCEEFSRIMTKRFEMSMMGEXTFFLGLQVXQALEGTFISQTKYVKDILKKFGMEDAKPIKTPMPTNGHLDLDDNGKCVDQKGCGFELLGYSDSDYAGCKVDRKSTTRTCQFLGRSLVSWSSKKQNSIALSTTEAEYVAAGSCCAQLLWMRQTLKDFGYNFTKIPLLCDNESAIKIAKNPVQHSRTKHIDIRHHFLRDHETXGDICLTHKRXKLSQDVPADSSPPVRGPRGRLGKEKVGDFYSGSQIPIHSRRARQILRHPPRIRLCSRR

SEQ ID NO: 110622 - protein, 1359 aa, Oryza sativa
  Clone ID: PAT_MRT4530_14672C.1.pep
MGTERKRKVSREPLRRGRQDLRLRQARRRRHHQRHRRRRGGQPAPNRRGTSSPKTLEKRRTLPVWQLKDDFLAVLHDNQALILVGETGSGKHSDGIAPQYLDPQIHRSAAIGSGEWHSGFQYGVDKVFQPLPSSPSMGHELLCWGSVLSGESVFRPLPSLPSTGQSAFPSATALHLVCLYSFCCQLVGFTILYSTTDDLHGHCFMRRKFMDGLQFLEHLKMAIAGRVKTIILVKTTGMETLHQLILVLFSIRISIIVGTIWFQQSSNILNTVAYSYVQLKDYIKRLMNDHKTEGFFDTNDDSINWVLVIVDCWLIFTRKGNSWQDTFEEVVVEACERWTENREKVEPKPKSKDKVEGEGGVATVAFKSSSSSKERLFNNLSDDDDDSYHYSYFMAQGRKVMTQKPSHTSLDVDSSDEESDNELDDVLKSFSKPAMQHLAKLMRALDSKEQSLERQEELLILEKKRNLALEESLAKECDKNEQLANDLNLANGSLASLRDVNETLQEKFANSDKSHKDQVQFDTLWNSTSQPNVVSNSSNPSTSNSCARCYNIDLKSYATNIDAMQALKKENERLGTLVKYGCMKTYHLKDALYKTITAHPNKDGHGLGFLGGSPVSKRVMVNGKECLMFVREESKVVANFNGNYNDEYRTCVWVPKALAYSSGGSSWVVDSGCTNHMTGERSMFTSLDKENETRENIVFGDDGKGKLGYNCLFTDEDVTVFRRDDSSVAFKGKLKGDIYLVDFDVDRVNPEACLIAKSFMGLLWHRKLAHVGMRNLATLLKGEHIIGLTNVTFEKDRVCSACQARKQVGNLHPIKNIMTTTRPLELLHMDLFRPVAYISIGGNKYGFVIVDDFSRFTWVYFLHDKSEAQDVFKRFAKQAQNLYDLTIKRVRSNNGGELKNTQVEEFLDGEGIKHEFSASYDPPQNGIVERKNRTLIEAARAMLDDPTKSQESVDPEVPGSDDRNLRTSPGQEVLGPSARKFRAEDSQGVPTAQVDGIDAEGTIEHPDQAQVPSVHHPRIHHTVQRDHPVDNLLDDIRKGRPDQNVIGTKWIFRNKQDEHGVVVRNKARLYQMDVKSAFLNGPISELVYVEQPPGFEDPKLPNHVYKLHKALYGLKQAPRACSIMTKRFEMSMMGELTFFLGLQVKQAQDGTFISQTKYVKDILKKFGMEDTKPIKTPIPTNGHLDLDENGKCVDQKGCDFELLGYSDSDYAGCKVDRKSTTGTCQFLGQSLVSWSSKKQNFIALSTAEAEYVAAGSCCAQLIWMKQTLKDFGYNFTKIPLLCDNENVIKIANNHVQHSRTKHIDIRHHFLRDHETKGDICLTHVRTESQLADIFTKPLDEKRFCELRSELNILDSRNIR

SEQ ID NO: 110623 - protein, 433 aa, Oryza sativa
  Clone ID: PAT_MRT4530_14673C.1.pep
MGCFNSKPNDTGAIRRRPGSIGEVAVFVPGLRVPESSDELPLQPLGDGLPRRLTERLAALRNRIIVMAAHEALYMTKPTWRITITQHGGSKSADLLQALEDYLPTLLGLVKDGSELEDKVQFAWMNQEDDAEDTSMPSAWYEVLSVLHLMALLRLSQANSLLVPKTSIEGYHAKVSEENKRASVEIFLKAAGYLECAIQHVLPKISPEKRWKGLPVDLAEGILKAICMQALGQAIDVQLGLAIDSPKATLAVKRRLACEMVKCWQQAHESISDLPLLDGWAEKHRLFVTWKHIEAKAAAYYYHGLILDEGNSEKSHRTAVAALQSAEELLKESKAACEAFHAASPVSRRAFHSFQISPPLWGSMRYLQEKIHKESSCKVRINKDLYNKDNIIIHDHADSAPPLPDFAVALKPDEDGYQLGIDDMEGIDYHDRE

SEQ ID NO: 110624 - protein, 1113 aa, Oryza sativa
  unsure (1)..(1113): unsure at all Xaa locations
  Clone ID: PAT_MRT4530_14674C.1.pep
DCWLIFTRKGNSWQDTFEEVVVEACERWTENREKVEPKPKSKDKVEGEGGVATVAFKSSSSSKERLFNNLSDDDDDSYHYSYFMAQGRKVMTQKPSHTSLDVDSSDEESDNELDDVLKSFSKPAMQHLAKLMRALDSKEQSLERQEELLILEKKRNLALEESLAKECDKNEQLANDLNLANGSLASLRDVNETLQEKFANSDKSHKDQVQFDTLWNSTSQPNVVSNSSNPSTSNSCARCYNIDLKSYATNIDAMQALKKENERLGTLVKYGCMKTYHLKDALYKTITAHPNKDGHGLGFLGGSPVSKRVMVNGKECLMFVREXGPGTSGQTGKNLRVGVSVSQKFPPGXFRANGRAQDMTGSSGHNARRFRPEGLYYDSYVIFKNSESKVVANFNGNYNDEYRTCVWVPKALAYSSGGSSWVVDSGCTNHMTGERSMFTSLDKENETRENIVFGDDGKGKLGYNCLFTDEDVTVFRRDDSSVAFKGKLKGDIYLVDFDVDRVNPEACLIAKSFMGLLWHRKLAHVGMRNLATLLKGEHIIGLTNVTFEKDRVCSACQARKQVGNLHPIKNIMTTTRPLELLHMDLFRPVAYISIGGNKYGFVIVDDFSRFTWVYFLHDKSEAQDVFKRFAKQAQNLYDLTIKRVRSNNGGELKNTQVEEFLDGEGIKHEFSASYDPPQNGIVERKNRTLIEAARAMLDDPTKSQESVDPEVPGSDDRNLRTSPGQEVLGPSARKFRAEDSQGVPTAQVDGIDAEGTIEHPDQAQVPSVHHPRIHHTVQRDHPVDNLLDDIRKGRPDQNVIGTKWIFRNKQDEHGVVVRNKARLYQMDVKSAFLNGPISELVYVEQPPGFEDPKLPNHVYKLHKALYGLKQAPRACSIMTKRFEMSMMGELTFFLGLQVKQAQDGTFISQTKYVKDILKKFGMEDTKPIKTPIPTNGHLDLDENGKCVDQKGCDFELLGYSDSDYAGCKVDRKSTTGTCQFLGQSLVSWSSKKQNFIALSTAEAEYVAAGSCCAQLIWMKQTLKDFGYNFTKIPLLCDNENVIKIANNHVQHSRTKHIDIRHHFLRDHETKGDICLTHVRTESQLADIFTKPLDEKRFCELRSELNILDSRNIR

SEQ ID NO: 110625 - protein, 2102 aa, Oryza sativa
  Clone ID: PAT_MRT4530_14675C.1.pep
MSDLGGKNGENGNEDGASSKETPSPKGATIPFGYRKHTIPPHNFVSVPSGRAPQFDGTHYAAWKHKMKLHLISLYLSIWKVVCKGVDVPHDDMELTSEQEQLIHRNAQASNAILSALSPEEFNKVDGLEEAKEIWDTLQLAHEGSPAVREAKIDLLEGRLGRFVMDDKETPQEKYDRTMILVNKIKGLGSEDMTNHFVLKRLLRALGPRNPTLVSMIRERKDFKRLTPSDILGRIVSHEMQEEEARERFKHFLRNSGYGKGRKDDDKGKRQSKRACFNCGEYGHFVANCPKSNEAKAKGGKKKPEHAHVAEAHMAEVFYSGDEEDPEVKPKPKPKDKVEGEGGVATVAFKSSSSSKKRLFNNLSDDDDDFYHYSCFMAQGRKVMTQKRSHTSLDVDSSDEESDNELDDVLKSFRKPAMQHLAKLMRALDSKEQSLERQEELLILEKKRNLALEESLAKECAKNEQLANELNLANGSLASLSDVNETLQEKFASLDKSHKDLEVQFDTLWNSTSQPNVVSNSSNPSTSNGCARCYNIDLNSHTTNVDAMQALKKENERLGTLVKYGCMKTYHSKDALYKTINHLNMDGHGLGFSGGSPVSKRVMAYSSGGSSWVVDSGCTNHMTGERSMFTSLDEGAGSRENIVFGDDGKGKVMDLGKIAISKNQSLSNVLLVNSLRVNPEACLIAKSSMGWLWHRRLAHVGMRNLASLLKGEHILGLYNVSFEKDCVCSACQAGKQVGSPHPIKNIMTTTRPLELLHMDLFGPVAYISIGGNKYGFVIVDDFSRFTWVYFLHDKSEDQDVFKRFAKQAQNLYDLTIKRVQSDNGGEFKNTQMEEFLDEEGIKHEFSAPYDPPQNGIVERKNRTLIEATRAMLDEYKTSNVFWAEAVSTACHAINRLYLHKILKKTSYELLSGKKPNVSYFRVFGSKCFILSKRPRSSKFSPKVDEGFLLSYESNAHAYCVFNKTSGIVEVTRDVTFDESNGSQGEQVVVHVVGGVDPNQAIGTKAIGDIRPVETQDDQEDRDQPPSPASNSPTSVVSAESEIPGPIDRNLRTSLGPEVPGSIVRNLWISGSEDMPTAQVDGIDAEGTLEHSDQAQVPPVHHPRIHHTVQREHPVDNILGDIRKGVTTRSRITSFCQHFSFVSSLEPTRVEDVLGDPDWVMAMQEELNNFTRNQVWTLVERPKQNVIATKWIFRNKQDEHGVVVRNKARLFQMDVKSAFLNGPISELVYVEQPPGFEDPKLPNHVYKLHKALYGLKQAPRACSIMTKRFEMSMMGELTFFLGLQVKQALEGTFISQTKYVKDILKKFGMEDAKPIKTPMPTNGHLDLDHNGKCVDQKVYRSMIGSLLYLCASRLDIMLSVCMCARFQAEPKECHLIAVKRILRYLVHTPNLGLWYPKGCGFELLGYSDSDYAGCKVDRKSTTGTCQFLGWSLVSWSSKKQNSIALSTAEAEYVAADSCCAQLLWMRQTLKDFGYNFTKIPLLCDNESAIKIANNPVQHSRTKHIDIRHHFLRDHETKGDICLTHVTTESQLADIFTKPLDEKRFCELRSELNILDSRNIRLEVPVTPVRNFRGSGGINTQGEPEPVVIMPREKRQKLSQDIPADSSPPIPIHSRRAGSIVIRDAPRSPSPTASESDDGGNEDEPGSESNPLRLYKTRAVDPDPKRPRVNYLKNLLKCGKDRMVSPDTLPADSQDDRFRTLVQVDWYNSVIMGRSHPVVEMKWLDWKYMSSKNNIVFNEVRKVCEHKHAADLLALQYSWNEEVIGQFYSTAFFGTTKKGLDFVKWTIQGQQYRVSMAQFVAALGLDDDDLSRPHIFVEDALSPTSTTFMYEKDAPKDCLGTTRGLHPYYRVLYSIFRWSLLPKVGDATALPGRHALLLSRMRYNKPDFSIMKLIWSEIYETVCEPKRGCIYAPYIMKMIEAKTGICYFKDNQYKPFRPHAPTTSATPTTRVTSASTSAAPSFSAAPQRSESSSPIKKALKAIFCMCAKTAKKVKKIERRQKEDWIAVGKDVSDISDDEEFVDPFAAYETAQDIGSGEGPSGTSRFFNEESCHSEESSDDEESDAPTENVPTDPDEAVDAAGQDIDSPHSGDTEIIPSDGDIDEA

SEQ ID NO: 110626 - protein, 1756 aa, Oryza sativa
  Clone ID: PAT_MRT4530_14676C.1.pep
MSDLGGKNGENGNEDGASSKGTPSPKGATIPFDYSKLTIPPHNFVSVPSGRAPQFDGTHYAAWKHKMKLHLISLHPSIWKVVCTSVDVPHDDMELTSEQEQLIHRNAQASNAILSALSPEEFNKVDGLEEAKEIWDTLQLAHEGSPAVREAKIELLEGRLGRFVMDDKETPQEMYDRMMILVNKIKGLGSEDMTNHFVVKRLLCAFGPRNPTLVSMIRERKDFKRLTPSDILGRIVSHEMQEEEAREVRQMVKNAAMIKNQEVALKAKQEEESSCEESEDEEMAFIVKRFKHFLRKSGYGKGRKDDDKGKRQSKRACFNCGEYGHFIANCPKSNEAKAKGGKKKPERAHVAEAHMAEVWYSGDEEDPEVKPKPEPKDKVEGEGGVATVAFKSSSSSKERLFNNLSDDDDDSYHYSCFMAQGRKVMTQKPSHTSLDVDSSDEESDNELDDVLKSFSKPAMQHLAKLMRALDSKEQSLERQEELLILEKKRNLTLEESLAKECAKNEQLANELNLANGSLASLTDVNETLQDKFANLDKSHKYLEVQFDILWNSTYKPNVVSNSSNPSTSNGCARCYNVDLNSYATNVDAMQALKKENERLGTLVKYGCMKTYHSKDALYKTITAHPNKDGHGLGLSGGSPVSKRVMVNGKECLMFVREGKAPQASEVTCPFTSQTPESSRKNDRKFLPCKTGSSRHFVRKFRASDKPKGLTGSSGYNARKFQPEGLYYDSYVISKNSEGKVVAYFNGNYNDEYRTCVWVPKALAYSSGGSRWVVDSGCTNHMTGERSMFTSLDEEGGSRANIVFGDDGKGKVMGLGEYILGLSNVSFEKDRVCSACQAGKQVGSPHPIKNIMTTTRPLELLHMDLFGPVAYVSIGGNKYGFVIVDDFSRFTWVYFLHDKSKAQDVFKRFVKKAQNLYVLTIKRVRTDNGGEFKNTQVEEFLDEEGIKHEFSAPYDPPQNGIVERKNRTLIEAARAMLDEYKISDVFWVEAVSTACHAINRLYLHKILKKTSYELLSGKKPNVSYFHVFGSKCFILSKRPRSSKFSPKVDEGFLLGYESNAHAYRVFNKTSGIVEVTRDVTFDESNGSQGEQVVVHVVGDVDPSQAIGTKAIGDIRPVETQDDQEDRDQPPSLTSNSLTSAVSAEPEVLGPIDQNLRTSPGPEVPGSTIRNLRTSGSEDVPTAQVDGINAAGTLEHTDQAQVPPMHHPRIHDSVQRDHPVDNILGDIRKEVTTRSRVASFCQHFSFVSSLEPTRVEDALGDPDWVMAIQEELNNFTRNQVWTLVERPKQNVIGTNWIFRNKQDKHGVVVRNKARLVSQGFTQVEGLDFGETFALVARLESIRILLAYAAHHDFRLFQMDVKSAFLNGPILELVYVEQPLGFEDPKLPNHVYKLHKALYGLKQAPRVWYECLRDFLLKNGFEIGKADTTLFTKKFKSDLFICQIYVDDIIFGSTNASFCEEFSSIMTKRFEMSMMGELTFFLGLQVKQAQEGTFISQTKYVKDILKKFGMEDAKPIKTPMPTNGHLDLDDNGKCVDQKVYRSMVGSLLYLCASRPDIMLSVCMCARFQAEPKECHLIAVKRILKYLVQTPNLGLWYPKGCELLGYSDSDYAGCKVDRKSTAGTCQFLGRSLVSWSSKKQNSIALSTAEAKYVAAGSCCAQLLWMKQTLKDFGYNFTKIPLLCDNESAIKIANNPIQHSRTKHIDIRHHFLRDHETKGDTCLTHVRTKTQLANIFTKPLDEKRFCELWSELNILDSRNIR

SEQ ID NO: 110627 - protein, 859 aa, Oryza sativa
  unsure (1)..(859): unsure at all Xaa locations
  Clone ID: PAT_MRT4530_14677C.1.pep
MVAGGGHRHGGAAAERGEGRGKRNGRSTAHPGSTATTGTATGAEEGGGAARVDGDGGVLAVGGRNGRVDEVGEDAAEPKEATPRREEAFTWILLILCIILRMYFRVVLGRDSELTFFLGLQVKQAQEGTFISQTKYVKDILKKFGMEDAKPIKTPMPTNGHLDLDDNGKCVEQKGCDFELLGYSDSDYAGCKVDRKSTTGTCQFLGRSLVSWSSKKQNSIALSTAEAEYVAAVSTMPREKRQKASQDVSGDESPPIRFPRGRLGKEKVVEGGSGSGTRTSPRFTRQSSNRPVQIRDVDSGQGSDAPSSRGRGRGGGRTSRAGRASHDFPVGSRENPVQLYKTLGFDTTPMHHIGRPKSNYLHQLAKCRRDRLLDPETQPEESQDPRFRTFTQLDWYNSVIIARDNPMVEMKWIDWTYIRKKNNEVFNQAMQVCHNKNLGDILALEYDWNEEVIAQFYATALFGTTRKGTPYVKWMTEGVRHKISIAQFAKILGLEDEDLNSPNIHSEAPLPMIKTKFMYTKDAPRTCMGTTHGLHSNYKVLYSIFRWSLLPKVGDATALPSKHAHLLSRMRYNQPPFSVMKFIWYEIANTILEPKRGCIYAPFIMKMIETVTGVFYIKDGRHNPFHPRVPPSSYPVIPRSIPSTSAGPSSSAPPQSSSSSPIKKALQAIFCMCAKTAKKVKKIERXRQKEDRREAGKEAYEAARNVAGEGPSTYFNEESSRSDDDEEEDDAEAAAEDAPTDVDTAAQSDESHLSGDTEIVPSDGDGDESLVPKQVVMAKNVFGIIFGNDFPRDREAYPEVLAGTSGHQSLFSPRDREGYPEVLAGTSRHRSLARFFLSATRKFFALLPGTSWQVSSSIL

SEQ ID NO: 110628 - protein, 47 aa, Oryza sativa
  Clone ID: PAT_MRT4530_14678C.1.pep
LSAKPLAIPAPRGRRPPNQPDRLSLAECRVLASSGGGNGLPLHGSTV

SEQ ID NO: 110629 - protein, 43 aa, Oryza sativa
  unsure (1)..(43): unsure at all Xaa locations
  Clone ID: PAT_MRT4530_14679C.1.pep
DGRGCGACYHIRCTNNPYXCGQSMTVIITDMNYYPVDRCNFHL

SEQ ID NO: 110630 - protein, 130 aa, Oryza sativa
  Clone ID: PAT_MRT4530_1467C.1.pep
IVGFTRENGAGPVGAPQLPIGSGVRERGKNGDRGVPGGRGVPSQNHTKDKPETEKKKPGGPKEREKTHKKGGAQSPGSKGENRLARGTKKKPPPRGEGNWASRAPEGFLFPRGRGNTGEGPTGGASERGG

SEQ ID NO: 110631 - protein, 136 aa, Oryza sativa
  unsure (1)..(136): unsure at all Xaa locations
  Clone ID: PAT_MRT4530_14680C.1.pep
MAESAVSAAVGSISNLAAQETSLLCGVMDEVGFLKAELERLHGFLEDAKHKRRSGDASAAVLVGQIRDAAYDAENVIEASEYMVKRNKLKKGFMGAISRYAPFTNXLIALHKIGVEIPWIRRKISEIIYQCQPVKN

SEQ ID NO: 110632 - protein, 55 aa, Oryza sativa
  Clone ID: PAT_MRT4530_14681C.1.pep
ACADCCVHFWCNKCALCQEYRELVARGYDPKLGWDLNVQRGAAAAAAPAVQHMGR

SEQ ID NO: 110633 - protein, 88 aa, Oryza sativa
  Clone ID: PAT_MRT4530_14682C.1.pep
LGRRTSGCDNYQHTPTRSHNIQAYVSQDTLSDIDFGDRHSYSPTVSPDTVRRYESAISDLAGHGFEEEGYPVVDYESDLQTDMSTTVR

SEQ ID NO: 110634 - protein, 130 aa, Oryza sativa
  Clone ID: PAT_MRT4530_14683C.1.pep
MVIVTVAMPISAAAGPSSPLSPLFKPLQAAIKLRFRQPAFVAKFVSLLIADAQDVPTLAYQLLLVSSAACLLRFIGSHITRQVEGTVLMHVTLADKQEHALAREVVVAIKADAGGTFRRFAVVVLLSVEV

SEQ ID NO: 110635 - protein, 84 aa, Oryza sativa
  unsure (1)..(84): unsure at all Xaa locations
  Clone ID: PAT_MRT4530_14684C.1.pep
LAQFESDRVSRLSRFXQYDSLGQKSAAKTYGILEFVRDKSRVRHGHILIKSTGTLIDPKARFFGPALELSRSPRPRVFASTVCP

SEQ ID NO: 110636 - protein, 372 aa, Oryza sativa
  Clone ID: PAT_MRT4530_14685C.1.pep
MRLRFKTTVDISLAASMAYAAFGAAVAYPASAPAALARAFALGYGALLFLLPFSVYALEFLRPPYPIDRTPLSMITCATATPVALSVAVLTVLNQGRAGGDVAFAACVVWIADVAAVLSLAWCLTHGGTMGVALNRRGQYGEICKVQERMKKSNNHAAVDVRYAIRDAKIRFAVAVSAAVAVAGGVVIGGVSFKGLSYAAVFFALPTNLLYFRDTYAYPTDHMPKQLEWCYVSVPMAVMLLSRLMLAARQATTLDIRLVAVTAVMLAIDFTAIGFLEWHSRREMPKPRGTRASAAEIVTSFVMRGRGSESSSAADGGVWVEGKPLMGKREGVAMKESSACAGVGSGSRISAKLRASINGVRSSSSSNLAGMR

SEQ ID NO: 110637 - protein, 74 aa, Oryza sativa
  Clone ID: PAT_MRT4530_14686C.1.pep
VAPVTTLSVSSTLSTRLHNFSREISSIIYMFRHLRQSYSIFSLLVPIVDPMRCRRPCDLRESKHSGILRLFILA

SEQ ID NO: 110638 - protein, 106 aa, Oryza sativa
  Clone ID: PAT_MRT4530_14687C.1.pep
YAVVIVEADMSHLEEAPSGGENGGTHVHYLLLLHRLQMLEVKPLINQILLVGQSPTLMSPQYTPPIYLWFECVLTIDESNTPAIDKLISMVSFSDYTSINCCIGEI

SEQ ID NO: 110639 - protein, 174 aa, Oryza sativa
  Clone ID: PAT_MRT4530_14688C.1.pep
MAAARPSRCLELIRQEIEQAANPASRRRGGQRGDGGAQVMWTLLEWHDAPAPSVAASTRSRRAECLGTCAASSPIPVAAGEGGDGGAAASASRAAPAAMLPVSTTTSSADSVGDDPTGEAAAAADDDDDEGRPCITSRDGIAPPELWTRREEVSAKKQSDALVHRTICTVRGKA

SEQ ID NO: 110640 - protein, 297 aa, Oryza sativa
  Clone ID: PAT_MRT4530_14689C.1.pep
MHLLSGCVVATAVVLVLISLGAAPPAAVDAATATFIYAGCSPSKYEPNTAFQSNLNSLLSSIASTASSGAAYNSFTAGGGAGPDPAAGTAAYGLYQCRGDLSPGDCVACVRQTVARLGAVCANAYAASLQVDGCYVRYDAADFIGRADTTTAYRKCSSSTSRDGAFLSSRDGVLGELQAAAGYKLSTSGTVQGVAQCLGDVPANDCTACLAEAVGQLKGACGTALAADVYLAQCYVRYWANGYYFRPNSDNSGDDVGRTVAIIIGILAGLALLVVFISFLRKAFGLQSAKKKRLICV

SEQ ID NO: 110641 - protein, 91 aa, Oryza sativa
  unsure (1)..(91): unsure at all Xaa locations
  Clone ID: PAT_MRT4530_1468C.1.pep
KQDMTHNXXQPTTMIQPSIVLGFDLHKTIHNLKFILGIGFIYSTLRQNTTPLYLQASIRRARLVISLHVTYQFYHTTALSPFFVVPGHNLN

SEQ ID NO: 110642 - protein, 127 aa, Oryza sativa
  Clone ID: PAT_MRT4530_14690C.1.pep
GAAAGGAPGALPAATTGGEGGGRGPRRDPPSWPAGGVRGAYYGGDQGGFPRGPAGQRRAEGWPAPPPKETHAAAWPRAGGRLLLWGPPPFFFLFFFFFFFFFFFFFFFFIFFFFFFFQKNIEVIGTR

SEQ ID NO: 110643 - protein, 203 aa, Oryza sativa
  Clone ID: PAT_MRT4530_14691C.1.pep
GEDKFRELGLCDMGEDIAQRWTDEEESLFYRVVYSNPPSLGKNFWHFLPRALPGKTSMELVSYYFNVFMLRKRAQQNRSEPLHVDSDDDEVPDEPSVTEDEDSAVESPAHDYYVNNPMSPESEDSFHEKVADSLSGLRDGPSQKPLGSNTDNPGGDADVQDESCTSFEDHNGAHGSNGVQCAEFHMMLPNAALDHYSDRGACM

SEQ ID NO: 110644 - protein, 245 aa, Oryza sativa
  Clone ID: PAT_MRT4530_14692C.1.pep
MATRIQFENNCEVGVFSKLTNAYCLVAIGGSENFYSAFESELADVIPVVKTSIGGTRIIGRLCVGNKNGLLLPHTTTDQELQHLRNCLPDQVVVQRIDERLSALGNCVACNDHVALTHPDLDKATEELIADVLGVEVFRQTIAGNILVGSYCAITNRGGLVHPHTSIEDLDELSTLLQVPLVAGTVNRGSEVIAAGMTVNDWTAFCGSDTTATELSVIESVFKLREGQPAAIVDDMRKSLIDSYV

SEQ ID NO: 110645 - protein, 240 aa, Oryza sativa
  Clone ID: PAT_MRT4530_14693C.1.pep
MAAPFALVSRVSPAARLPIRAAWRRARPTVGLPSSGRARQLAVASAAQENRDNTAVDVHVNQDGGNQQGNAVQRRPRRSSALDGISPFGLVDPMSPMRTMRQMLDTMDRIFDDVALGFPATPRRSLATGEVRMPWDVMEDDKEVRMRFDMPGLSREEVKVMVEDDALVIRGEHKKEEGEGAEGSGDGWWKERSVSSYDMRLALPDECDKSKVRAELKNGVLLVTVPKTEVERKVIDVQVQ

SEQ ID NO: 110646 - protein, 57 aa, Oryza sativa
  Clone ID: PAT_MRT4530_14694C.1.pep
VKVYCALCGATTCNDARYALAWYQLYLCSADFILNVSCTPSETHPPCNKTNELYTCM

SEQ ID NO: 110647 - protein, 68 aa, Oryza sativa
  unsure (1)..(68): unsure at all Xaa locations
  Clone ID: PAT_MRT4530_14695C.1.pep
PGPVLRTIHPNVLDSXGVNSALEKLGINWDXVGQHLKLEGVDSFKKAFYNLLGSLEEKGHSLKKTLSL

SEQ ID NO: 110648 - protein, 107 aa, Oryza sativa
  Clone ID: PAT_MRT4530_14696C.1.pep
MATGGRGRGLCTKQDLAALGRIDGVNVGEPAEAAAAASSSSLGPRRRHAVRVPRLRTRRCQRQLMKINAATQQEESAARGVIYSCCVRLLAIQAAATVAAISQIDYK

SEQ ID NO: 110649 - protein, 224 aa, Oryza sativa
  Clone ID: PAT_MRT4530_14697C.1.pep
MANCGRRFAAAGAPATARRCNLELFLEATTPVVPTTACSSKKSMNGWKQSDEENALPFFSLGDLWDGFRESSAYGIAVPIVLNGCSDGVVQYYVPYISAMSCDLSPTSWMSVAWYPIYRIPTGPTLRDLDACFLTYHPLSTQLTGGICPEPKGNNSGVPVTTAMCLPTFAMASYRLKVAAWAPGGRDRQLVASLSHAADAWLGLLGVHHPDHRFFAARRVVSRR

SEQ ID NO: 110650 - protein, 2236 aa, Oryza sativa
  unsure (1)..(2236): unsure at all Xaa locations
  Clone ID: PAT_MRT4530_14698C.1.pep
MSDLGEKNGENGNEDGASSKGTPSTKGATIPFDYSKLTIPSHNFVSVPSGHAPQFDGTHYAAWKHKMKLNLISLHPSIWKVVCTGVDVPHDDMELTSEQEQLIHRNAQASNAILSALSPEEFNKVDGSEEAKEIWDTLQLAHEGSPAVCEAKIELLEGRLGRFVMDDKETPQEMYDRMMILVNKIKGLGSEDMTNHFVVKRLLRAFGPRNPTLVSMIWERKDFKRLTPSDILGRIVSHEMQEEEAHEVRQMVKNAAMIKNQEVAWKAKQEEESSCEESEDEEMAFIVKRFKHFLRKSGYGKGRKDDDKGKRQSKRACFNCGEYGHFIADCPKSNEAKAKGGKKKPERAHVAEAHMAEVWYSGDEEDPEVKPKPKPKDKVEGEGGVATVAFKSSSSSKERLFNNLSDDDDDSYHYSCFMAQGRKVMTQKPSHTSLDVDSSDEESDNELDDVLKSFSKPAMQHLAKLMRALDSKEQSLERQEELLILEKKRNLALEESLAKKCAKNEQLANELNLANGSLASLRDVSETLQEKFASLDKSHKDLEVQFDTLWNSTSQPNVVSNSSNPSTSNGCARCYNIDLNSHATNIDAMQALKKENERLGTLVKYGCIKTYHSKDALYKTITAHPNKDGHGLGFSGGSPVFKRVMVNGKECLMFVREGKAPQASEMTCPLTGQTPGSSGQNDRMFLPCKTGSSGHFVRKFRASDRPKGLTGSSGYNARKFQPEGLYYDSYVISKNSEGKVVAYFNGNYNDEYRTCVWVPKALAYSSGGSSWVVDSGCTNHMTGERSMFTSLDEEGGSRENIVFGDDGKGKVMGLGKIAISKNQSLSNVLLVNSLSYNLLSVSQLCKLGFNCLFTDVDVTVFRRDDSSIAFKGVLKGDLYLVDFDVDRVNPEACLIAKSSMGWLWHRRLAHVGMRNLASLLKGEHILGLSNVSFEKDRVCSACQAGKQVGSPHPIKNIMTTTRPLELLHMDLFGPVAYISIGGNKYGFVIVDDFSRFTWVYFLHDKSEAQDVFKRFAKQAQNLYDLTIKREEGIKHEFSAPYDPPQNGIVERKNQTLIEAARAMLDEYKTSDVFWAEAVSTACHAINHLYLHKILKKTSYELLSGKKPNVSYFLVFGSKCFILSKRPRSSKFSPKMDEGFLFGYESNAHAYRVFNKTSGIVEVTRDVTFDESNGSQGEQVVVHVVGDVDPSQAIGTKAIRDIRPVETQDDQEDRDQPPSSTSNSPTSAVSVEPEVLGPIDRNLWTSPGPEVPGSIVRNLRTSGSEDAQMDRRWMYYAHRSSTEYKEGVTEFVTFADNDRKSRMSMHMLCPCRDCKNDQMIEDKDEVHVHLIMNGFMKKYTCWTKHGEQEVPDVAAEEVLDQDVENTAAARDGMFVPSPLGGETIDLDTQCLXTMLHDIEDAEDNDRDFEKFXYADLDVCPIYGASRYKRAKSEGEGSKSKRGGPAKVVWYLPIAERMKRMFANKEQAKLVRWHAEERKVDSMLTHPADLVQWRTIDRIYQEFSNDPRNMRFAMCTDGINPFGDLSSRHSTWPVLLVNYNLPPWLCFKRKYIMLAMLIQGPRQPGNDIDVFLEPIIDDFERLWNEGTRTWDAYAQEYFNLHAMLFCTINDYPALGNLSGQTVKGKWACSECMEETRSKWLKHSHKTVYMGHRRFLPRYHPYRNMIKNFNGHRDTAGPPAELTGTEVHNLVMGITNEFGKKRKVGKRKEKSTSKEKTEEHVEKQKIKERSMWKKKSIFWRLPYWKDLEVRHCIDLMHVEKNVCESLMGLLLNPGTTKDGLNARRDLEDMGVRSELHPITTESGRVYLPPACYTLSKEEKIDLLTCLSGIKVPSGYSSRISRLVSLQDLKLVGMKSHDCHVLITQLLPVAIRNILPPKVRHTIQRLCSFFHAIGQKIIDPEGLDELQTELVRTLCHLEMYFPPTFFDIMEHLPVHLVRQTKCCGPAFMTQMYPCERYLGIFKGYVRNRSHPEGSIIESYTTEEVIDFCVDYMSETSSIGLPRSHHEGRLDGVGTVGRKTIRLDRKVYDKAHFTVLQHMTEVVPYVDEHLAVIRQENPGRSKSWVRNKHMSSFNEWLKNRIARLQNLSSETLQWLSQGPEWSATTWQGYDINGYTFHTVKQDSKCTVQNSGLRIEAASDGGRRDQYYGFTTVNLANNAYKDEPFILAKQVVQVFNIVDPCNKKLHVVREGKRRIVGLENIVDEDDYNQHVHGIGQEIPLEEEEEEDEVQYACVDHEEGLFL

SEQ ID NO: 110651 - protein, 49 aa, Oryza sativa
  Clone ID: PAT_MRT4530_14699C.1.pep
SSLVFSWSLSLSSCFTGTSKRVLFLIKGPLLVGSCKGNEEFAPCAIYYQ

SEQ ID NO: 110652 - protein, 336 aa, Oryza sativa
  Clone ID: PAT_MRT4530_1469C.1.pep
MEEQLNPLAVTQLLQHTLRGLCTQGDSQWVYAVFWRILPRNYPPPKWDLQGGVYDRSRGNRRNWILAWEDGFCNFAASACDQEDTPAAAGYTDYAAAGHEVKGLQPELFFKMSHDIYNYGEGLVGKVAADHGHKWVSQEANEHEINLVTSWNNPADSHPRTWEAQFQSGIKTIALIAVREGVVQLGSMKKVAEDLSYVVALRRKFGYLESIPGVLLPHPSSAAFPGAGGLQDAAWAPSPTMDLYDPYYGAHAAAAQMHHIVPSMSSLEALLSKLPSVGPTAAPGAIRGAIGGGSVAKEELDDAMDAAGNGGGESTSAATTPLVPYYVDVAKPDEGF

SEQ ID NO: 110653 - protein, 47 aa, Oryza sativa
  Clone ID: PAT_MRT4530_146C.1.pep
LGCRVVGPTHTIFYSPCPLFICLAVIVYVFFPPNFDVKLEHGSRRLC

SEQ ID NO: 110654 - protein, 1282 aa, Oryza sativa
  Clone ID: PAT_MRT4530_14700C.1.pep
MEEAAAAAADFDGGFGGAGEDNLSMPLGDFMAFLDNEDWKEQQHEWRWAINGHQAVGIGEGQTGSSLVMNGQALQTKTQNDKYFGTEGNQGLEMPVDSTSSENAFQNHEEIFENKENWSNYSHTDPSHSQMDVMVELNNGGESFDHSEDTSYRLLSNDFLENSRNGNPEMHLPMDALNHAKTVDEEIVPPYEDYTNGLYYDSGCDMFAEQSGLSEVKCEGTGPMLGNSEQEGNHFTSVPMFDHSAVIPDIPYTELNIGDVPGSMQNGNGSCLTVQGEYLQGEYQEYPQPDYGSFDMANEIVLHDLPQNNQSYELEQLPQNICESSSMQVGSPDQYCDDTSLSDYYMDDVSSIESMSSEQNRSEDICFRSESSTDSSPVPSSRNSTTEDADKYFGDAPKHLQNSMFPVSTQHQHSFMNSSDPMHPTFHKKYDIPRNGSSSILGNSSRNCFSLDSNRDSDLCILEGSRSLASGHVLPPQGLQHNFQQSVCANPNLPRFGGRYRPHEERMTLRLALQPLLDAPLASSLLDISQPKSEANPPDGVLAVPLLRHQKIALSWMVQKERNGSSCSGGILADDQGLGKTVSTISLILTERSPVPSSAVKQEPCEAVTLDDDDEDDDAEPHLKKPALAHLADTCKPEATSSTIKTENPIANVKARPAAGTLVVCPTSVLRQWADELRNKVTSKANLTFLVYHGSNRTKDPNDLTKYDVVLTTYSIVSMEVPKQSSPDSDDEEKGKPDRYGAPVGSSGSKKRKTSSSKKNKSGSTPESKLPEKPLAKVAWFRVILDEAQSIKNYRTQVARACWGLRAKRRWCLSGTPIQNAVEDLYSYFRFLRYDPYAEYKKFCFMIKTPISRNPITGYKKLQVVLKTVMLRRTKATMLDGKPIISLPPKTVSLKTVDFTSEERAFYNTLEAESREQFKEYAAAGTVKQNYVNILLMLLRLRQACDHPHLVRGHESTSSWMSSLEMAKKLPVERQQSLLVCLQSCSAICALCNDAPEDAVVTICGHVFCNQCILEQLTGDDSVCPVSNCRVRLNSTSLFSRGTLECALSRSTCEFLSDDSCEDMVQGKQPRFDSSYASSKVRAALDILLSLPKLDLTHMSDDKNKIVHPDKINGNSTPSEYAGTKITEKAIVFSQWTRMLDLVEVHLKSSHLSYRRLDGTMSVAARDRAVKDFNTNPEVSVMIMSLKAASLGLNMVAACHVLLLDLWWNPTTEDQAVDRAHRIGQTRPVTVSRLTIKDTVEDRILALQEKKREMVASAFGEDKSGAHQTRLTVEDLNYLFMV

SEQ ID NO: 110655 - protein, 92 aa, Oryza sativa
  Clone ID: PAT_MRT4530_14701C.1.pep
LKKKQIWQKLELVGQKFPFQEIKIVQAIRQKVQIKKFGEFPLDRNLGQAQNLLAFNGPSKNGISPRDYGAPRTITTLGGVLKKVLTEKGFGS

SEQ ID NO: 110656 - protein, 435 aa, Oryza sativa
  Clone ID: PAT_MRT4530_14702C.1.pep
MSARKATSRCDWTVQPRPPPPDTQEPALSASAACCLPVCLRVFSAAHIPQRHAAAGGGREGKEHCPLLIAEAPAAPFFAGGVLDFVGGKGMAAPSLVDLWEFLNDVPFFGFLICLRCCCCFRFQGGCARGVRQKAAKEKVGVQLATVAIVTMRDFASCLSQSGVQVAHSSSPGGQNMVQCTYLARLRGKSCSVTVTWSKMTMGQALSVAVDDSSNRCLCKAEIKPWLFSKRKGSKAMEVDGGALDIVWDLSSAKFAAGPEPVEGFYVALVCDLEAVLVLGDMRKDGDHRVSSDVLASNAVMIARKEHVYGKKVYSAKARFLDIGQLHHITIECDTSGLKDPSLEIRIGKKRVMQVKRLAWKFRGNQTVYVDGLPVEVLWDVHDWLFGSSNGCAVFLFQSGQSMEKLLSRSCSQNEKELQAHRFGFTLILNAWKTE

SEQ ID NO: 110657 - protein, 194 aa, Oryza sativa
  Clone ID: PAT_MRT4530_14703C.1.pep
PVSSKRRKEVFPHAMDEECFLPLNSCGERTQQDVEMHSVVQPSWQHEFSGVMKKARGPVTAAKSIYEDDQGYLIMVSLPFVDQQKVKVSWRNSLTHGIVKILCVSTAQTPYIRRHDRVFKLADPMPEHCPHGEFVREIPLATRIPEDAKLEAYFDEAAAVLEIMVPKRGNEPEEHEVRVSMRPPHLAANDLLLT

SEQ ID NO: 110658 - protein, 58 aa, Oryza sativa
  Clone ID: PAT_MRT4530_14704C.1.pep
QPVYMSVTITHIIIGHRMCQTSLFHFMVVARPVKSQSLSYTCLFASAEWQRSMEPIEP

SEQ ID NO: 110659 - protein, 63 aa, Oryza sativa
  Clone ID: PAT_MRT4530_14705C.1.pep
YEPKTLFWNRYHYDPSLKESQHGDRDFFRDSQTIIKSSILWIPVLGRKYHGTTHRSKNYSLAA

SEQ ID NO: 110660 - protein, 189 aa, Oryza sativa
  Clone ID: PAT_MRT4530_14706C.1.pep
MGDSEAHLLWGYLPTDWAILSQGGCHRWQMGARRAWPSSAAVAALTHTRSLAIASSTPCVVASPVPFAPAPNGEEAVLGTFLEDQQCRRLDRIWEHPTTTTAEVARGGVERWWPLSSLSMEDSEREPPGVGPAEGTSASPRQPVLSRCLLLAIPSRRLVIAAPISSLQRVTPPRYLLAVMVAVVAATTT

SEQ ID NO: 110661 - protein, 305 aa, Oryza sativa
  Clone ID: PAT_MRT4530_14707C.1.pep
VDPRAAGIGTRQPSPSSAASSPLLSSSAPPPPPPPEEEKRRRRSSMEREEDASSTPLPGGADDYIRDSIHDSLGLPVSDRSLRLKLLASEDHRRRLQDHVFVLEEDLRAAARRIEQLKAESTMNAAGLRRCIEEKETMVSAYNDLSSHSTKLERECTLYERDLERAMESCDDLAKENDEMRARLNDHTTLSALTTQVEALHKDKENLRINLNKAEEEVKLLFEENKILDEENKKLLALLEKERQHRSERKHSSSASTTKHKRKSSSLKDTSPVGRTIDFNGADSSSRHPLSPLPPNSPDYRAHKK

SEQ ID NO: 110662 - protein, 49 aa, Oryza sativa
  Clone ID: PAT_MRT4530_14708C.1.pep
CYHRCLGNPEPARLFSATEILATLQAMVANMAPEKGILYPQLLWGWDPL

SEQ ID NO: 110663 - protein, 47 aa, Oryza sativa
  Clone ID: PAT_MRT4530_14709C.1.pep
MGVLRAAVPLQPEADLVLATGGGERGQVGLVLVDGSNGFCTVGTGNL

SEQ ID NO: 110664 - protein, 82 aa, Oryza sativa
  Clone ID: PAT_MRT4530_1470C.1.pep
MTIYFASVCVGQGKEPPRGGSRKYYLEKTESLLSNASREIQRYFWDRARRTREFGICDEMDTWCSNATSVSWLLATFEEASG

SEQ ID NO: 110665 - protein, 54 aa, Oryza sativa
  Clone ID: PAT_MRT4530_14710C.1.pep
LLIPDYLGLINSSGILQADSVICFVIRLRLILQMYVSISDVTWQKFSPLDLNTA

SEQ ID NO: 110666 - protein, 379 aa, Oryza sativa
  Clone ID: PAT_MRT4530_14711C.1.pep
MKSIQDYLARSNSKSKNSELVMKDDIPLGLGAAKNSTAAPDSSHAVEEEYVSKRKLTSSVWKEFKRKKIVSKWKAECLWCHKRLGGDTKNGTKHLHDHLSKCPRRRSNKVSKPTPSKCTKDIDQEPTVASLESSTFSQDVARMELARMIILHEYPLSIMEHYGFQRFVRALQPLFQLVPNSSLKKDVISIYETERVRTREILWEAKGRIAIPADIWTSDDQNRGYVAVRAHFIDQSWTFQCRLLSFIHVPCPHTAQAISETLSSCLNEWNLGRRVSMVMADDCSTDDTVTGLLKQRLDTEQLLLATTERDVVFADVARGLNVNLDKKLTLDCNNRWYSTLSMLNVAISYKQVFDHLRQIEEQYICAPDDDDWKLAKEVC

SEQ ID NO: 110667 - protein, 674 aa, Oryza sativa
  Clone ID: PAT_MRT4530_14712C.1.pep
MKSIQDYLARSNSKSKNSELVMKDDIPLGLGAAKNSTAAPDSSHAVEEEYVSKRKLTSSVWKEFKRKKIDSKWKAECLWCHKRLGGDTKNGTKHLHDHLSKCPRRRSNKVSKPTPSKCTKDIDQEPTVASLESSTFSQDVARMELARMIILHEYPLSIMEHYGFQRFVRALQPLFQLVPNSSLKKDVISIYETERVRTREILWEAKGRIAITADIWTSDDQNRGYVAVRAHFIDQSWTFQCRLLSFIHVPWPHTAQAISETLSSCLNEWNLGRRVSMVMADDCSTDDTVTGLLKQRLDTEQLLLGGSLLNMRCCAYVLSRIANSCLGVMGGAVDRIRASVDFWTATTERDVVFADVARGLNVNLDKKLTLDCNNRWYSTLSMLNVAISYKQVFDHLRQIEEQYICAPDDDDWKLAKEVCKLISEAKYVTANMYFPKICGIRMAMRRWPGCEDELIGRMRNEIAELFEKYCVEVHDLMAVATVLDPRYKLELLQFYFPSIFGDEAYNEINRVRQLCYDLIKQYQGPQSKVGAMQPCGGEEEGPDQLSSFDLYIAFKFSSADVKSELDKYLDEPVIPRAVDFDIIDWWKIMGKRFPTLQMLARDILAVPVSRVVSESAFSIAGRVLSPQRSKLLPDTLEALMCSQDWLHAENRGAGSSGLLSCLTCLEDADVTTKE

SEQ ID NO: 110668 - protein, 66 aa, Oryza sativa
  Clone ID: PAT_MRT4530_14713C.1.pep
MNGSHRWICDAMHFSTIGKRTTYGLHSKNKCQVFGNGGQVFGNGGSVWLGWSYTEIQLIDWWLSNE

SEQ ID NO: 110669 - protein, 93 aa, Oryza sativa
  Clone ID: PAT_MRT4530_14714C.1.pep
MAKWAAITAALLLLAAAAWAPAPATAQCNAGQLAICAGAIISGSAPSASCCSNLRAQRGCFCQYARNPAYASYINSANARKTLTSCGIAIPRC

SEQ ID NO: 110670 - protein, 164 aa, Oryza sativa
  unsure (1)..(164): unsure at all Xaa locations
  Clone ID: PAT_MRT4530_14715C.1.pep
MEGFHNLLARPNSAPFAFSLGGARPRPRRRPPPHPSAACRAASRWAERLFADFHLLPTAAPSDPPSPAPAPAAAPSASPFVPLFPDAAERSLPLQVDFYKVLGAEPHFLGDGIRRAFEARIAKPPQYGYSTDALVXXXQMLQIAHDTLMNQNSRTXYDRALSEN

SEQ ID NO: 110671 - protein, 161 aa, Oryza sativa
  Clone ID: PAT_MRT4530_14716C.1.pep
TRPDKYTNVPSAEELSLWKARQAVANGRAEAWGRLISQSSESPSVPIYTTHFTVGHGGNYDLRLTESFPGSLICKLKHVKRGAALEIYVSKAVHVNGKVLDKTAKVTLVGGDEVIFSSLGRHAYIFQQLPEERSSTSTFSATCAFQQGQYPVTKGTIGCII

SEQ ID NO: 110672 - protein, 129 aa, Oryza sativa
  Clone ID: PAT_MRT4530_14717C.1.pep
MSETEKPSSKGKRRRGPRMSRTLPRPMATNHSIRWWRPSDKPPSLYSKLPPMEKRDGIEQPSSSDESLYLASLLFLPPATKLALSPPSSPASPAPKGVNVPERPPFPPIRLTLPSSISSAHNPLLTSRL

SEQ ID NO: 110673 - protein, 113 aa, Oryza sativa
  Clone ID: PAT_MRT4530_14718C.1.pep
LKGHDQQLVIKIQAKLPPLRGGKAPTKSGQEPNQTTSISKKKKSSRQLHQDLGPGDRNAKRPTSSSSPKLDHITHAENQDPLPLPCSARQMEIGAPPLSSRAHASADAWADAW

SEQ ID NO: 110674 - protein, 97 aa, Oryza sativa
  Clone ID: PAT_MRT4530_14719C.1.pep
VAWEKNHHALSLLPACPTPVKARAPYDRHYFPCLAFRSKACFSYSRRSLSMAAEGEAKKDSASNPPGGGGIRGGGEADHNYCSCSRQPVRRNCWGCC

SEQ ID NO: 110675 - protein, 447 aa, Oryza sativa
  Clone ID: PAT_MRT4530_1471C.1.pep
MDAGATARSSSSSAMMMNQKKPLLSDGELVELLWQDGGVVGHAQTRHRSSDVLARSGVTGEEETASAWFADGGGGGGGDDDALGLGMGRDIYSQLWHSFANVDGHAAGALALATPTPTPRAAARSDDVSSRLDEADLSICGSNAVVAPALPADDDDDIDAAAPREEEEEEEEGPGAARAAGASSSGGSGSGSGSYPLFKRGREELVDSLSEVADETRPSKRPAAKRRTRAAEVHNLSERRRRDRINEKLRALQELVPHCNKTDKASILDEAIEYLKSLQMQVQIMWMTTGIVPMMFPGTHQLMPPMGMGLNTACMPGAQAQGLNQMQRTTYYMNNSLPNQMPQIPSPAMNAPSVPDDMQNDNRIRGPRNPFLHCNDTLTATAQVDYYVKFHHYRSFRLQFLFILQYQFFSGARHRQYVKNIVAVWTQLEPASQKLHKNTTVTVSLFF

SEQ ID NO: 110676 - protein, 149 aa, Oryza sativa
  unsure (1)..(149): unsure at all Xaa locations
  Clone ID: PAT_MRT4530_14720C.1.pep
GLNQEDKDKVDPGDSEDYMDSQESKGSFAKRLGINLTEEALGSQDEEMRRSKRLKDKEDKRSQEMAMERKEAQNAFIXKIPSFIHESNVSLIDIASVLGVNLGCAVDDIASNINLIRDLEMARINLFLKEGTNSEGQHCLDSFENSNPD

SEQ ID NO: 110677 - protein, 179 aa, Oryza sativa
  Clone ID: PAT_MRT4530_14721C.1.pep
MASPFFKVIPVRPVLRDQCEITMRLYLHQVVTGPNHNQETMVPSSHPASFGMIVINDWPIYDGPDFNTSTIVAHARGMHVQVDQVNNTWYTSMNIEFVDARFNGSKLQVMGTTPETGEWAIVGGTGQLAMAYGTIQHNIVKNNPGIETTRQLDIHAFYSTPQTQADVMTTTNTIDQQAE

SEQ ID NO: 110678 - protein, 105 aa, Oryza sativa
  unsure (1)..(105): unsure at all Xaa locations
  Clone ID: PAT_MRT4530_14722C.1.pep
KIVTITLNTRASTLTLDEVATNDVVKDHVKVGGCRAPIASCHNPSMHACLNCSLIPRQAKAVFMEVYLLHSNTVDKKTDLTYIHAXGNWYRSIXGASEQILTLCY

SEQ ID NO: 110679 - protein, 136 aa, Oryza sativa
  Clone ID: PAT_MRT4530_14723C.1.pep
MKYTGRGVREHILKMSDITSKLKKMDLVLPDKFLVHLIFASLPSDFEAFVVNYNSQPENWDIEKLIAICVQEEDRPKARGDSANYVKHNKKRNNYNQNVASPKAQGKAPQSDPHPRPSNVEVDKDTCKWCKKKGHY

SEQ ID NO: 110680 - protein, 163 aa, Oryza sativa
  unsure (1)..(163): unsure at all Xaa locations
  Clone ID: PAT_MRT4530_14724C.1.pep
MECGIKKEMLQVLPVLVXRPPTRARETRVSVCLADYQPDERLQRIPPCGHTFHIDCIDHWLSTNTTCPLCRVSLLPSPKTASIDPVDLEAQTVEENSSLDVQYQEGRIDENTRQEDQTLQQGSEGPTHQAEENEETSVRVTTEPQVEAEGSPSTTCRPCKTKK

SEQ ID NO: 110681 - protein, 77 aa, Oryza sativa
  Clone ID: PAT_MRT4530_14725C.1.pep
MAPKDAVAALGDGSGSGGRCCGSARRRRKRRSEAEAFGDGDGGRRSSGLQDLCRQLKILQHNEEAQYDKTVDRTSIT

SEQ ID NO: 110682 - protein, 223 aa, Oryza sativa
  unsure (1)..(223): unsure at all Xaa locations
  Clone ID: PAT_MRT4530_14726C.1.pep
SKKCTPGALKGGVGRIHSTLIFVFAGXXSGMAFSKLTGGGXXXXPPGLIAAAVAHAFXLFVAVSVXANISGGHXNPXVNFXAFLXGNINLFRGLLYWIAQLLGSTVACFLLRFSTGRAXATGTFRLTGXSLXGSPGCWKIVMNFXLXYTRVXXTAVEPQXKXAXXXIPPYPPXXFIXGAKIXLPXXXSKGXSHXTPAVFFGPGPPSSGIPVLGFGPQGPGLKS

SEQ ID NO: 110683 - protein, 96 aa, Oryza sativa
  Clone ID: PAT_MRT4530_14727C.1.pep
MGGGRAELAAAVHEAVAVQTAAPSPSTTATAVEEAEYNKRSLTDLGQIKHNISDEINGLDYFLLPVDYVIVELLEVATQIKQPTYYKKSSTNSHLH

SEQ ID NO: 110684 - protein, 1409 aa, Oryza sativa
  unsure (1)..(1409): unsure at all Xaa locations
  Clone ID: PAT_MRT4530_14728C.1.pep
MALVPAGAGADPARGSSGSAFSYPQLTATNYTSWCIRVQAMMEDQGVWDAIEPAAGVAVDPRRDKKARSHLLQSQPEDLLMQVAKKRSAKEVWDCLKTRFVGADRVREARLQTLKGEFGAMVMEPGETLDQYAGRITAMSVRHSALGSTLGDSAMVKKLFDTVPEKFVSLVAGIEQFYDIDTMPFEEAVGRLKAYEERMRKKKAAAGGVTTDGQVLLTQAEWEAHFKKNGGESSPPQKNKPSGEGAGRGQGGRGRGRGRGAGGRGGTPRGDSGAGSGGGGRDKSHIKCFNCEEYGHYSNQCPHPKKKKGEAHLAQTEDAGPALLLAVTEDVPERASCGLVVREQRVWPKLLLADAGGHAGDVWFLDNGASNHMTGDRSKFRELDESITGRVKFGDASTVQIKGKGSILFSCKNDDQWLLQDVYYIPSLQCNMVSLGQLTETGHRVVMDEDVLEVFDKSPWRLVMKXDDPAWLWHARLGHVNFQAMKLLVDKEMXGGVPAIVHPNQLCQSCLVAKQARAPFPAAAHFRAEEPLELLHIDLCGPITPNTMSGNRYFFLIVDDYSRWIWVFVLKTKDQSLDAFVKFKPLAENTAGRRVKTLRSDRGGEFLSGEFAQVCEEAGIQRHLTAPYSPQQNGVVERRNRTVMAMARSLLKGMRVPGRFWGEAVRHAVHLLNRLPTKAMGDRTPFEAWTGRKPQLGHLKVFGCTAHAKNTQPHLKKLDDRSAPYVYLGVEEGSKAHRLFDPRRGRIHVSRDVVFEENVPWEWTSAAGQEPTDFAMEEEPGEQLPSPATAAGVVPPYQAPSPGRRAGKEAVVAAEEVPSPASPVAASPTLPGTPTPGSPSTNSAGVVPSPGTDDNIDTDDGPRRYRSLADVLREAPRVDLVEDECDGEALLAESEEPSSYREAAGQPAWEEAMQREMEAIEKNKTWELAMLPAGHRAIGLKWVYKLKKNTAGEIIKHKARLVAKGYVQKQGVDFEEVFAPVARLDTVRVVLAVAADRRWQVHHLDVKSAFLNGELEEEVYVAQPEGFARSGKEHLVLKLHKALYGLRQAPRAWNIRLDRSLRELGFDRCTQEQAVYTRGRGSDGIIVGVYVDDLIVTGENPSELKVFKEQMMGEFEMSDLGLLTYYLGIEVDQDESATTLKQTAYAKKLLSQFGMMECNSVSIPIDPRSQLSKDPEGHPVDATEYRRIIGSLRYLLHTRPDLSYAVGVASRFMERPTVMHFKAVKQILRYIKGTMDYGLVYAAGTGALKITGYTDSDLAGDLDDRRSTGGMAFYINQSLVAWSSQKQKTVALSSCEAEFMAATTAACQALWLRLLLAEVAGVEEKAVKLFVDNRSAIALMKNPVFHGRSKHIDTRYHFIRECVDGGQIVVEFVRTEEQRADALTKGLPAAKLVTARHLLGVRSLGSRQN

SEQ ID NO: 110685 - protein, 1433 aa, Oryza sativa
  Clone ID: PAT_MRT4530_14729C.1.pep
MALVPAGAGADPARESSGSAFSYPQLTATNYTSWCIRVQAMMEDQGVWDAIEPAAGVAVDPRRDKKARSHLLQSLPEDLLMQVAKKRSAKEVWDCLKTRFVGADRVREARLQTLKGEFGAMVMEPGETLDQYAGRITAMSVRHSALGSTLGDSAMVKKLFDTVPEKFVSLVAGIEQFYDIDTMPFEEAVGRPKAYEERMRKKKAAAGGVTTDGQVLLTQAEWEAHFKKNGGESSPPQKNKPSGEGAGRGQGGRGRGRGRGAGGRGGTPRGDSGAGSGGGGRDKSHIKCFNCEEYGHYSNQCPHPKKKKGEAHLAQTEDAGPALLLAMTEDVPERASCGLVVREQRVWPKLLLVDAGGHAGDVWFLDNGASNHMTGDRSKFRELDESITGRVKFGDASTVQIKGKGSILFSCKNGDQWLLQDVYYIPSLQCNMVSLGQLTETGHRVVMDEDVLEVFDKSPWRLVMKVRRTVNRLYRIELKLAHPVSLLSSLDDPAWLWHARLGHVNFQAMKLLVDKEMAGGVPAIVHPNQLCQSCLVAKQARAPFPAAAHFRAEEPLELLHIDLCGPITPSTMSGNRYFFLIVDDYSRWMWVFVLKTKDQSLDAFVKFKPLAENTAGRRVKTLRSDRGGEFLSGEFAQVCEEAGIQRHLTAPYSPQQNGAVERRNRTVMAMARSLLKGMRVPGRFWGEAVRHAVHLLNRLPTKAMGDRTPFEAWTGRKPQLGHLKVFGCTAHAKNTQPHLKKLDDRSAPYVYLGVEEGSKAHRLFDPRRGRIHVSRDVVFEENVPWEWTSVAGQEPTDFTMEEEPGEQLPSPATAAGVVPSYQAPSPGRRAGKEAVVAAEEVPSPASPVAASPTLPGTPTPGSPSTNSAGVVPSPGTDDNIDTDDGPRRYRSLADVLREAPRVDLVEDECDGEALLAESEEPSSYREAAGQPAWEEAMQREMEAIEKNKTWELAMLPAGHRAIGLKWVYKLKKNTTGEIIKHKARLVAKGYVQKQGVDFEEVFAPVARLDTVRVVLAVAADRRWQVHHLDVKSAFLNGELEEEVYVAQPEGFARSGKEHLVLKLHKALYGLRQALRAWNIRLDRSLRELGFDRCTQEQAVYTRGRGSDGIIVGVYVDDLIVTGENPSELKVFKEQMMGEFEMSDLGLLTYYLGIEVDQDESATTLKQTAYAKKLLSQFGMMECNSVSIPIDPRSQLSKDPEGHPVDATEYRRIIGSLRYLLHTRPDLSYVVGVASRFMERPTVMHFKAVKQILRYIKGTMDYGLVYAAGTRALKITGYTDSDLAGDLDDRRSTGGMAFYINQSLVAWSSQKQKTVALSSCEAEFMAATTAACQALWLRVLLAEVAGVEEKAVKLFVDNRSAIALMKNPVFHGRSKHIDTRYHFIRECVDGGQIVVEFVRTEEQRADALTKGLPAAKLATARHLLGVRSLGPRQN

SEQ ID NO: 110686 - protein, 63 aa, Oryza sativa
  Clone ID: PAT_MRT4530_1472C.1.pep
SLCCVRCGCIYSWFVSLLWCRSQLRDVKIDWNCEPIYFTYMILYVFLLVSLALMQFQSGRFSP

SEQ ID NO: 110687 - protein, 89 aa, Oryza sativa
  Clone ID: PAT_MRT4530_14730C.1.pep
MAHTHRVGACVRVSARGRVSARRDRGAARCDAVPDGAIGQPCVTSELFYSYRKHSKIIKPFCPNRRGDLPAGGNLQGDREIVHETHTSN

SEQ ID NO: 110688 - protein, 42 aa, Oryza sativa
  unsure (1)..(42): unsure at all Xaa locations
  Clone ID: PAT_MRT4530_14731C.1.pep
LISFDIHVVQIKLTEISYRQLLLHKMWAYIAXHTPFDRRTTT

SEQ ID NO: 110689 - protein, 313 aa, Oryza sativa
  unsure (1)..(313): unsure at all Xaa locations
  Clone ID: PAT_MRT4530_14732C.1.pep
WWGPRGPHKSLSALVSLPLRSPSSSRGAAAGACPADGAEGQRGAGTRPRTVDRCRRRKKAEEEVRRRARQLHSVSRSARRCQTGRCRPSSLGTHTHCLPPRPAASADVLDGHIRVGAARRLSSLGRRAPLPSSLGPRAPPPSSPGHRASPPSPGRRASPLLARPPRAASLLVGPPRAAXPPRPAAECRLPPRQAAACRLXSPGRRAPPLLAGPPSAASLLAGTPSAASFLTRPPRAASPRRATERRLPPRRAAAXPPPSSLSRRASPPSPGRRAPPSLTRTLXRPPRAAIPHPDTARRLGDGRRGREEEEEGL

SEQ ID NO: 110690 - protein, 410 aa, Oryza sativa
  Clone ID: PAT_MRT4530_14733C.1.pep
MANLHLLPLLLLALLSPAGAGSGEAHASAVVAEKGLDFAKGVLIGEAVRSLTPLRLPGVEKAVRVPFLGAIRVAATNITLFHLDVGDDFRMHPGDTALVVVASGVSANLSMGWSYYYDSWLFPIEIYDRGTAFILVQGMEVGITMQIKNYNGSLSLSVLQCGCNVKDLVISLDGGASWFYQGLINAFEGHIKAAVETQILENIIDGTSKLDSLLQSLHRSVNLANISALNMTFVTDPQYGNSSIEFDINGLFSSATAKLSNSQKHPQLSLSCGGASKMLLLSLDEAVFNSALEVYFKVVSASGVAEAAGNKVYGKVELGNFSLALKWSKIGNFHMSLIQGVIRVFLNTVCMPYLNSRLGHGVILPVVHGFTLKDIYVLTSPEKLTLCSDVAFANASSLATLPILRSPRVL

SEQ ID NO: 110691 - protein, 93 aa, Oryza sativa
  unsure (1)..(93): unsure at all Xaa locations
  Clone ID: PAT_MRT4530_14734C.1.pep
ALTSETTCTSPQMHMRRNKLSSHFHGDIDDYAGDGAEDISESRLMEDSGXLAAHQELVVAVTFICWHDMEVRMVYYRLYLDVGMSMFNAMHRP

SEQ ID NO: 110692 - protein, 164 aa, Oryza sativa
  unsure (1)..(164): unsure at all Xaa locations
  Clone ID: PAT_MRT4530_14735C.1.pep
ILPSLGQVSLLLHPQIRRPAPPANAGLGVTAMSYIAVDYLRHLSPERHSRLQPALRSLLALAAVVRVPSYRHWSAEFRSAIPFIASMFFMLAALLYEKISVRSVTAELGLDWHLNTPPLPDTGQRLLLALKEKLPSPIVEILRARIIGLHHYXMLFMKLAFSVL

SEQ ID NO: 110693 - protein, 223 aa, Oryza sativa
  Clone ID: PAT_MRT4530_14736C.1.pep
MAATGSDPHVKANALLQAHFSRRTILAADQREILLSAHRLLQAMVDVISSNGWLTLALNAMELSQMVTQGIWDRDSVLLQLPHFTKELARRCQENEGRPIESIFDLAEMSIDEMRDLLQLSNPQLQDIIEFFKRFPNVDMAYEVTLERDMTNLPSEVGPVHAPRYPKPKEEGWWLKRARVKLEFTAASEAGRKEYMIYLMSDYYLGRDQEYEFTVDVMDAGGD

SEQ ID NO: 110694 - protein, 149 aa, Oryza sativa
  Clone ID: PAT_MRT4530_14737C.1.pep
MEDAYAKSVAEVLAAFGVDPTKGLSDEQVASGSKLLVKSFLILTDQARGTPFWKLVLKQFDDLLVKILIAAAVISFLLARMNGETGLAAFLEPSVIFLILAANAAVGVITETNAEKALEELRAYQADVATVLRNGKKLLKPVVAFHLIP

SEQ ID NO: 110695 - protein, 2177 aa, Oryza sativa
  Clone ID: PAT_MRT4530_14738C.1.pep
MANLGGGAEAHARFKQYEYRANSSLVLTTDSRPRDTHEPTGEPETLWGRIDPRSFGDRAVQAKPPELEEKLTKSRKKKAAAADPDDLHRRDAKRRRRAAAAQREVSVLSLTDDVVYKPQTKETRAAYEALLSVIQQQFGGQPLDVLGGAADEVLAVLKNDKIKSPDKKKEIEKLLNPISNQMFDQIVSIGKLITDFHDASAGDSAAAPSGDGMDTALDDDIGVAVEFEENEDDEESDFDQVQDDLDEDEDDDLPESNAPGAMQMGGELDDDDMQNSNEGLTINVQDIDAYWLQRKVSQAYEDIDPQHSQKLAEEILKIIAEGDDRDVENRLVMLLDYEKFDLIKLLLRNRLKIVWCTRLARAEDQEQRKKIEEDMMGNPTLTPILEQLHATRASAKERQKNLEKSIRDEAKRLTKSENTGIDGARDRRAVDRDMESGWLKGQRQLLDLDSLSFHQGGLLMANKKCELPPGSFRTPHKGYEEVHVPALKAKPYETGEKIVKISDMPEWAQPAFAKMTQLNRVQSKVYETALFKPDNILLCAPTGAGKTNVAVLTILQQIGLHMKDGVFDNTKYKIVYVAPMKALVAEVVGNLSARLSAYGITVRELSGDQNLTKQQIDETQIIVTTPEKWDIVTRKSGDRTYTQMVKLLIIDEIHLLHDNRGPVLESIVSRTVRQIETTKEHIRLVGLSATLPNYEDVAVFLRVRSDGLFHFDNSYRPCPLAQQYIGITVRKPLQRFQLMNEICYEKVMASAGKHQVLIFVHSRKETAKTARAIRDTALANDTLNRFLKDDSASQEILGSQAELVKSSDLKDLLPYGFAIHHAGLARVDRELVEGLFADKHIQALVSTATLAWGVNLPAHTVIIKGTQVYNPEKGAWTELSPLDVMQMLGRAGRPQYDTHGEGIILTGHSELQYYLSLMNQQLPIESQFISRLADQLNAEIVLGTIQNAREACSWLGYTYLYIRMLRNPTLYGLPADIMETDKTLDERRADLVHSAANLLDRNNLIKYDRKTGYFQVTDLGRIASYYYISHGTISTYNEYLKPTMGDIELCRLFSLSEEFKYVSVRQDEKMELAKLLDRVPIPVKESLEEPSAKINVLLQAYISRLKLEGLSLSSDMVYIRQSAGRLLRALFEIVLKRGWAQLAEKALNLCKMIDKQMWNVQTPLRQFPGIPKEILMKLEKKELAWERYYDLSSQEIGELIRFPKMGRQLHKCIHQLPKLNLSAHVQPITRTVLGFELTITPDFQWDDKVHGYVEPFWVIVEDNDGENILHHEYFMVKKQYVDEDHTLNFTVPIYEPLPPQYFIRVVSDKWLGSQTILPVCFRHLILPEKYAPPTELLDLQPLPVTALRNARYEGLYSAFKHFNPIQTQVFTVLYNTDDSVLVAAPTGSGKTICAEFAILRNHQKAVSGESNMRVVYIAPIEALAKERYRDWEQKFGEFARVVELTGETAADLKLLDKGEIIISTPEKWDALSRRWKQRKQVQQVSLFIVDELHLIGSEKGHVLEVIVSRMRRIASHIGSNIRIVALSASLANAKDLGEWIGATSHGLFNFPPAVRPVPLEIHIQGVDIANFEARMQAMTKPTYTAITQHAKNGKPALVFVPTRKHARLTALDLCAYSSAEGGGTPFLLGSEDEMDAFTGGISDETLKYTLKCGVGYLHEGLSDLEQEVVTQLFLGGRIQVCVASSTVCWGRSLPAHLVVVMGTQYYDGRENAHTDYPITDLLQMMGHASRPLQDNSGKCVILCHAPRKEYYKKFLFEAFPVESHLHHFLHDHMNAEVVVGVIENKQDAVDYLTWTFMYRRLTKNPNYYNLQGVSHRHLSDHLSELVETVLNDLESSKCVAIEEDMYLKPLNLGLIASYYYISYTTIERFSSMLTQKTKMKGLLEILASASEYAELPSRPGEEDFIEKLVRHQRFSIEKPKYGDPHVKANALLQAHFSRHTILGNLAADQREILLSAHRLLQAMVDVISSNGWLTLALNAMELSQMVTQGMWDRDSVLLQLPHFTKELARRCQENEGRPIESIFDLAEMSIDEMRDLLQQSNPQLQDIIEFFKRFPNVDMAYEVREGDDIRAGDNVTVQVTLERDMTNLPSEVGPVHAPRYPKPKEEGWWLVIGDSSTNQLLAIKRVALQKRARVKLEFTAASEAGRKEYMIYLMSDSYLGCDQEYEFTVDVMDAGGD

SEQ ID NO: 110696 - protein, 130 aa, Oryza sativa
  Clone ID: PAT_MRT4530_14739C.1.pep
FDVQTTIKTASLVIRSPEKKSATWDQLPVATDLSNFVTTLQSTVGLKDSTVPVNFTTSKQDPNTTIGTILTGSNLAVDSVQLTQATRPLRRLHIENLPSLATEDMLIGCLNELLLSSSASHIQRSIQPCL

SEQ ID NO: 110697 - protein, 940 aa, Oryza sativa
  Clone ID: PAT_MRT4530_1473C.1.pep
MENTMNGLLMALALLCLTINFREIAACISTERDALVAFNTSIKDPDGRLHSWHGENCCSWSGVSCSKKTGHVIKLDLGEYTLNGQINPSLSGLTRLVYLNLSQSDFGGVPIPEFIGCFKMLRYLDLSHAGFGGTVPPQLGNLSRLSFLDLSSSGSHVITADDFQWVSKLTSLRYLDLSWLYLAASVDWLQAVNMLHLLEVLRLNDASLPATDLNSVSQINFTALKVIDLKNNELNSSLPDWIWNLSSLSDLDLSSCELSGRIPDELGKLAALQFIGLGNNKLNGAIPRSMSRLCNLVHIDLSRNILSGNLSEAARSMFPCMKKLQILNLADNKLTGQLSGWCEHMASLEVLDLSENSLSGVLPTSISRLSNLTYLDISFNKLIGELSELHFTNLSRLDALVLASNSFKVVVKHSWFPPFQLTKLGLHGCLVGPQFPTWLQSQTRIKMIDLGSAGIRGALPDWIWNFSSPMASLNVSMNNITGELPASLVRSKMLITLNIRHNQLEGYIPDMPNSVRVLDLSHNNLSGSLPQSFGDKELQYLSLSHNSLSGVIPAYLCDIISMELIDISNNNLSGELPNCWRMNSSMYVIDFSSNNFWGEIPSTMGSLSSLTALHLSKNSLSGLLPTSLQSCKRLLVLDVGENNLSGYIPTWIGNGLQTLLLLILGSNQFSGEIPEELSQLHALQYLDLSNNKLSGSIPRSLGKLTSFLSRNLEWDSSPFFQFMVYGVGGAYFSVYKDTLQATFRGYRLTFVISFLLTSIDLSENHLTGEIPSEIGNLYRLASLNLSRNHIEGSIPETIGNLAWLESLDLSWNDLSGPIPQSMKSLLFLSFLNLSYNHLSGKIPYGNQLMTFEGDSFLGNEDLCGAPLTRSCHKDSDKHKHHEIFDTLTYMFTLLGFAFGFCTVSTTFIFSAASRRAYFQFTDNICNWLVAVLERKLSLIR

SEQ ID NO: 110698 - protein, 48 aa, Oryza sativa
  unsure (1)..(48): unsure at all Xaa locations
  Clone ID: PAT_MRT4530_14740C.1.pep
PFXSFFNCSFGRRCERPQSPTEGSHQGESYKHDIDNDKTNINALHTRG

SEQ ID NO: 110699 - protein, 78 aa, Oryza sativa
  unsure (1)..(78): unsure at all Xaa locations
  Clone ID: PAT_MRT4530_14741C.1.pep
LRSRDVLRKIGXDSIQEMARMYEYTMGILIFFPIPSLSWXFPFXSEFQTRXLFNQAFTRGSQISRILAAQNGSGSKRD

SEQ ID NO: 110700 - protein, 517 aa, Oryza sativa
  Clone ID: PAT_MRT4530_14742C.1.pep
MGNLGWMVAAAVAAVVASWAFDAVVKLVWRPRAITRRLRAQGVGGPGYRFFSGNLGEIRRLRDEGAGVVLDVSSHDFVPIVQPHFRKWVPLYGKTFLYWFGAQPTICLADMSMVRQVLSDRTGMYPKDVTNPYFAQLLGKGLVLTDGDEWKRHRKVVHPAFNMDKLKMMTVTMSDCTQSMISEWESELGTKGGSAEIELSQRFQELTADVISHTAFGSSYSEGKQVFLAQRELQFLAFSMFLTIQIPGFRYLPTKKNLKIWSLDKKVRSMLTNIIKIRLTNKDVTGYGNDLLGLMLETCAPEHGESQPQLSMDEIIAECKTFFFAGHDTTSHLLTWTMFLLSTHPEWMRKLRKEVTTMCGDEVPTGDMLNKMNLLNMFLLETLRLYSPVSLISRRTGTNAKFGGIKVPEGTILRIPIATIHRDKEVWGEDADMFKPARFENGVSKAGKHPNALLSFSSGPRACIGQNFAMIEAKAVIAMILQRFSFTLSPKYVHVPTDVITLRPKYGLPMILKSLKV

SEQ ID NO: 110701 - protein, 110 aa, Oryza sativa
  Clone ID: PAT_MRT4530_14743C.1.pep
INGNQGLHIRYLGVPAACSRMWFPGYARGISAHTFIGALPDPIIQNPIDIDTVVTFTQGYSKAGTTCRLLLQPVKHQQTKVTFYLDTGAGDNGNDALSGSSASNKRSKSE

SEQ ID NO: 110702 - protein, 214 aa, Oryza sativa
  Clone ID: PAT_MRT4530_14744C.1.pep
MSFFTRIGVWPWIQNKVVDPLMQVVRRGAEPKQLAFSAALGVTLGIFPICGTTVILCGVAIAMLGSSCNAVTVMVLNFVVTPLELSLIVPFLRFGEVITGSGHFPLTSDAFKKVITGQASKDVMLSIVHAMLGWLIAAPFALAALYMVFTPCFKLMVDRGIYDDSAYCIQASAWVIFPSKFESKLKPSRRPGLVFRSSQPWYLIEMSIHLLICV

SEQ ID NO: 110703 - protein, 141 aa, Oryza sativa
  Clone ID: PAT_MRT4530_14745C.1.pep
MQMERRPPPLLADHCRLPHRPAGAADAVVTVNHVSYCRRSLSSPPVEEFTIESAHYRRGGDTAKHNDAVLSALHDEEEEIVGKELTVEGEVEVEGEGAGPLQARQAEEWAGDRDSERERGGHRGLARRRERGDKDDDRVGE

SEQ ID NO: 110704 - protein, 354 aa, Oryza sativa
  unsure (1)..(354): unsure at all Xaa locations
  Clone ID: PAT_MRT4530_14746C.1.pep
PICCGHQETRTGERRCGGRIEGGRRAPPLLAGWGSAQAAGEETKFEAEAEAGWDGLGCSPASECGGSRRTPAPPLLDGDRQARRRDGTDCGGGGRAALCCRGHSPIGREKGVGWRGKAXRRRLPADVAPNGRERSRHGLACVRGVARVPTTTAXVVFTSTHEGWGFRLVTLAKLLXPQAHSRPCRAAQKPMCSGVPELRFSSAEANARLHRIVFEVNSIYSTLRSHRPRCMRPSPQRSPPPSFLLAANLIPTNRQAPSSGFYLPPPPNDRLPSPYWSPATTHLSRNSASSVLFACMHGHSWSQWCSRVYSGVATYSISQLLEILSPIPTVWLTCDHNADTAQMRGELPRNNVVV

SEQ ID NO: 110705 - protein, 368 aa, Oryza sativa
  Clone ID: PAT_MRT4530_14747C.1.pep
MSRPHLPKDDHAFANGFLFDGVARRPGEIEEAAAFAAAARVAITIAAEQSGSPSSSTAPPMSSCGQYMLHRVGKLDTLAGIAIKYGVEVADIKRLNGLSTDLQMFAHKTLRIPLPGRHPPSTYQQNGSYEGDDRECTPPRRLHDDILDSVLRTPKHKASPAMSLLQGYYGLTPPPKKDTTHEGTEMAVYRKGKSVFLDDDPWFGEPPDSDPFPFQHRKTRSLAIGSSLLNGETEENGDSEKLIRRRQKADGELLPREENGSSAVLARAGKGLALRPKSGSRQDLNKSQQNLIALAEPSFGDGLHAVRKSSSTPEFQEPESNSSSTSSSIWSTSKWTLKPDAFTLPLPLPLFDNIPKPIAAWRNKAARD

SEQ ID NO: 110706 - protein, 86 aa, Oryza sativa
  Clone ID: PAT_MRT4530_14748C.1.pep
MSVVILDLDESTVRGFVADDDAFGRSVDARFEALDANAAGADCGRDAVADEADEATSPEGTSMAQVALEACDVRTAEVPGWNCCTY

SEQ ID NO: 110707 - protein, 139 aa, Oryza sativa
  Clone ID: PAT_MRT4530_14749C.1.pep
MVFAFGNNMWLDFSDKVFNAMEREVAGGGPGPPTISQYRPSQQTAAFIILNAWAAAVVVDRFAVARSHAVHRSSSPVSESGSGQRRAAGGRRSGGVGRLRRERGGHFPIPSRFADETLTGAHSPPPAAAHRSGTPQSSE

SEQ ID NO: 110708 - protein, 443 aa, Oryza sativa
  Clone ID: PAT_MRT4530_1474C.1.pep
MLNGRGNTESAISSNDGNPRGCSGGEPRGYGGGGRRDGYGAGFGERSGCGGDDGGGNCRGRDVGGPKGYNSSSPRGGGGGGFGERLGCGFDDGDANPRGCIGGEPRGCGGGGPRGSGFGKRLGCGGDDSGRLRSARQMCGKKRRRGMWYCRISSQLLEEGENFVLDTQDGSDDDQIEFIPDSDDEGIEYCFSSDQEFVPETEFQDCGEVEEKGGGIQDCGEVNEKGGGIQDCGEVNEKGGGIQDCGEAKENGEEGKNVIFDTQDGPDMDEYEFWPDLDNEGGDFVFEDWFIDVVPKKKMHDGVAMEKKRGSKIGKLMSSNVTYGMGRPSSTITKASFSSNASYPQGGDLWQGTMANHSAEPSKHFVVESSNISEQSKEVSIQFMPNEEEIPSEEKMPSDKENGDGQFVGVDLWVDSQEEEYELIDDTKLEMLRLLIPVRSTNS

SEQ ID NO: 110709 - protein, 43 aa, Oryza sativa
  Clone ID: PAT_MRT4530_14750C.1.pep
MPREYSRGPLNHFIQLAPKDYNDLHNDRREKDVFPSIPNLGKR

SEQ ID NO: 110710 - protein, 229 aa, Oryza sativa
  Clone ID: PAT_MRT4530_14751C.1.pep
MRIQCDACEAAAATVVCCADEAALCARCDVEIHAANKLASKHQRLPLDAALPAALPRCDVCQEKAAFIFCVEDRALFCRDCDEPIHVPGTLSGNHQRYLTTGIRVGFSSVCSANADHLPPPAPKGNSKPPASGIAAAAAPKPAVSAAAQEKGSPIGFKDLEWLDDIDLFHVQSPAKGGSTAAEVPELFASPQPASNMGLYKASGARQSKKPRVEIPDDDEDFFIVPDLG

SEQ ID NO: 110711 - protein, 257 aa, Oryza sativa
  Clone ID: PAT_MRT4530_14752C.1.pep
MRIQCDACEAAAATVVCCADEAALCARCDVEIHAANKLASKHQRLPLDAALPAALPRCDVCQEKAAFIFCVEDRALFCRDCDEPIHVPGTLSGNHQRYLTTGIRVGFSSVCSANADHLPPPAPKGNSKPPASGIAAAAAPKPAVSAAAQEVPSSPFLPPSGWAVEDLLQLSDYESSDKKGSPIGFKDLEWLDDIDLFHVQSPAKGGSTAAEVPELFASPQPASNMGLYKASGARQSKKPRVEIPDDDEDFFIVPDLG

SEQ ID NO: 110712 - protein, 98 aa, Oryza sativa
  unsure (1)..(98): unsure at all Xaa locations
  Clone ID: PAT_MRT4530_14753C.1.pep
VPFPVEEGSHPHYFSGLVKSSGGAGDLVKVDLKEKGFXEWDPPPRSWGPIWGIGPPQPLKGPFSLRVPPEFDPKLFPPDVFPDNWKAPPFFKSEIPVG

SEQ ID NO: 110713 - protein, 100 aa, Oryza sativa
  Clone ID: PAT_MRT4530_14754C.1.pep
MTVQNMRMLNSSAVFRQQNCFSSASQQQQCSEVEAFLAGTAMVSRPRKINQNQGHAKFRSINSTILEPWTAETDQKKWMHSMWMGKKKRIYNKTDRSVQK

SEQ ID NO: 110714 - protein, 74 aa, Oryza sativa
  Clone ID: PAT_MRT4530_14755C.1.pep
GGHEETDGIGGHAVALGGLGDHVKHRKDLGKKVRRMEQRREQIGIEGVNLHHQVNLVGHGLTPSLIQKLRLRSS

SEQ ID NO: 110715 - protein, 181 aa, Oryza sativa
  unsure (1)..(181): unsure at all Xaa locations
  Clone ID: PAT_MRT4530_14756C.1.pep
RCALVGDEIYFTLRNGNTIIEXNWGKNRLSMFDPPTSDLYYIALTVMENGSLGFAGIEGSSLNVWSRKVNPQGAAEWVLCRIIELEKIIPVVDLSDEACVVGSAEGLGVIFVSTGVGLFTIELKSRRVKKLEEPGVYFSVLPYMSFYTPGSVLNLACLFSCIFFTASIYLLSHNVTAILLY

SEQ ID NO: 110716 - protein, 208 aa, Oryza sativa
  Clone ID: PAT_MRT4530_14757C.1.pep
MDMISGMLRPAFDRITPSIASAAVFSFSRVVSFTGSFNSRTGLLTAADGEEETPLSPQAIETTASTGGVGAFDIEAPAAMTTTPDQAVLRDDVRGDDELIRRLSKSVQPVCLFCAAASLTMSVNLPASGGAGGALYGATLAFVCLGLFASLGLSMYTIVSRPGDAAVARVQKWAMVLALAFVLVSFTLRMWPVLVSSSSSPAPPPRST

SEQ ID NO: 110717 - protein, 116 aa, Oryza sativa
  Clone ID: PAT_MRT4530_14758C.1.pep
MARLGFPAPRYYPDNVIFQIIAFFGLRLADRAMVSEVVDGCLVRFNGVPCSTMSSGLGSRHPEPSNGLPYGACLRMAIAGTSSMSRPSGWHPDAMPSEDGAPLLSLLGPLQRRLML

SEQ ID NO: 110718 - protein, 97 aa, Oryza sativa
  Clone ID: PAT_MRT4530_14759C.1.pep
LLFVFLFFFFFFLFFWKTQILKRKGLFEGILHPIFMVGQPSYMISHSPLLGQLGVFLIKRKTKHVAPRKRPLGYEGLVFNNRMLTKEGPTTTKKAAM

SEQ ID NO: 110719 - protein, 86 aa, Oryza sativa
  Clone ID: PAT_MRT4530_1475C.1.pep
MARLQRRRLVLPLLQLAVVLWLAATSGCLCRRPPTPIAGVPSPPILPDGDRTPESPPAPVSAKHPNFSVLPPPGCSPDCTDQQRQP

SEQ ID NO: 110720 - protein, 334 aa, Oryza sativa
  Clone ID: PAT_MRT4530_14760C.1.pep
MEEEQRLPAGFRFFPTDEELVTYYLARKAMDATFTSAAIRDVDLYTSDPWHLPCDSSAASTGGGGGGECYFFCRRSSKYPSGARVRRATAGGYWKSTGKDKGVYAAGGGGGLVGTKKTLVFYEGRAPRGEKTSWVMHEYSRAPSTNFIRGAQARTHNLLDIIYSEWVICRVFKKQPPIEHWLEMEEVETTTTTTTVQEHTPNRRRLPPAEAAAAPPPPSGQPWQHTSRRSGDGRAAIDGGNREEEEDEHGLAREESSSPVVISSPSRCTSSPSSRLLNHEHLGASSSDDLPELMEFGDIYGGIAAGGPTDQQASSSNSNSICNFLDEPYYCWNF

SEQ ID NO: 110721 - protein, 99 aa, Oryza sativa
  Clone ID: PAT_MRT4530_14761C.1.pep
MGEVRSLPRACGSDGVEKKGGSECRELEGGVWERTGPREYLRASATDHAPGVNRAQKKISPEDVAVRDTNTVRKKGLGMVVSPAMGQEVVALSHSRAAQ

SEQ ID NO: 110722 - protein, 472 aa, Oryza sativa
  unsure (1)..(472): unsure at all Xaa locations
  Clone ID: PAT_MRT4530_14762C.1.pep
LAVLDLDKSTSTTASLKKLQDDGALPGSGTMEREAGGIEPEPLLGRMVAVEDYISCGFLPPPSEFLLLVLNFYGLSLLHLNPNSIAFLSIFSYLCEAYIGVEPFLDFFRFYYELRWMESNRISGCVGFXLRDGLKSRYIPFQCPSSRSKWXGEEQPDKIPEWTAKPALTPSLQSFIDIVDDHRVRGLSGYEVAADFIGLNSDTVARRVGQVMISGPATASDILVPLCEKGPTERKATINALPLTDVIGPLADHQAAVSLKEGVAKEASDVVAAAMTSGSNVPKKGRKFSSVLGTRRKAPNPSGPGGDAKRSRRWPWGELQAEMERILQVSARGIGREIEEARTAASSANERADKLARDLAEAREDLLKMRELVAGNERKWQGLEHRMSELENNLSEIRGSLRVSYTGLHQLTGECGVMTTIPANPDEFSPTSSFAELAMAMEEIPSKHAAXRMGEETSNGIYIGTCHVLACV

SEQ ID NO: 110723 - protein, 39 aa, Oryza sativa
  Clone ID: PAT_MRT4530_14763C.1.pep
HAGNKSKRGFGNSSQTVSINKMLVRTLGSYNLPMIDIFY

SEQ ID NO: 110724 - protein, 764 aa, Oryza sativa
  Clone ID: PAT_MRT4530_14764C.1.pep
MAVEHKKAVGSVWLPDDVFFSILSYLPAKPVARFRSVSHSWRDMLSSAPFVQLHLRRANRPGQLKVFFHTGLPVDNDLPDKHFYYTWQQDGGPAKKLMRHGFSGGFSRITKPLHGLVLLFLFHSYGRGFFVLNPCTNALLTLPDTKYPLKNNRHLGTNLSGKYRSPGYMYWSYGLGYCSATGEYKVVRLFSLPYDPEAAATFCEVFVLDAPAYWRPTAQQPPAPADHNVKVMVTDPPVFLNGLFYFLCRDGLDVITLDVGDETFGSPPPLPVANMALDRNNKCVVLGVDLNGSGTSATPPEILLNPEDAVATAAETHLSPETTTATCRFRSEYPPELSLFEESLVPLGRTLEEIVFSSPATRAWSEVLKLLPARTVSDLSLVCREWRAMVTTNRFIRSHAVHSNLIATHPRIKLVVDTPRDYLDASGFADLDDLIISGNRPRMCTSTSFICSPPCHGLNLGTFRRTNYLFNPCTGYQVELCPPDYDYDDRVFDGVMALGYDAATGAHLAVHLDCWNFETRAYELRCRTQLVGGHEVWKPAESPPRAADMEVPAAYANGKIYWVVDRKFGPQPSSTAAAACELLVFDMEARKFEVIQGPPCRLPRFNFGPIGPPGERDPKKYQKRVVRNKYRKRKIEPCHRHGESRITLLELHGALCVACSDPATDAIDMWMVKDDGAWSVEYRLEIGELSPEYSLETTSPMAIDPVDGRILLNTGTSLGYYDPKTRALETIYSVDIRHDNEGLRYRFCPVICQESLVCPLPGKY

SEQ ID NO: 110725 - protein, 967 aa, Oryza sativa
  unsure (1)..(967): unsure at all Xaa locations
  Clone ID: PAT_MRT4530_14765C.1.pep
MRLAKFKKAILALGLQLDTEANIKRINDHFGQKAPPSCRTRVIPDRAVISHIDSRITQLVQSXYLESSAVVTCKKPADRTKMVTDNWDILAGSLLHIALKQWLSKICRRIYPTFFSGLWVALTLVRPLEALFFSSRXRERGTVDAFGSKLLEGTRNPLQGFSENVITFAHSLXMSDIESAYLERDQMQSTTLRDEFLQHFLHEDPVVGIEYEAQLQKTLLPHISSAEVVKFAANFSTISSCVIKVVEPHAHASLEDLKAVVLKVNTLEQDNAIPPWDEEQIPEEIVSQSPEPGSILDKVEHPGIGATEMILSNGMRICYKCTDFLDDQVVFTGFAYGGLSELSEDEYTSCSMGSTIAGEIGIFGYRPSVLMDMLAGKRAEVGTKVGAYMRSFSGDCSPSDLETALQLVYQLFTTKVEPREEEVKIVMQMAEEAIYAQERDPYTAFANRAREINYGNSYFFKPIRISDLKKVDPIRACEYFNNCFKDPSAFTVVIVGNIDPSISVPLILQYLGGIPNVGNAVLPLTRDDLKGLPFKFPETIIREVVRSPMVEAQCFVQLGFPVVLKSTTMTEDIHYVGFLSKLLETKIMQVLRFKYGQVYSVNVGVFLGGNKPSRSGDIRGDISVNFSCDPDMSSKLVDFVLEEISFLQNEGPSEEDVLTILEIEQRAHENGLQIQDEGRLKVREALTPQSMQMALQRVVPFPCRKQFTVVILMPKSSCWNSFKALLTWSPGGFSRDAKVVALNESVAGSVKSVFKPWEQRLDTSGGFLESNEGDPELLVFIPSHYKKVHVQIHLVLLIHLFLLSIACCVDLCMRFTSDVKIKSISVVGGADGTSPSRMRALVSELYLFCYLTHLFVPLNRMFINREGIDFNDAQNMQPVQEWELAENLQGVLEYQTRYSRFQGVANLTLHFPENFGGDTTKIYYIGLRGEATQNKRDVVATIVYEIMPNPSDHKTKSETGGGFSHVE

SEQ ID NO: 110726 - protein, 48 aa, Oryza sativa
  Clone ID: PAT_MRT4530_14766C.1.pep
MANGSDASWEPKATAGTRRRRRLAMETLAAMEDGVLDDDGGVGASHTD

SEQ ID NO: 110727 - protein, 45 aa, Oryza sativa
  Clone ID: PAT_MRT4530_14767C.1.pep
STTVDPTPLFYSLIPNVLYWCGASSFLLMCNGLVHYDTCCWSYYH

SEQ ID NO: 110728 - protein, 42 aa, Oryza sativa
  Clone ID: PAT_MRT4530_14768C.1.pep
LAAVLQGKAWENPADSHLNRFALHPLVDRWRRTEQAPFQTLS

SEQ ID NO: 110729 - protein, 661 aa, Oryza sativa
  unsure (1)..(661): unsure at all Xaa locations
  Clone ID: PAT_MRT4530_14769C.1.pep
MPASSLLPPTLLPHRHRLRLPPAGCSTSSSPSATRYDFDPLLSYLSTTSSSPSPPPTSVLPVTESRLAASYAAVPAREWHALLRELAATDASLPLAFALLPFLHRHRLCFPLDLLLSSLLHSLSVSGRLLPHSLLLSFPPSLSDPPSPLLLNSLLAASAAASRPAVALRLLGLLREHSFLPDLASYSHLLASLLNTRDPPDAALLDRLLGDLRESRLEPDAPLFSDLISAFARARLPDAALELLASAQAIGLTPRSNAVTXLISSLGSARRVAEAEALFLEFFLAGEIKPRTRAYNALLKGYVKIGSLKNAEQVLDEMSQCGVAPDEATYSLLVDAYTRAGRWESARILLKEMEADGVKPSSYVFSRILAGFRDRGEWQKAFAVLREMHASGVRPDRHFYNVMIDTFGKYNCLGHAMDAFDRMREEGIEPDVVTWNTLIDAHCKGGRHDRAIELFDEMRESNCPLGTTTYNIMINLLGEEQRWEGVEAMLAEMKEQGLVPNIITYTTLVDVYGRSGRFKEAVDCIEAMKADGLKPSPTMYHALVNAYAQRGLADHALNVVKAMRADGLEASTVVLNSLINAFGEDRRIAEAFSVLQFMKENGLRPDVITYTTLMKALIRVEQFEKVPVIYEEMITSGCAPDRKARAMLRSALRYMKHMRVA

SEQ ID NO: 110730 - protein, 262 aa, Oryza sativa
  Clone ID: PAT_MRT4530_1476C.1.pep
MWYCRISGQLLEEGENFVLDTQDGSDDDQIEFIPDSDDEGIEEVEEKGGGIQDCGEVNEKGGGIQDCGEAKENGGEIQDCGEVEKGGGICGGSNIVHSNDECKQPAQMWCGQRVRGKWFHRESGRCLEEGKNVIFDTQDGPDMDEYEFWPDLDDEGGDFVFEDWFIDVVPKKKIHDGVEMEKKRGGKIGKLMSSNVTYGMGRPSSTITKASFSSNASYPQGGDLWQGTMANHSAEPSKHFVVESSNISEQSKVLNTVLAYFQ

SEQ ID NO: 110731 - protein, 155 aa, Oryza sativa
  Clone ID: PAT_MRT4530_14770C.1.pep
RRMALFEEAETLLQTQMYSRQTKRNAELAARLNTRFPEAAVKFTPGTVKNKLSTFKQRWSGGRKLATCEGTLITCSATVLTILFTETVTASESTNSGAADSGAVVSTPVGPMSGKSYVNYGIIGASSIKKCIDLVESIEDLSDQEKADEARLMKS

SEQ ID NO: 110732 - protein, 185 aa, Oryza sativa
  unsure (1)..(185): unsure at all Xaa locations
  Clone ID: PAT_MRT4530_14771C.1.pep
MGRQRGGRRQHRVTPVANKPPSKAMGDAAVTKADTGGTSRSVRQSALLHLKPEPKPICQTRWPRWTRPLASAXQAHTRASRARGSSSTSADRRRAGRLGRARGRRSQRGGGPEQDEDGGGPGGDSSGRRWRSEVLTIVVAKQQWRAGGARAGDVAARGGSGQAWRRXWRGGGEVKEVVGGGGEWP

SEQ ID NO: 110733 - protein, 643 aa, Oryza sativa
  Clone ID: PAT_MRT4530_14772C.1.pep
MACYYLAAAAAGLALLLLHAPLTDAQTLVPLCGDSGNYTEHGTYHANIQYLATSLPSYASSSPSLFASGSSGTVPDAIYALALCRGDTNSSSCATCVAAAIQSAQELCPLVKTVIVYDDTCILRFANDAFPISPTSNSQGMVVAWKAQNVSAAVAPAFEAAVVRLINTTADYAATDSVRRFGTGEEAFDETTFPKIYSLAQCTPDMAATACRSCLEDIVGRMVSGNLIGRMGGRVLGVRCNLWFEVYPFFSGRSLLQLPGPSPSPAPPVTAAGERSKNKRSAILAISMPTIALVLATIAAWFCSTSWRRRRLARKTLRPKSSEDEMQSFASLVLDLQTLRTATDNFSEHKRLGEGGFGVVYKGDLPEGQEIAVKRLAQTSRQGIEELKTELLLVAKLNHNNLVRLIGVCLEENEKILAYEYMPNRSLDTILFDAERIKELDWGQRFKIINGIARGLQYLHEDSQLKIVHRDLKASNVLLDSAYNPKISDFGLAKIFERDQSQVITHRIAGTYGYMSPEYAMRGQYSMKLDVYSFGVLVLEIITGRRNFGSYGSDHVVDLIYVTWEHWTSDKAIELIDPSLGNHYPVDKVLKCIHIGLLCVQPKPADRPLMSAVNAMLSSTGTVRLPCLSRPSFWVQEIGATAS

SEQ ID NO: 110734 - protein, 200 aa, Oryza sativa
  unsure (1)..(200): unsure at all Xaa locations
  Clone ID: PAT_MRT4530_14773C.1.pep
MGDAAVTKADTGGTSRSVRQSALLHLKPEPKPICQTRWPRWTRPLASASNTFVRAVTSMAGARAMAGGGGGASQMQPPSSLHHSATARGSSSTSADRRRAGRLGRARGRRSQRGGGPEQDEDGGGPGGDSSGRRWRSEVLTIVVAKQQWRAGGARAGDVAARGGSGQAWRRXWRGGGEVKEVVGGGGEWPDERTFFFLTW

SEQ ID NO: 110735 - protein, 95 aa, Oryza sativa
  unsure (1)..(95): unsure at all Xaa locations
  Clone ID: PAT_MRT4530_14774C.1.pep
ISPNGKTPVNVVRDVGCAYDIRAHRSISCCQSYRRICAYDHAVNTFRSCHPGAEKIXHLVRLVEDVRRRKRPRSHVYHASGSSTPLPVTPLRCRS

SEQ ID NO: 110736 - protein, 51 aa, Oryza sativa
  unsure (1)..(51): unsure at all Xaa locations
  Clone ID: PAT_MRT4530_14775C.1.pep
TDVHRKPQYTSCRXSRHILDSAAFAAYSLAAHQNVTXFREIEMCMGIIQRP

SEQ ID NO: 110737 - protein, 202 aa, Oryza sativa
  Clone ID: PAT_MRT4530_14776C.1.pep
MGDAAVMKVDTGGTSRSARQTALLHLKPEPKPICQTRWPRRTRPLASASITFVRVVTSMPGARAMAGGGGGGASQMQPSSSLHHSATARGSSSTSAGRRRAGRLGRAWGRRSQRGGGPEQDEDGGGRGGDSSGRRWRLEVLTVMVAKRQWRAGGARAGDVAARGGSGRAWQRLWRGGREVKEVAGGGGEWPDGRPFFFSDVA

SEQ ID NO: 110738 - protein, 106 aa, Oryza sativa
  Clone ID: PAT_MRT4530_14777C.1.pep
RRPQDPLPGRRPLSPRRRSVLKIGGRAADMGDLARSHRRGEAHQHAEQRSLPMGGVAGVEVLVGGGVVRDSCESPVGGKSLENQMQLLDGQSKAMVGLINLYSFQA

SEQ ID NO: 110739 - protein, 142 aa, Oryza sativa
  unsure (1)..(142): unsure at all Xaa locations
  Clone ID: PAT_MRT4530_14778C.1.pep
MGRQRGGRRQRRATPAANELPSKAMGDAAVMKVDTGGTSRSARQTALLHLKPEPKPICQTRWPRRTRPLASAXASSYQSEPLHSATARGSSSTSAGRRRAGRLGRAWGRRSQRGGGPEQDEDGGGRGGDSSGRRWRLEVLTV

SEQ ID NO: 110740 - protein, 97 aa, Oryza sativa
  Clone ID: PAT_MRT4530_14779C.1.pep
LTGNLGGNPPSFPCVGHTLHPGRVGLTRGTFLDLVPARRVTQLSPHQLQSSFRAWRSIHWSISLFPWWCTHLCIPVTNFPHHKPIHLAGLGTAIHTS

SEQ ID NO: 110741 - protein, 976 aa, Oryza sativa
  unsure (1)..(976): unsure at all Xaa locations
  Clone ID: PAT_MRT4530_1477C.1.pep
MTPLLLLLLALAAGAGAASFPADFANLFAAKAALSDPSSALAAWDPGLSPSLSPCRWPHLLCSNPSSSSSAAIAAVLLSNLSLAGEFPAPLCELRSLALLDLSYNDLTGPLPGCLAAMPSLRHLDLAGNGFSGEVPRSYGAGFPSLLTLSLAGNELSGELPAFLANVSALEELLLAYNQFAPSPLPETFTGIRRLQVLWLAGCNLVGDIPPSIGSLKSLVNLDLSTNNLTGEIPSSIGGLESVVQLELYSNQLTGSLPEGMSALKKLRFFDAAMNQLSGEIPADLFLAPRLESLHLYQNELTGRVPATVADAAALNDLRLFTNRLVGELPPEFGKKSPLEFLDLSDNRISGEIPATLCSAGKLEQLLMLNNELVGPIPAELGQCRTLTRVRLPNNRLSGAVPPDMWGLPHLYLLELAGNALSGAVAPAIATARNLSQLLISDNRFAGALPPELGSLPNLFELSASNNVFSGPLPASLTVVTTLGRLDLRNNSLSGELPRGVRRWQKLTQLDLADNRLTGNIPAELGDLPVLNSLDLSNNELTGGVPVQLENLKLSLLNLSNNRLAGVLPPLFAGEMYKDSFLGNPGLCTGGSCSSGRRARAGRRGLVGSVTVAVAGVILLLGAAWFAHRYRSQRRWSTEDAAGEKSRWVVTSFHKAEFDEEDILSCLDDEDNVVGTGAAGKVYKAVLGNGARGGDDGAVVAVKKLWANGGAAKKAAAMEAGGGGGGGGKDTFEAEVATLGRIRHKNIVKLWCSLSSGDRRLLVYEYMPNGSLGDLLHGGKGGLLDWPARHRIMVDAAEGLSYLHHDCAPPIVHRDVKSNNILLDADLRAKVADFGVARAVSAAPPTAVSAIAGSCXYMPPYSYTLRITEKSDVYSFGVVMLELLTGKAPAGPELGEKDLVRWVCGCVERDGVDRVLDARLAGAPRDETRRALNVALLCASSLPINRPSMRSVVKLLLELRPESKEKAMAEEKPLLV

SEQ ID NO: 110742 - protein, 329 aa, Oryza sativa
  unsure (1)..(329): unsure at all Xaa locations
  Clone ID: PAT_MRT4530_14780C.1.pep
MWRLRGCHVGRLEEDEXEAGRNGRRTTAALTGARWDIFGQREXTGVMIRTRGIKPSARMHRKWLDGEESRQRTPATAKEGKGDGTTRDRFLRARASTRPRDCIPSTGLGGATPREAGDERRLAAASGNGGDATPGGGKGLGGARELLGVLRVLPRNLRGGGGAKRENGGELYRDRTGRCDERPTAQKKSANRTHLAHNHFSFSLRDVANQLDAEGGGGGRAEKEAAPAPGAVLEAAPARLRQEVEGGRRRHRGRRRRSGAVEAGGGAGADEAGGVAKAEGGGGEGGGGANVVKAVGGAGAVEAGGAEAAGRGGERGDCEKGVRGLREQW

SEQ ID NO: 110743 - protein, 80 aa, Oryza sativa
  Clone ID: PAT_MRT4530_14781C.1.pep
KERAKLSRFWMDRFRTSSRTNRPTQAAALNMIGYTVLAIPAADLPPPIRAPSSAVGNTLSLAPLPRAGEVSWLLRSDPSC

SEQ ID NO: 110744 - protein, 59 aa, Oryza sativa
  Clone ID: PAT_MRT4530_14782C.1.pep
PRVRGRVGKKKKKKKKKKKKKNREKKIIGLYVLKDGGFTYECLRYLTCSCASLNFIWLA

SEQ ID NO: 110745 - protein, 582 aa, Oryza sativa
  unsure (1)..(582): unsure at all Xaa locations
  Clone ID: PAT_MRT4530_14783C.1.pep
MSLSSARQRRATAASPPTDDGYSKEAKDRRRRPSGEEEEEGIRWFLPFLALGLLRHMSASSNLIHDCDEVFNYWEPLHFLLYRSGFQTWEYSSNFALRSYLYLFIHALVAGPASMIFGEHKVRVFYSVRIFLGLISTITETVLVVALSRKYGKRLACYVLAMLCLTSGCFFASTSFLPSSFSMYAVTLSSALFLLENYAAAVSVAAAGVILGWPFSILVFLPITVYSLIRGSFRRVFLSGFLTSMFLLVLSVIADYYCYGKWTASVFNLLKYNVFGGGESHLYGTEGPSFYFKNGFNNFNFAFILALLFLGFVPFARKKYVPDLLIVVSPVYIWLAFMSLQAHKEERFLYPIYPLICVAAAAVIDTFPDFFHDKYSSEQSIFEKIAKGLRPLILGFILCASHSRTFSMLNGYGAPIQIYQHLEHHEDTGPGSVLCVGSEWHRYPSSFFIPSYISEVWWIDDGFRGLLPFPFNETLGGTTAAPSYFNDKNKASDEQYLKDIGACSLLVELDLRRPYPSRGSDLSTWETNLSQRMELYXLTALPFLDRELSPALNRSFFIPHRWQQNNVFGLYKLLRRLPTDQA

SEQ ID NO: 110746 - protein, 150 aa, Oryza sativa
  unsure (1)..(150): unsure at all Xaa locations
  Clone ID: PAT_MRT4530_14784C.1.pep
HEGARDPPPDQALRRCRPTAGPVHPSASPFSSAPSFAVEAAAFPSPRPVGPDRGSHRHRCPHRRISPSPQPTRLQGSLSMATGFVMRKMDLVVMRYALSPFYLITDATVHRPFCSLENSFSAIDNVPLCFQVNFSYIEVGEXFLRTCIYV

SEQ ID NO: 110747 - protein, 119 aa, Oryza sativa
  unsure (1)..(119): unsure at all Xaa locations
  Clone ID: PAT_MRT4530_14785C.1.pep
IPFILGRTMSTDTVYPRVYGQFLYTLRKSITXIETESMDGSSPTRMRLDLYHIVRVPISPSPTWRSTDPRYKRDPXGQDLRHRISPSIHPPQPTKPERAGAKSPEDLVGLTRLRSCRYH

SEQ ID NO: 110748 - protein, 200 aa, Oryza sativa
  Clone ID: PAT_MRT4530_14786C.1.pep
MRPTVCEFPRKVYGIYAALIIMTDQNHVVPLSVPDLKHPVGTTFQGFGLEQTLSWTRFYFDGVKLTKLEQFDFIHQKREQQKGISLPTLTARPTNHDGADAGCYVAQRPTRRNGLPRQGWGVVGPQFAMDTLSSVSFLAIRRGLWEWGRGGQPQWLVYYNERERFRMDLEALATLQLINGRGTRKKMGCGGGRLYVGLTY

SEQ ID NO: 110749 - protein, 662 aa, Oryza sativa
  Clone ID: PAT_MRT4530_14787C.1.pep
MGEEEEEELYYGKGGARGGGNGGGALSAAAAAAPSVSGISAGARGRGNATVKKELSALKDANGNVISAQTFTFRQLAAATRNFREECFIGEGGFGRVYKGRLDGTGQIVAIKQLNRDGTQGNKEFLVEVLMLSLLHHQNLVNLVGYCADGDQRLLVYEYMPLGSLEDHLHDLPPDKVPLDWNTRMKIAAGAAKGLEYLHDKAQPPVIYRDFKSSNILLGEDFHPKLSDFGLAKLGPVGDKSHVSTRVMGTYGYCAPEYAMTGQLTVKSDVYSFGVVLLELITGRKAIDSTRPHVEPNLVSWHLIILTSGIYTVLTSAITFFKRFIGKVDVLIIVRTKCRARPLFNDRRKLPKMADPGLEGRYPMRGLYQALAVASMCIQSEAASRPLIADVVTALSYLASQKYDPNTTPSSKKAGGGEAGRALSRNDEAGSSGHKSPSSKDSPREQQLPGILNDRERMVAEAKMWGENWREKRRAAATTSSNAQEQICRTSVICSDVRQKERKEDVVQLTTDRASTNVEALGAAVGPAAALVGVPVGSGGGGGGEEEAEAEHIIGVARAKGVSGDDGEADGGECEAARRASVLGEDTAGGKQVEESLDDGGVQVARVGASDQSLVGTPRRMMAVSAMGTEIMFASSIITRRASMGRIYRLGRLLRPFSKVSP

SEQ ID NO: 110750 - protein, 75 aa, Oryza sativa
  unsure (1)..(75): unsure at all Xaa locations
  Clone ID: PAT_MRT4530_14788C.1.pep
DFLGLVEKFYYLSGRYDLELAVGAAMENSFLRALGHIELDLPEAPEKAPKPXDPFSKFGPKNIAHIPVIIVSPAN

SEQ ID NO: 110751 - protein, 223 aa, Oryza sativa
  Clone ID: PAT_MRT4530_14789C.1.pep
MWGPCVILYLFLLSPRSLSLLAFLIFLSPSAFCKLHQRWSSGNGDGWRVEWWRRFGQRRQRRQHALKGQSGGDRREGWRSSGSDGTGARTGAAAERHSSTGFAPSDVTYKSCGHGILDGKVNGCIHRHHRHAASVSLPLQLFPPSTPRSGCAHQSPTTSARSFSAPSNSPFSRVEDAAAVRVPEPLHEVDRVLAAVHDHRWTPAAGDLEEDDAEAVMMLMPAA

SEQ ID NO: 110752 - protein, 77 aa, Oryza sativa
  Clone ID: PAT_MRT4530_1478C.1.pep
SGGCLPCQGLGRPNPLHALSRVCGLGGCSQRPPTTFIKAASARHIAFNATCRRTNRPLAAGMTDVTVARETCARTYC

SEQ ID NO: 110753 - protein, 54 aa, Oryza sativa
  unsure (1)..(54): unsure at all Xaa locations
  Clone ID: PAT_MRT4530_14790C.1.pep
VRTFECLSSHGQCPRLLGRPTNGRIXDFMHSTTLSASNLQDPEISSLVESKLTE

SEQ ID NO: 110754 - protein, 120 aa, Oryza sativa
  Clone ID: PAT_MRT4530_14791C.1.pep
MEQIWWLMCMLGAIGIRRRQYMLAELELRSIGTSLISLPSTLLFRWSSSDRSRLVAVGSVLAFFWVYVLVLSYKINASHRYINVSRLEINRTNHGLSSCTVHRRIIAFLEVDRLSSPCTY

SEQ ID NO: 110755 - protein, 64 aa, Oryza sativa
  Clone ID: PAT_MRT4530_14792C.1.pep
CGLIPIGAPSATTTTTGLQWNLDNSSMSFGGLISTLNIVREERTVVTITSDCDLIWTISLRHHS

SEQ ID NO: 110756 - protein, 373 aa, Oryza sativa
  Clone ID: PAT_MRT4530_14793C.1.pep
MSTNGGLEHIDSLFAANSLVYCRVYAKAFALAPRQLVKSCTVPIHVASKRLIPKSLSRSYGRRRRPNATASLELRHRTSPAAVAHFLDNPSRPPHPHTTLVHSQLPIPPTSQPFAGTRRTSSAVQLPGYLLCLGQSYMAGLVVRRGQGPSAARRRGEGPPLVAREGGDVDRAGDDGGGEGDAQATKSTMDGVRRLRRAKEKQRCHRFLIHRIRAEVERATPSAAGACASRSLPPAAILSGAPSCSVPFSAGVRFPAAGASGAALTTSGVRTGAVVQRSPAWFYLLSRDAAGGGGNCDDSYRRAWSRLLRRLVRESRSFCSLSISRHEILYHPKYLQKWPLPLKWRASRCAHVALRSLAALYKGCKGANVISLC

SEQ ID NO: 110757 - protein, 894 aa, Oryza sativa
  Clone ID: PAT_MRT4530_14794C.1.pep
MSAEAHKLRFVRCPKCLQLLVEYPSISVYQCGGCGAVLRAKNRFMSVTQTGSKPDEHNNISSSLNGSSQDNESACSDGQKIDSSSAQPNEDAVEENIPSTTKDAKSCEAVNQEQNTTTVQSVTPTEDENKEKCPTTDADIRDTGLENIGTSENTDLGKGYSYDCVSDGNAGSDVAAVHIAGEEPGAISNHSMKGEVDSVTDQIFSVSNKNVNCKELDERTNLCKETEAKSCNELIQMEERSQPNEGFHVESHEDLIEELERSLSFSDDEESLLDATGNNELNEALQFQIGSRRFSPGSKMNDASRSDPHGRLIEELERSFSDAEEAAEQHVVVVDKVITERDFGNEHGKVPTSLVAESGHPCEGNISSYDDGHQKSGQSFQQNELTADETEEKEHGLLENDSKINCIHGNEHAMVADNDIAEIHSEHDKDPQLLDGESAKLCEGTISSFDGHLKSGQCFQEDEPTADGNKQKEESHMGNNNVTDCAHEDNATVVGFSSLSNDGIHCKSPIFNEKEEERSDKYRANQLYQGLSLDSEDFMSIQNFIESQMDGTSSSLSSGSPNQGNLSLKSSTKFKFDRLERLKKIDELRDQLNRLCSKKRLENRYRMKGLEYQPQLSSYYVDQHSQNVDADSIQSSSTLGSYYWNGKQPSYPPRNQFSPPHSCTHCHFGHVETHMPHNYGAWDEFNSYYQPSYAGSSIIDHDSLNSSYKEQKRVVRKHILRPVSGASPFTVCNSCFNLVQMPSDIYISKTKMGKMQCGQCSKVLVLSFPAIHHACANSSKEVASKSNKHKGSIVVKPEDAASHFAESFTRDPVSMNEEYGASFTRSFSTQAGSALAASQSGKNVSDSTLHRLMGYDSASQLLHDLRHSKVYDDGYESFESMVPVSSRVSRRKNT

SEQ ID NO: 110758 - protein, 252 aa, Oryza sativa
  Clone ID: PAT_MRT4530_14795C.1.pep
MVSLQVLVLSSNEMTMKTTNLTTLCNLRVLQLKESYSYGNISELIESLPLCAFGKLQELYLQGNHFTGTLPNWLGQLTSLVILDLSMNNITGPLPGIFGKFTDLRDLNLAGNQLTGHLPSQISMLSNLTRLDLSNNILDGLITDEHFVGLKGLEYIDLSHNRLKIVLGSPPFRLKKHILQTARWVLCFLHGFSGRWIFLTLILQAQISGGLPTNWEIMSVEQLYLSSNQFTGEIPSLPRNIITLDISSNSLT

SEQ ID NO: 110759 - protein, 155 aa, Oryza sativa
  unsure (1)..(155): unsure at all Xaa locations
  Clone ID: PAT_MRT4530_14796C.1.pep
RALLICYLWALRTTPTRPTKFSPFMLLYGDEAMTSTELGANSPRVTFSGNEXGREVSLELLEGVRXVEALEHMQKYATGTSATYNKKVRPTELLPGHLVLRKKANPIAVGKLESKWEGPYLIKHKSRTGSFRLATLEGEEFDHSWNAASLKRFYV

SEQ ID NO: 110760 - protein, 87 aa, Oryza sativa
  unsure (1)..(87): unsure at all Xaa locations
  Clone ID: PAT_MRT4530_14797C.1.pep
RRASWTXVREDMLETKTVTQXRRSLRKMTPKSRCSRTVKDEISHRVCQTPGQLGTNARPGVANTARARQGTTMNHTPIRDGRGARTA

SEQ ID NO: 110761 - protein, 115 aa, Oryza sativa
  unsure (1)..(115): unsure at all Xaa locations
  Clone ID: PAT_MRT4530_14798C.1.pep
SRQRDAERDXQLASAEEKIKSLEACLASAEATAATLVPAIESAKEACYTLRLALNDLGARAEGAPGEGGTALDFSEXTQEAAGSIVEVAGAYXGLXTRVSAGFVLSLLHAHGCDH

SEQ ID NO: 110762 - protein, 226 aa, Oryza sativa
  Clone ID: PAT_MRT4530_14799C.1.pep
MREPDDTSSPKSASLTSDLPRKHDHPSPRLPGSSLVDLALVGLRGAIGLVAQEREILEALKKRLEEAAKGKWPEEMLSVLWALRMTPTRPTKFSPFMLLYGDEAMTPTELGANSPRVTFSGGEEGREVSLELLEGVRVEALEHMRKYATGTSATYNKKVRPTELLPGHLVLRKKANPIAVGKIESKWEGPYLIKHRSRTGSFRLVTLEGEEFDHSWNAASLKRFYV

SEQ ID NO: 110763 - protein, 96 aa, Oryza sativa
  Clone ID: PAT_MRT4530_1479C.1.pep
MGNLVAKKQQDLSWHLQHAKLEEELNSLALITEIQPRICPRVFWPTSSPSNPMRAKPHPTSVQVHPRTRPVAGGPKIDVMAEDRSDGQSSGKLSND

SEQ ID NO: 110764 - protein, 158 aa, Oryza sativa
  Clone ID: PAT_MRT4530_147C.1.pep
MDPVAGSRYRFGPHEIAERQVFRTSPLSFAIVNLRPTRPGHILYFCQLCSLVKLFADLSPDETRDLWIMAKDIGVRVEQYQRASSLTFTIQDGPHSGQTVPHVHVHIVPRRKEDFENNDNNNGMMNAKNETLDLDIERKDRTMEEMAQEAKEYRALFS

SEQ ID NO: 110765 - protein, 233 aa, Oryza sativa
  Clone ID: PAT_MRT4530_14800C.1.pep
MRGVESDGGGGAPFSSSSSAAAPDNFDAAQYSFFGKEPLEGLELSCLEDGGGGGGDANGGGFSGGAEEGLYRLSSVGEEIDNLSNLSDIDDLASTFAKLNRTISGTRNPGVIGDRRSISRGSSLTVDWAEDVEFPNWVDQDILEDEEFQESKRWWSQSHTLVQQGDAKPLSRTSSYPQQPLQHRASEPIIPPKSPSFTSFPPPGGRSPYTSQGLTRHGSIPSLGCCLQMGSSS

SEQ ID NO: 110766 - protein, 102 aa, Oryza sativa
  Clone ID: PAT_MRT4530_14801C.1.pep
DQKCVGDNEVVMFVRFLERYLKCHGDGQCFQVPTDTIVRILETGAILSLIYTWLQFVVILFLASRLLFAQKHFFRGKLWLHHILFTRIKAACLCCKFVYSSY

SEQ ID NO: 110767 - protein, 340 aa, Oryza sativa
  Clone ID: PAT_MRT4530_14802C.1.pep
MDTDGRLRRALAAFGGGADVWDLVDAALASAARDRPAELRARRDGIVERLYATAAGGRCGNCDAPRSAEPEAAAAAAASPASPDEDADVDGLDDDEGGGMESKILAIRDFLEDPDQSEDELVSLLQSLADMDITYKALQETDIGRHVNGLRKHPSGEVRQLVKLLVRKWKEIVDDWVRLHNSGGDGGSSVLTDGDSPDKIQGRSYQNAQVSDFKYSPSPQRHNGLSSERSSNNNGVESMIEKRRTSPAPTYHNNKQNNSIGYSTTSSSAPVRTVREQKDNLMDLEKLDSARKRLQENYQEAQNAKKQRTIQVMDIHDIPKPKNRNAFIRKGGGGLPGKHR

SEQ ID NO: 110768 - protein, 825 aa, Oryza sativa
  Clone ID: PAT_MRT4530_14803C.1.pep
MRGVESDGGGGAPFSSSSSAAAPDNFDAAQYSFFGKEPLEGLELSCLEDGGGGGGDANGGGFSGGAEEGLYRLSSVGEEDMTVKSIMFKIDNLSNLSDIDDLASTFAKLNRTISGTRNPGVIGDRRSISRGSSLTVDWAEDVEFPNWVDQDILEDEEFQESKRWWSQSHTLVQQGDAKPLSRTSSYPQQPLQHRASEPIIPPKSPSFTSFPPPGGRSPYTSQGLTRHGSIPSLGAGLQMGSPSMSLPSSPYHIAGLSHGLPYGGSMSFGTSNLPVNNPMQNDWPSQANLYAGEQFNLLPNMLQKQISLPNSPMSSLLFSQQQQRLAQVQVQPSHQNYLNLPPHIFYQHHSPELTGRFDSVSSVPSSRDKRSRSGRGKHNIRFSQPLPDTGNQNGDSGGIKFRSKYMSSEEIESILRMQHSASHSSDPYVVDYYHQACIAKRGANSRPKANFAPTSMKDLPSKSRSSGDHHAYLQVDAVGRVSFSSIRRPRSLLEVDLPSSSDGSHDQKSSLRPLEKEPMLAARVTVEDALCLLLEVDDIDRLLQSSQAQDNSFQLRRRRQVLLEGLAASLQLVDPLGPSTSSHSSGLAAKDDLVFLRIVSLPKGRKFLSRYLRLLTPGSELTRIVCMAIFRHLRYLFGGLPSDSSAAETTVTLAKTLSSCVRHMELGALSACLAAVVCSPEQPPLRPLASSAGDGASLIIKSVLDRATELLTDQHAAASYTVSNRTLWQASFDAFFGLLTKYCLSKYESIRQMFTMQSPGSVIGSEVSKATSREMPVELLRASLPHTNDQQRQLLLDFAQRTMPVTGFNASGANGGHITSESVPG

SEQ ID NO: 110769 - protein, 142 aa, Oryza sativa
  unsure (1)..(142): unsure at all Xaa locations
  Clone ID: PAT_MRT4530_14804C.1.pep
XXPARCGIGLTSFHLVYXPFPGGANHRTDSARRRRSRRAPLRXPPGGRCGTATRRDRRARAAAAGRLPASPDEDADVDGLDDDEGGGMESKILAIRDFLEDPDQVPSKIPIFTRFGSVGSEDELVSLLQSLADMDITYKALQ

SEQ ID NO: 110770 - protein, 176 aa, Oryza sativa
  unsure (1)..(176): unsure at all Xaa locations
  Clone ID: PAT_MRT4530_14805C.1.pep
IRHPAVGGRRPWRPAVGEGGEGGGDLDLAWWRQEGGGXRIWRGAGGKEAATRRRWAKELTTGRRRDGGGDHEAEGEGGGDLRRWAKEAAASASGPRRWTMDGAAPLLPETSPKSRRGRRGGRRSPRRGPRTRRRRCRLRLRHRSMKRERVEREREMGGVVEMDKDEPVVEDKDEPG

SEQ ID NO: 110771 - protein, 909 aa, Oryza sativa
  Clone ID: PAT_MRT4530_14806C.1.pep
MQRAIAVELKLDDSVIEIIDKTDEEDDFKGVDEGSRSEIMSVAEVIDQVLRDHKFMVAFHNGSGDYIDLGSFGFPQITLFRSNLILWTFRKRFQGRERYSEIKDKVKNTHLFAFETEYYITRNNILFPVLQKEAAAIAAHYPCMREIDPERIVHCCLYGLFLYLCLPKHLENEWAARASVYWMCDGIIQGDQAWEISAALSKEIKWDLQPSLQDEVRQEFIESSSKNSVSIQRFKNRYFDGQKFYPWITITASNNINPETLQDIRSKNAEASSYFLAPERSSDITLVLSDGLFDQWNNLQVLQLSYCDFSFASPPFIGCQNLRFIGLDHCKDKKEGCKQSDLRKWQFLHSLLVLDLIDTIWYQVFSEDMADLFVNLRELNIVGVYCSHIWGQLQNKIEYVDLSRKRNIKLPSTLRFFRLDDRQPTPQSTPGIELSLKGCMGLESLFLSRISNLTELDLSGTAIRILDFTAMVVEVSGLKRLFLLGCKQLQAIKWDNSGSTIKPDLELLCVDTRSRSKYPQLFVDKNKSPGFLSVHAVIVDARIARSLCALIENSYHVDMHIHVTSSTIYGEVQSEGTYKDSISQLSDHVNMQQQDLISAGQYHDVQLSMVGDVPMQSFPLPPTTMLSRHIEIAQGSHNLESELDDDSPILTLAHLVQGKAESLHVHDLSTITPLPGGQWCCLKWCRIERCPKIEIVFPKHAWNFYGLETAWVSDLLMARCIWSKGSLQYSGSFQNLQHLHLRSCPRLQFVLPVWASSFPDLKTLHVIHCSNLHNIFVLDGDYPEQITVEGVAFPKLTTIHLHDLPMLRQICDVEFKMVAPALETIKIRGCWGLRRLPAVAADGPKPAVEIEKDVWDALEWDGVEADHHPSLFQAPVHSRYYRKKLPRGSVLSGDFITQMKASCFCTKVH

SEQ ID NO: 110772 - protein, 153 aa, Oryza sativa
  Clone ID: PAT_MRT4530_14807C.1.pep
GGSHASVKASIPRRATSPLSPSALSSSSSHATVLSPHTLFNPARGCLAQIESVQIGTPCPRQSPAPFYPHLTPPPPPALPPSPTPSKGDGRGRGAPEPTQTPPRGEGETGVGYATAARGGRRRGKGDRRQIRTAAAGDGARRPRGESERRRRG

SEQ ID NO: 110773 - protein, 34 aa, Oryza sativa
  Clone ID: PAT_MRT4530_14808C.1.pep
MAMGKGSAVQATANLLKSFSEKERITGNEYKRLQ

SEQ ID NO: 110774 - protein, 83 aa, Oryza sativa
  Clone ID: PAT_MRT4530_14809C.1.pep
MRMARVNELCSASTCWPTVGVDALEPCMHAPAYSSSNHKCFGYHAKSWCLSSKSFFCPFLVEAKGKSVKGSSIPILKEFTREQ

SEQ ID NO: 110775 - protein, 850 aa, Oryza sativa
  unsure (1)..(850): unsure at all Xaa locations
  Clone ID: PAT_MRT4530_1480C.1.pep
MARSSADDMELKRSCEAGILSKEKDRETVVMSMRVAKGRGVWGKAGKLASRHMAKPRVLAVTTKKKGQRTKAFVRVLKYSNGGVLEPAKVYKMKHLSKVEVVPNDPSGCTFLLGFDNLRSQSVSPPQWTMRNKDDRNRFLMCILNMCKEIYGAIPKVVGMDVVEMAMWAKDNTTVKVTQVSTKDGPIESLVGEADSQVAIQKDLVLQTEDEDTEALLDTYIMAIGEAEAFSERMKRELVALESANVYALMETETVIEEVLEGLEIASICVEDFDEWLGIFNVKLRHMREDIQSIEWRNNKLELQSDSNVALIDELDKMLVLLQIPPEYEASLTGGSFDEGNMVKNIEACEWLTSAIKNLEASNLDPIYVKLRAVREKRAEFVLLKCTFVRRASEFLRNYFPSLIDFMLNDKGNFSQRGQLQRPDHADMRYKCRTYARLLQFIKNLDKSCLMPLRKSYCHSLNLLIRREAREFSSELRAGSKASKSSTPLFEGPASANQSISITDTTADAYCKMITVFIPLLVDESSFFAHFMCFDVAALAPSDESDNNNPVAVSEPPGSSAKPINSSAELGVLNQFLQELLDGIQEDFYAIVDWAFKLDPLSCISMHGITDRYLSAQFVDDACYQIEKYERNVRQIGVVPYIPRFSQLAARMEQYINGSRDLVDQAYTKIVTIMFVTLEKIAQVEPKYVDIVLLENYAAFQHSLYDLANVVPTLAKYYHQASEAYEQACSRHINLVIYIHFEKLFQFARKIEELMYNMSPEEIPFQVGMSKVDFRKMLKSSLSGLDKTINAXYRKLQKNITAEELLPSLWDKCKKEFLDKYATFLKLISKIYPSETVISVNEMKDTLASL

SEQ ID NO: 110776 - protein, 494 aa, Oryza sativa
  Clone ID: PAT_MRT4530_14810C.1.pep
MSAMLVAEAAWMGLASLAAAAARRLRGYGYRWEPMAAPPDVEAPAPAPAEFPMVLVQIPMYNEKEVYKLSIGAACALTWPPDRIIIQVLDDSTDPFVKFSLVQELVELECKEWASKKINIKYEVRNNRKGYKAGALRKGMEHTYAQLCDFVAIFDADFEPESDFLLKTMPYLLHNPKIALVQTRWEFVNYNVCLMTRIQKMSLDYHFKVEQESGSFMHAFFGFNGTAGVWRVSAINQSGGWKDRTTVEDMDLAVRASLKGWEFLYVGDIRVKSELPSTFQAYRHQQHRWTCGAANLFRKMAWEIITNKEVSMWKKYHLLYSFFFVRRAIAPILTFLFYCIVIPLSAMVPEVTIPVWGLVYIPTAITIMNAIRNPGSVHLMPFWILFENVMAMHRMRAALSGLLETARANDWVVTEKVGDQVKDELDVPLLEPLKPTECAERIYIPELLLALYLLICASYDFVLGNHKYYIYIYLQAVAFTVMGFGFVGTRTPCS

SEQ ID NO: 110777 - protein, 31 aa, Oryza sativa
  Clone ID: PAT_MRT4530_14811C.1.pep
LQLKKRSPRFSFNFFYATFLVKIQKKARCTT

SEQ ID NO: 110778 - protein, 56 aa, Oryza sativa
  Clone ID: PAT_MRT4530_14812C.1.pep
CKTLSVLASLANKVYSDQRVPAAFKVPSGAVIPIGSMEDALKKKGSLEFLNSPSRK

SEQ ID NO: 110779 - protein, 131 aa, Oryza sativa
  Clone ID: PAT_MRT4530_14813C.1.pep
MTFYLKPPRRREAIARGGRSATRVGPARHPTWPPRRRCYYYYDPANLIATGPRAPRPRFLLQDQADVSVFGLEAIDHLLPRDALFVFVFSSSPVVIGELICSSSGGQPPLVAGSKIAPLPRIVRCLTGCKR

SEQ ID NO: 110780 - protein, 148 aa, Oryza sativa
  Clone ID: PAT_MRT4530_14814C.1.pep
MATSSRVATPLRSLPTRVVAFLGSAGTGRSLATGPLRRKSARAPPPSSPTEAEPVPPFLSDARRRSSVAPSSRGAPLPPFLAVGRPFAVVTLGGGPVAILGWRALTLAGAHPDPCGPPMALADPAVGPVTGGNRLGVPVHGGPAPLCP

SEQ ID NO: 110781 - protein, 136 aa, Oryza sativa
  Clone ID: PAT_MRT4530_14816C.1.pep
GATAAGAADAADTVVVVFQLVGAPSLRSSAPPPPPPPPPPPLGPTTVPRSQEGILASQSMAKKKIEQRNVSTITRSLVILSILLLLMPLSVLELSFCARTAAAEAQLLVSPQKGVLIGSKSSQMPGARGSREHSSS

SEQ ID NO: 110782 - protein, 72 aa, Oryza sativa
  Clone ID: PAT_MRT4530_14817C.1.pep
KKLIFLFFFFEEIFLILFLSGEKKIDFWGLTGKYKVGEKKNDWGGYLKAGNPRLILLFAGEKIYKRPLGLHP

SEQ ID NO: 110783 - protein, 181 aa, Oryza sativa
  unsure (1)..(181): unsure at all Xaa locations
  Clone ID: PAT_MRT4530_14818C.1.pep
PSQLSPPATIPASARSRRRRRQCATSAAAPAATTVGTGSSCAASSLAPSSSPCSSPRSASSASPPSSSTTPPXTRFNLSAAASSIAYNLTXSWSSTTATGRCPSRTPSPWTPSTSSTASRSSGSSSPTRATSSAPARRWCTGCRPAARARSSRRWATPAPRSTGRRAPRGRSRWRWRSPAR

SEQ ID NO: 110784 - protein, 87 aa, Oryza sativa
  Clone ID: PAT_MRT4530_14819C.1.pep
CMDIVALHALIYSFQVLIIGFWLSYIYPFCTEADDLCSRDVLAHNNCQLGGRLQRRAKLQKEPRVEKLRQSPPTALSNFFSQIMRSK

SEQ ID NO: 110785 - protein, 160 aa, Oryza sativa
  Clone ID: PAT_MRT4530_1481C.1.pep
MPTRKGVALDEATPMRIRRCGRAEDGAAEGVKCGAATTRTQIGYNPQSSTVSGLSLRPLLQPPSRSRRLPRPQASVPLYAQRASSSLPLASRMARTGCSDIKTFSYADSQTQRCSLLPTVLPGRFAVSSVVREKAWSGLDAGEAFEQRKSSRLSDGMMEP

SEQ ID NO: 110786 - protein, 126 aa, Oryza sativa
  unsure (1)..(126): unsure at all Xaa locations
  Clone ID: PAT_MRT4530_14820C.1.pep
ILSLQFLELTLHAPANNGRRRRRXCFLLLQRLAGFLAFLPQPTCPRRRAPPPPARYLRAXLXGTGRXXAREHHRVEDGAAAVRQVRSPTYIQRRXVRPRSRRCDSNEGHRLXREASSSSATGQGDX

SEQ ID NO: 110787 - protein, 57 aa, Oryza sativa
  Clone ID: PAT_MRT4530_14821C.1.pep
HAYTLGITASIWPDQRVLQSLPHGLLARYVYGHDYRAKLQAKPHPMTPALLVALLLT

SEQ ID NO: 110788 - protein, 75 aa, Oryza sativa
  Clone ID: PAT_MRT4530_14822C.1.pep
EFSAFILRIERFKLVNHKTSKIGSSSPRIHHRGGGSIPAFIFLDMDPVTSFISSLKQLTWPGFKCFHTTAACQGW

SEQ ID NO: 110789 - protein, 46 aa, Oryza sativa
  Clone ID: PAT_MRT4530_14823C.1.pep
MDNRVHEHVVETTVHWTACVSSHRGPATHRIGFVRAGPPRSRHALV

SEQ ID NO: 110790 - protein, 126 aa, Oryza sativa
  Clone ID: PAT_MRT4530_14824C.1.pep
QLRGDRRSGGAAKALRSSGDVGLRAGESHSHGLAAAAAASHPHQQPRHLEERRRAASGLPVRRVPGVGRRTPPPSSASSRPPRSPDEDEDEDQPLVFVSAASFSGTGVQWWQSNQEEQLNNELIYH

SEQ ID NO: 110791 - protein, 94 aa, Oryza sativa
  Clone ID: PAT_MRT4530_14825C.1.pep
MFVIVDLVASMRKASVAADYCCLYLSPTKISYERTISFLPKIFAARSSNYLMVERCLKLTRMASKPESTTTHADGHALGILVLTRKMSVSIKLA

SEQ ID NO: 110792 - protein, 109 aa, Oryza sativa
  Clone ID: PAT_MRT4530_14826C.1.pep
FFCLVQAATYPGPEQGRQTTQRESRKGATQNHIRATLGWERIETYGGNMLHRGRDNLWPNHNNIPTKAQRGPTGGPEPQRSNNPIPWGRGQKGELEVKKNGQLNSYGGT

SEQ ID NO: 110793 - protein, 100 aa, Oryza sativa
  Clone ID: PAT_MRT4530_14827C.1.pep
MWNWIHLSASSCYCKYITAENPCPLARLRPRRGGGTFDDVSILAIDSVVFEVLATNGATHLGGEARTSTTTTSSAQVSQFTNIDGDEAPRTQQYVEIMGI

SEQ ID NO: 110794 - protein, 120 aa, Oryza sativa
  Clone ID: PAT_MRT4530_14828C.1.pep
SNTCMEHNNVGDHLSHSTTACKPGHHPILIVCVHIGVEVHKSSQQSIWGSSIHGAAHTLEHCYLVRGLSPRATIWVGIFSLAVAPVIPCLLGTLVIRLNMLRKQHHAWAHCSDAAATSKQ

SEQ ID NO: 110795 - protein, 103 aa, Oryza sativa
  unsure (1)..(103): unsure at all Xaa locations
  Clone ID: PAT_MRT4530_14829C.1.pep
MDTTQTFLKIKTNKSTXQTLTISLIQNDIKILINRYSCLKXALSLYNNDGYLNRGPNRAQVELYRLLSISAQSAQSVLARFNLLQIRFGIQLQILVYLAKFHC

SEQ ID NO: 110796 - protein, 213 aa, Oryza sativa
  unsure (1)..(213): unsure at all Xaa locations
  Clone ID: PAT_MRT4530_1482C.1.pep
PHAVVAPLESRACTECLTTTDHVTTARTKKRRRRRARRMXGHACEVVVAGGDGKAAAARRRRRLEHAAAKRIRSVKDGSSSDDSSTEVVPRSWPACVSHGSVSVIGRRREMEDAVAIERTFMASTDFFAVYDGHGGSRVAEACRKRMHVVLAEEVSLRRLRGQSASGGDVRWKEAMLASFARMDGEVVGSSGFRTVGSTAVVAVVGRRRIVVA

SEQ ID NO: 110797 - protein, 57 aa, Oryza sativa
  unsure (1)..(57): unsure at all Xaa locations
  Clone ID: PAT_MRT4530_14830C.1.pep
MHSRWTDHAAGRLLCIYMDGEWSDGAXVSSPTMSGGGGREQMKGVEDVAAADCPWSS

SEQ ID NO: 110798 - protein, 56 aa, Oryza sativa
  Clone ID: PAT_MRT4530_14831C.1.pep
AEVRCAQETDDELIEELPEPLLRFVTGHYPLENDIYRVTLSRKDVKSRVQFIDAQE

SEQ ID NO: 110799 - protein, 150 aa, Oryza sativa
  Clone ID: PAT_MRT4530_14832C.1.pep
MSYAFNKLLPTTHFRQYAQRSRVRKLQYIAELERRVQALQTEGVEVSAEMDFLGQQNIMLDLENKALKQRLESLSQEHLIKRFQQEMFEREIGRLRSLFQQQQQQQHIPQQQGPTHSRSNSRDLDSQFANMSLKHGDPNSGRDAVPGLRI

SEQ ID NO: 110800 - protein, 64 aa, Oryza sativa
  Clone ID: PAT_MRT4530_14833C.1.pep
MEMVNNYSPRESNGPKLITIGDDGGGTPSSRRLVPAAIVAPSVHRPPLAPSLAPFDATDSPDGY

SEQ ID NO: 110801 - protein, 392 aa, Oryza sativa
  Clone ID: PAT_MRT4530_14834C.1.pep
MAASAAAVASTAPPQPLRPRRGIAVPSSYSHRAATRPRLAVSASSTTTGTTETTSERGGAERFYFNFTGFPFPLGPFLNRRTIRTELLKELDAPVEHIVLPTFAYEHKVFFGPFTRKFPRAQIWVAPRQWSWPINLPLEFFGIFRAKPLQDEDDDTPWAGEIEQKMLSSPEVGIGPYVEVAFYHKPSRTLLVTDAVIFVPRQPPECISKESLLASAKNGLAVKILSKGKEVPDEPVVDNKLNRQKGWERMVLQILFLGPSNLLEPNASFAQMSQKLIVSPIVKTLVFSKVPEKVRDWVDRIAADWPFRRIIPAHFAAPINANRSDFLAAFAFLDEFLPERSPASPGLSLLFASLMGKAASYFPPDDMKTLSSLDEFLVSVGAVKKTVSGRKR

SEQ ID NO: 110802 - protein, 76 aa, Oryza sativa
  Clone ID: PAT_MRT4530_14835C.1.pep
RSPCTIFMDEIDAIAASRNPKDQQHMNMTLNQVLVQLDRSTHTEVITVIAGGNFFFFLDKGLVRPARFDRTTVVPQ

SEQ ID NO: 110803 - protein, 62 aa, Oryza sativa
  unsure (1)..(62): unsure at all Xaa locations
  Clone ID: PAT_MRT4530_14836C.1.pep
XKXLXSAAXANGAAISHPSXXCXMLSITXLSLASXNLFXTEVKXSVHCXDTLERRRTSASSG

SEQ ID NO: 110804 - protein, 120 aa, Oryza sativa
  Clone ID: PAT_MRT4530_14837C.1.pep
MVLPPPSTAARQPMSPRWIWRRTDRSGERVSPRATDAGPSLADATASLIGGSGATMMAGGGRGCGGHGACKGRGGGVAAGETGRGGRARVSCGWTKFTPFVPDSTIPRLRKGRRSGHVDG

SEQ ID NO: 110805 - protein, 131 aa, Oryza sativa
  Clone ID: PAT_MRT4530_14838C.1.pep
MARAHGTRRVGCRESATAPGARDVHATAWPPRAGRFKQKHRQIGRATTCDKKWRKPRLDETSCVRVRVVANVGAAAAQLIISRGAMSRWIRFPFVVRWTARPYAMRRCAKGRIAKRRAEDAREDYQCGPDS

SEQ ID NO: 110806 - protein, 397 aa, Oryza sativa
  Clone ID: PAT_MRT4530_14839C.1.pep
MAVACLPEDGGEVVLVREFDGGRDRPGVELVERACEVGPSGGKLCLFTDLLGDPLCRVRHSPAYLMLVAEAVGGPLGTEIVGVVRGCVKTVACGRSQLFSKVAYLLGLRVSPRHRRRGIGRRLVERMEEWFREMGAEYAYVATDRDNEPSVRLFTGACGYAKFRTPSVLVHPVFGHDLAPSRRAAVVRLDAREAELLYRRRLGSVEFFPRDIDAVLSNALSLGTFLAVPRGTRWRGVEGFLASPPASWAVASLWNCKDAFRLEVRGAPRLWRAAARATRAADRAAPWLGIPSIPNLFEPFGLHFVYGLGGGGPAAARMARALFRHAHNVARRGGARVVATEVGACEPLRAGVPHWPRLGADDLWCIKRLADGYGDGALGDWSKAPPGTSIFVDPREF

SEQ ID NO: 110807 - protein, 381 aa, Oryza sativa
  Clone ID: PAT_MRT4530_1483C.1.pep
MRETGATDEGHACEVVVAGGDGKAAAARRRRRLELRRLGLAAEDDAAAKRIRSVKDGSSSDDSSTEVVPRSWPACVSHGSVSVIGRRREMEDAVAIERTFMASTGDGAGAIRGGGEGEEDFFAVYDGHGGSRVAEACRKRMHVVLAEEVSLRRLRGQSASGGDVRWKEAMLASFARMDGEVVGSVAAAAPRVDGTEPSGFRTVGSTAVVAVVGRRRIVVANCGDSRAVLSRGGVALPLSTDHKPDRPDELERVEAAGGRVINWNGYRVLGVLATSRSIGDYYLKPFVSAEPEVRVVERTDKDEFLILASDGLWDVVSNEVACKIARNCLNGRAASMFPESVSGSSAADAAALLAELAVSRGSRDNISVVVVELRRLKSRAA

SEQ ID NO: 110808 - protein, 73 aa, Oryza sativa
  Clone ID: PAT_MRT4530_14840C.1.pep
MAWFCGGSVVSVAIGENGAVAGVQRTAAKPLVAAAQCVLGGDGEAGASLPLGTLALLAAWCTAGGDWCRRVER

SEQ ID NO: 110809 - protein, 58 aa, Oryza sativa
  unsure (1)..(58): unsure at all Xaa locations
  Clone ID: PAT_MRT4530_14841C.1.pep
PGIKFMKKLYSSKVLESIGYEWIIPTVAXAVAEYDVVMRSQKPGXMIMGSGAPHENLV

SEQ ID NO: 110810 - protein, 275 aa, Oryza sativa
  unsure (1)..(275): unsure at all Xaa locations
  Clone ID: PAT_MRT4530_14842C.1.pep
NLHNLQELEMAAELAGEGDGGRRQRGQTHQYQHDELYQQYRPEESQRHQNIEDWADGIAXLVEEQFGLGPKEHIHMYRQPYPEXFDRVPLPHXYKVLDFSKFSGQDDVSIMEHISXFLAQCGEASTKEALKVRFFXPLSLTGSAFSWFSSLPSNSIIGWANFEKQFHYYFFAGIDEMKFSDLISVQXQEGELAMEYIQRFRDVCNRSYTLSLSDEQLADLAFQGLSTPIKDRFFCHEFDSLAYLMQTVSAHESRLEEAKKDHMARHRYLVTSYGS

SEQ ID NO: 110811 - protein, 52 aa, Oryza sativa
  Clone ID: PAT_MRT4530_14843C.1.pep
SWCVVEICFEMNYMVSASCYLQFEAVSLFILQYVVVELLSRMLTCSFVIFRS

SEQ ID NO: 110812 - protein, 169 aa, Oryza sativa
  Clone ID: PAT_MRT4530_14844C.1.pep
MPRHRRRRWPTASPGEEKVAGVEGEGLEYESRSSSSDLKSTRFRDAISVDVPRRESQSKSGAVATVKHVDINEEDVSSGRSVDAHYCLVYLINGSRKIRVRGVRRYDDEASSYVKLKKLVENNFDRSVATVINSCFGAQRCSGFTTMLLSCFPASVKAGDLDRYESSNF

SEQ ID NO: 110813 - protein, 748 aa, Oryza sativa
  unsure (1)..(748): unsure at all Xaa locations
  Clone ID: PAT_MRT4530_14845C.1.pep
MRRVAPAMIAAAAGGGGGYDGEEADAGAAVVEKALPNGDVYRGGFAGGAPHGKGKYVWADGCMYEGEWRRGKASGKGRFSWPSGATFEGEFRGGRIEGQGVFVGPDGATYRGAWAADRRHGVGAKSYANGDYYEGQWRRNLQDGHGRYVWXANGNQYVGEWRAGVISGRGVLIWANGSRYDGVWENGVPRGTGVFTWPDGSRYVGSWPRSCVDMPAISGTFFPPVGAGGGGAVRKRSSVEGVGDKASAVPRICIWESEGEAGDITCDIVDALEASMLYREATTVGGGVPYVRTQRSTRRVASGGTCWAPSAAATPEGKRPGQTISKGHKNYELMLQLQLGIRHSVGKSAAVPMRELSPADFDPKEKFWTRFPPEGSKVTPPHSSSDFRWKDYCPMVFRHLRKLFSVDPADYMIAICGNDALRELSSPGKSGSFFYLTQDDRFMIKTVKKSEVKLLIRMLPSYYQHVSQYRDSLITRFYGVHCVKPLNGQKVRFIVMGNLFCSEYRIHRRFDLKGSSYGRTADKFDDEIDETTTLKDLDLNFVFRLQRTWFRDLHEQLRRDCEFLESEGIMDYSFLVGVHFCDDLSASKTGLSTFTASPMRLPIHLSSLTNDRYSEFSMKRESFQGGGGMPELCFSDSDFDRIPDCRKPLIRLGAHMPARAEQASRRSEFDPFLLNGGGFLAPNQTGEVYDVILYFGIIDILQDYDITKRLEHAYKSLQTDPNSISAVDPKLYSKRFQDFIGRIFVEDG

SEQ ID NO: 110814 - protein, 51 aa, Oryza sativa
  Clone ID: PAT_MRT4530_14846C.1.pep
MAEQGDRHVVLKIECGGGHRQALLTMRLVPIAKGVLGFRGEEYTRRHNPAA

SEQ ID NO: 110815 - protein, 78 aa, Oryza sativa
  unsure (1)..(78): unsure at all Xaa locations
  Clone ID: PAT_MRT4530_14847C.1.pep
YDSLFGLKAFFPWCLARPKLFGSASFLXGRHTLQLFLRMKSELLAVGVRRRLATIACCSLFQQVGAGHVKEVALWWLG

SEQ ID NO: 110816 - protein, 235 aa, Oryza sativa
  Clone ID: PAT_MRT4530_14848C.1.pep
MGARGRRDRMGSAGGCGGSPPVVVRRYNRSEAPRMRWPEELHRRFVHAVRRLGGCHEATPKRIMQLMGAKGVSISHVKSHLQMYRNSNNSSNVNRRHPVTPQIDWTTTAQQDEQQRRQMSSFSFLATRTVPAAGIGSHSHQRPHRRQALHAGDDDGCELTLSISGGAAEESKDGGSSITDDDDELLIQPPAPNIINDDGSTRHGHRHPFACSTQPLPPAAINLELTISSPCCWLT

SEQ ID NO: 110817 - protein, 70 aa, Oryza sativa
  Clone ID: PAT_MRT4530_14849C.1.pep
MTMTMTMTMTMMMWPLQNHVMLMINAMPIKVAFANDGESDLHFLDHWWVLDQRLKANLKQKFHLLNETLQ

SEQ ID NO: 110818 - protein, 63 aa, Oryza sativa
  Clone ID: PAT_MRT4530_1484C.1.pep
CAVANAQEPDERQQQKLKARRRTRTRSSRTPGLIRRARDCMSRSRVGPKPHPSVRHNVVDPAC

SEQ ID NO: 110819 - protein, 141 aa, Oryza sativa
  Clone ID: PAT_MRT4530_14850C.1.pep
CRRGCSTGGGRGRRGCCPPRRSRRCACSSSSPSSSSSSPSPPTSTTRPSSAVRRSASASSPPRSPPSPSSSSFSSSSIDAATGRCAAKYTTTMHMLIRPRLQGAGRRGLWRCCCCCCCSCSPSNPLSIPSGSGLSGILLIT

SEQ ID NO: 110820 - protein, 139 aa, Oryza sativa
  Clone ID: PAT_MRT4530_14851C.1.pep
RDPMTAARMQTKLNHQMDGTHMVQKPQIANSNKQTNASASRLITNHIERSTAMAGHSAKVTRRGTERNPRGFSSSASSDPKALGTREKRGGREEGKGGFDRSLTDDARSGAGAPQRHRRSMGGSPERRRRVWGLTVLDR

SEQ ID NO: 110821 - protein, 779 aa, Oryza sativa
  Clone ID: PAT_MRT4530_14852C.1.pep
MGQGDVSSEADLADGGRGREDVSVGLSEEVLSLTVAAGWGYVSGGLELLSMTVATSGEMSAAASPAAGSASSPPDSSRMAMDDSAEGDSGVVPVWGRRDTFAASGPPPRAFAEEAMMEIRSTPVTEPLVQPIHYRPNGPCALSARSKPSNPRLPKICPHHSPLPLSNFKISILQTPTPTPTPNPPTPAPEMRRGGGGGGRRLPKSSLAPSAASDRTPLLDPHVLHPRNLDLAFSRRDSDAASLCSSRPSSIGTGPSFAAPVTNFSDRASQAAALRVVNAYLAPAVSLRPPLPSAKDIVAAFRHLFECLDFPLHGAFEDDLLFVLRVLRCPFKLTRSALKAPGTPHSWPPLLSVLYWLTLLVNSSESGAGGDDSPAASNDLMLYITNSYSLFISGDDDSVASLDEEYSSKARAHAQAAVEASQALEKEALDLESKRTKLTSGPSRLEALQAEKEALTADVEKFEAVVKSWTVKIQEKEESSVHLEKELEAKLMDQQRIAAENEELMKKVDAQVVNVRDVDRMQREIQSVERDNVKLENGNATLEEKGWELEAAVVGKLEEIEGLVEQCNQALRKLKPGIDFQYMLNTKASSPVELLGTSYKTIMKPALNSLADEARRISILKHDESVELEKQSQRNAKILSEKKNHISVCQTKTDEMVARLDSLDVEIGNHVSRCKADARLMKDELEKKDHHLSTVEKESEEFLKISEKKLEDAKRETDEEIQMCARELLKLIDSVTEYKEFMETSISGMRKDLYETVDDISSLASKAASTRQTSAQFVM

SEQ ID NO: 110822 - protein, 77 aa, Oryza sativa
  unsure (1)..(77): unsure at all Xaa locations
  Clone ID: PAT_MRT4530_14853C.1.pep
SRYDSAAVNERILTFMYKKHVADDAWHDLXIGPRAPSVFNCVVEISRGNKVKYELDNATGLIKVDRILYSSVVYPHN

SEQ ID NO: 110823 - protein, 475 aa, Oryza sativa
  Clone ID: PAT_MRT4530_14854C.1.pep
MADGVEEGNAVAPRGPARRRGTVRASLDADEFIALMHGSDPVRVELTRLENELRDKERELGEAQTEIRALRLSERAREKAVEELTDELEKMFEKLKLTESLLDSKNLEVKKINDEKKAAMAAQFAAEATLRRVHAAQKDDDMPPIEAILAPLEAELKLARQEIAKLQDDNRALDRLTKQKEAALLDAERTVEIAMAKAAMVDDLQNKNQELMKQIEICHEENKILDKLQRQKVAEVKKLSLTVKELEEAVLRGGATANVVRDYQRQVQEVNDQKKTLECELARAKVTANRVAVVVANEWKDSNDKVMPVKQWLEERRFLQGEMQQLRDKLAVAERTARSEAQLKEKYQLRLKVLEDGLRGPPSGSSRLPTEGKSFSNGPSRRLSLGGADNMSKLSPNGLLARRSPSFHSRSSLSSSSSLVRSQATGTSKAFAGGRSSSHSGLTHDYRGHRLYRQAAFIDTFHFHFTLYLFHSLPY

SEQ ID NO: 110824 - protein, 141 aa, Oryza sativa
  Clone ID: PAT_MRT4530_14855C.1.pep
SIPERTLSPFWNINAHSFVYITQSPSPVSKLSPTNGKPVFNGELPADQLLIIPQHYVVVKKAQREGCAYIAFKTNPNSMVSHIAGKSSIFRALPTDVLANAYRISREEAQRLKHNRGDEFGAFTPLQYKSYQDVYNAPESS

SEQ ID NO: 110825 - protein, 57 aa, Oryza sativa
  Clone ID: PAT_MRT4530_14856C.1.pep
MLPVAAAQNDVLANAYRISKRRGSRGSSITRGDEFGGMSLQCQYKSYQDVYNAAESS

SEQ ID NO: 110826 - protein, 139 aa, Oryza sativa
  unsure (1)..(139): unsure at all Xaa locations
  Clone ID: PAT_MRT4530_14857C.1.pep
TTTPKTGRSLARTRFGHHGHXGQDQPPQHHGGGGGGAHQPTXKNXXRADEGXRXAXREGNXXXAPTNPRDEHQHXXKDXRXSAKNKDEEGNPAXAPXNKATGXAXKHXXGQGHPXKXAPXNPEXPDEAAXXTESGDXGK

SEQ ID NO: 110827 - protein, 127 aa, Oryza sativa
  unsure (1)..(127): unsure at all Xaa locations
  Clone ID: PAT_MRT4530_14858C.1.pep
ISHPEFPILNLVQMSQSSKSIPEPLLSPFWNINAHSVVYITQXRARVQVLRRGQLLIIPXHYAVVKKAQREGCAYIAFKTNPNXSWVSHIAGKSSILPVASPKMIVSSKCHIANSPREEGSRRASSH

SEQ ID NO: 110828 - protein, 121 aa, Oryza sativa
  unsure (1)..(121): unsure at all Xaa locations
  Clone ID: PAT_MRT4530_14859C.1.pep
YYSSRARVQVVNNNGKTVFNGELRRGQLLIIPRPYASCKEGXREGCAYXAFKTHPNSMVSHIAGKSSIFRALPNDVLANAYRISREEAQRXLKHNRGDEFGAFTPSQYXSYPDVYNPPESS

SEQ ID NO: 110829 - protein, 174 aa, Oryza sativa
  Clone ID: PAT_MRT4530_1485C.1.pep
LGGRRWARRVAGVAESGRLARREHGVAAEGVALEAEGVVVGEEGSEVARVSMAVSTTAMHEMELRLRHRPPGRVPPQQPTTWAISASAAGLPGELRLCRRPPERVRLLRSRSSGQWPPRRRPPHHSISDLPESLGGLQHGPARSHDPRHIDISAAGMVCFVAVVGGHGLEADLH

SEQ ID NO: 110830 - protein, 225 aa, Oryza sativa
  unsure (1)..(225): unsure at all Xaa locations
  Clone ID: PAT_MRT4530_14860C.1.pep
MVWTKLVVKVNLWQTVGSFFSMFLIYWKFIDSHIAIMVNVTAYAQDNKSTNQNSGVXIDTYDDDGKKQTYYGFIESIWELDYRVLKVPLLRCKWVRIPRGLKVDKHGMIIVDLNDVGYKDEPFMLAKSFKQILYVKDPSLAKSARPHHVVFVGKLNIVGMENIVDEEDYDQPDEQPPPTTDVELENEETNEEDEEALYVRTDHQEGLLVRVVMVKWQILIPPRPT

SEQ ID NO: 110831 - protein, 139 aa, Oryza sativa
  unsure (1)..(139): unsure at all Xaa locations
  Clone ID: PAT_MRT4530_14861C.1.pep
HVGNINAHSVVYITQAVPRVQVVNTPWKXTVFNGELRXRGQLLIIPPPYAVVKKAXREGCAYLAFKTHPNSMVSPPLPGKSSIFRGLCPNDVLAXNAYRISREEAQRLKHNXRGDEFGAFTPIPYPELPTDVYNAAESS

SEQ ID NO: 110832 - protein, 89 aa, Oryza sativa
  Clone ID: PAT_MRT4530_14862C.1.pep
MASSSAMVRVVLVSVLLMQCCNAIMAARLLEGDLGSWLQGQGGVAGELILQVLKGGSPPGGNGCHQGPGGGSGGNCYQPQTGNGRHELT

SEQ ID NO: 110833 - protein, 104 aa, Oryza sativa
  Clone ID: PAT_MRT4530_14863C.1.pep
RKGTKGEGMCLDHCHSKTQSLTSMVSPPLGQERVPIFRASSQMMFLAKVAVVAILQEKRPQRRQAITRGDEFRCIHLQSNTKSYQDVYNAARMPLRCGLRIKNN

SEQ ID NO: 110834 - protein, 158 aa, Oryza sativa
  unsure (1)..(158): unsure at all Xaa locations
  Clone ID: PAT_MRT4530_14864C.1.pep
PTRPPTRPLVQMRAVKVNLYQNALLXPFWNINAHSVVYITQGRARVQVVNNNGKTVFNGELRRGQLLIIPQHYAVVKKAQREGCAYIAFKTNPNSMVSHIAGKSSIFRALPNDVLANAYRISREEAQRLKHNRGDEFGAFTPIQYKSYQDVYNAAESS

SEQ ID NO: 110835 - protein, 78 aa, Oryza sativa
  unsure (1)..(78): unsure at all Xaa locations
  Clone ID: PAT_MRT4530_14865C.1.pep
LKLRSNKKLNPHXDLLPTNSKIYHLSYSSSLAGPSLRPLLSSLSTFFNSPLPLNILNDTSAYFPTVALYLHHDFHSYL

SEQ ID NO: 110836 - protein, 47 aa, Oryza sativa
  Clone ID: PAT_MRT4530_14866C.1.pep
IADVFPPCRILHFQIHGLLCYCLKKKKKRAQQYRGHALARVRMPCYL

SEQ ID NO: 110837 - protein, 133 aa, Oryza sativa
  unsure (1)..(133): unsure at all Xaa locations
  Clone ID: PAT_MRT4530_14867C.1.pep
LLAKAISRTRXAQIMIGAAPDEIVADSFEALGANTIKEPGLCPSVSSNDQQVPSAVRYNGSKRVKPEEEEERDMKKSRGFDERELFSTAESSSSSSVFFVSQSCSLASEGKNLEGIQDSSDQITTSLGKNGCK

SEQ ID NO: 110838 - protein, 77 aa, Oryza sativa
  Clone ID: PAT_MRT4530_14869C.1.pep
GGDLYRLISNKFRVDLSHINNHICFRPTVWFYLNQMPLTSFPKTILSNICAFLSIIPPIFLFFAFVLQRPLTTNSLY

SEQ ID NO: 110839 - protein, 56 aa, Oryza sativa
  Clone ID: PAT_MRT4530_1486C.1.pep
STIMIFDLFVCPGLLICNVGHNPASSDYVVSLSSGDLYLQLMCFMCQCVISDLCAL

SEQ ID NO: 110840 - protein, 156 aa, Oryza sativa
  Clone ID: PAT_MRT4530_14870C.1.pep
MDVGVGGKAAKKAVGRKLGGPKKKPVSRSVKAGLQFPVGRIGRYLKKGRYAQRVGTGAPVYLAAVLEYLAAEVLELAGNAARDNKKNRIIPRHVLLAIRNDEELGKLLAGVTIAHGGVLPNINPVLLPKKTAEKADKPAKASKDKAAKSPKKQARS

SEQ ID NO: 110841 - protein, 56 aa, Oryza sativa
  Clone ID: PAT_MRT4530_14872C.1.pep
PIWLDTHVCIFPLLPDLQLLRCIHMLWAEPFSQSLAGEVKAAKSMTVAEQTSTKTH

SEQ ID NO: 110842 - protein, 194 aa, Oryza sativa
  unsure (1)..(194): unsure at all Xaa locations
  Clone ID: PAT_MRT4530_14873C.1.pep
RVCGRPGARQRSTGTDGRDQPGSGSAARARMLAGEQQRFGTNGEHQDVERDAANSPMTKEAAEDQRMATATRLKRRRRSGRRRRRCSGGQQRLRRGGRGRRSDGDHDDDLPERRRXLERRRRTAGAAATTTALGHTALGRFRWQEMKAKVATGSGGLGDPSKPPRRRPGAAAPCVAALRRRRCRRRRPSLWEGN

SEQ ID NO: 110843 - protein, 244 aa, Oryza sativa
  unsure (1)..(244): unsure at all Xaa locations
  Clone ID: PAT_MRT4530_14874C.1.pep
GKRDLLRQRLGFAVDRAHGSGPRERTAEINPXSKTDGRDRSVHDRLTANRHDDVSGDVIDDVSTGSGSAARARMLAGEQQRFGTNGEHQDVERDAANSPMTKEAAEDQRMATATRLKRRRRSGRRRRRCSGGQQRLRRGGRGRRSDGDHDDDLPERRRXLERRRRTAGAAATTTALGHTALGRFRWQEMKAKVATGSGGLGDPFKEARGRRRRPTATGDAKETSGSGEREESDSILNPSISKPK

SEQ ID NO: 110844 - protein, 484 aa, Oryza sativa
  unsure (1)..(484): unsure at all Xaa locations
  Clone ID: PAT_MRT4530_14875C.1.pep
MATAHVLVFPAPAQGHLNCFLHFATALLRAGLHVTFLHTHHNLRRLGAAAAAAAAISPRLRFLSVPDGLPDDDPRRVDGLPELMEGLRTTGSAAYRALLASLVVRAAAXRTCVVADGILPFAVDIAEELGMPAIAFRTXIELGELPFPGRGGDDGLDERVRGVPGMESFLRRRDLPIQCRHLAATTTHGDPLLTSVVAATAHSRNARALLNTAISLEHPALTHLARHMRDVFAIGPLHAMSPAPAAATSLWRHDDGCMAWLDSQPNQSVVYVSLGSLTVISHEQFTELLSGLLAAGYPFLWVLRPDCEDDPLDQLNKPLNTDMAGNNHDDALLRQALLDVAGAGACVVPWAPQRDVLRHRAVGCFLTHSGWNSTAEGVAEGVPMVCWPFFADQQINSRLVGAVWGNRVDMKDACERGVVERSVKEAMESGEIRRSARRLAEQVKRDTGDGGSSALEFERLVGFIRELSKVDDEPLVEKCSLLLV

SEQ ID NO: 110845 - protein, 68 aa, Oryza sativa
  unsure (1)..(68): unsure at all Xaa locations
  Clone ID: PAT_MRT4530_14876C.1.pep
RVGEYLLLSNFLPCLXFSKIGFNYRDNHTSSWYYYGMYXTIWKLSIFCCTDSTHILKELEEVNISYLL

SEQ ID NO: 110846 - protein, 69 aa, Oryza sativa
  Clone ID: PAT_MRT4530_14877C.1.pep
MWAAPLRLPGPPATWAACLVGPLPSCVTSTRSRFDYLTTRCTIGILQTEKVQASSKSLKMCCATKHTAE

SEQ ID NO: 110847 - protein, 138 aa, Oryza sativa
  Clone ID: PAT_MRT4530_14878C.1.pep
MEWSLGFAMNAPRLEVKQVCFTNGCAGHFVHLRRGNLGCKPRREAESFYCFTMEASTFKWRSLLAGAAQGWMRAASERQFSAAATSSVRPQDSSTAASSAPTCCRASPTGHTLHPTAISAAMRLCTLVSSASSCSSSQ

SEQ ID NO: 110848 - protein, 128 aa, Oryza sativa
  Clone ID: PAT_MRT4530_14879C.1.pep
NFIPKPGNRGPGGYTGLHMNISQDWDFQLPEGDKKPGPTGKRQMRGGRKAKKETRNWVGGLKLQNFYYKGSRGKRKKSGENFWGEGGLQREEQEQVLPSHFHWGGTISGRATTLWGGPHLGGDPGKTL

SEQ ID NO: 110849 - protein, 59 aa, Oryza sativa
  unsure (1)..(59): unsure at all Xaa locations
  Clone ID: PAT_MRT4530_1487C.1.pep
LVGTPPTSPPPPHPPPPPTAPSPSPXLPLPCAAAPLPLPPATYYYGRVPPPPLPTSYYS

SEQ ID NO: 110850 - protein, 402 aa, Oryza sativa
  Clone ID: PAT_MRT4530_14880C.1.pep
MELMARVFLLLLLPLSSSAATAVAAPPPPRSQAQTADGNGVLVNGNFAMSPRKMNATVIVGRDSLPGWALRGRVEYVSGGPQPGGMYFAAAPGAHALRLGARASAAQAVAVRPGAAYALTFAATRACARDGEREEALRVAVSPSFSAPGDVPVRTLYGAGAADAWAWGFRAAERNAQVEFSNPAAADDHDGDDGLNCGPLLAAVAFKELPAPMPSKDNLIRNADFEAGPAAIPNSTAGVLLPPKRKDATSPLPGWIVESLRPVRLVDAPHFAVPQGQRAVELVAGREGAVAQVIRTAPGRSYNLSFAVGDARDGCEGAMLVHAVVVAGGGGNATAKAAAAAVPYASRGGGGARQASLRFVASGRRARVTFYSSYYHTSAGDGVSPCGPVLDQVKVQPLMTKA

SEQ ID NO: 110851 - protein, 463 aa, Oryza sativa
  Clone ID: PAT_MRT4530_14881C.1.pep
HSLPTFSSLHFPPKRRSAGNRNPVMAHPHPRPLEDDDLLAEILLRLPPRPSSLPRAAAVCARWRRLVTADPAFLRRFRAHHRRGAPLLGFFHSHRVSPSFVSTMDPPDRVPAAVGAGGRFSLRFDDFRCRILGCRDGLVLAVNPVMPRLRGCFLVWDPVSGDQRRVAFPPECDQGQTEVRNGAVFRLPGGGGGFRFQIVLVGTRHQYEAIGCIYSSETGKWGDLIATPLPHNLTRISLAVPGVRIGDSLYWLISGIPGGILEFDLNEQRLAVIDDVPMAVSDGYRRFCVVPAADGGLGFVFMSDLGSQFWRRKNDWDDDVSESGWVLEKTVQLGELLSLSPTERKGSPIVMGFSEDYNVIFLKTINGLFMVHLESMEFKRILKDCAALFIYPFASVYTAGMSIGDGHDEDGQSPAMLVYNPLNPTFSIAHLLFCPYQINPLYPFVARLGHGLVVRGLSVTLIF

SEQ ID NO: 110852 - protein, 268 aa, Oryza sativa
  Clone ID: PAT_MRT4530_14882C.1.pep
MTPEDRAWLIKGKSVVLTCLASVLLLSAGSIKAPKTCTGGMFLGPIIAIGLFLIVMFVVGSCGLKKNDGDLYDCYLLGVFLAILLLLAFIIFGYVAVGGIDAGHAANAREYSLSECKRGWLRGRVTHSSHFWASTSACLRRSHVCNGMTNLVRNPDTGIFVPRPSSFERWAKRHGVDADPRVMSPIESGCCKPPSSCGLTYVNGTTWISTAASAGAPAAVAQVTNNNKDDDCSRWSNDHQTLCFQCDSCKAGFLRHTSQAWSVARREG

SEQ ID NO: 110853 - protein, 141 aa, Oryza sativa
  Clone ID: PAT_MRT4530_14883C.1.pep
MDYCRPPSKPGVALAPWLSPGHWTVQTIVAATRPRSVQRTRSMRAHMAAGTCAVEDASEHGGRVAGRCPERVRVHRIRARQWDDARRAAALRSIDRQYACIDRSPPWKTKAVDGLSVRIGIHSYDTKTHAFYLHKFVWAGA

SEQ ID NO: 110854 - protein, 34 aa, Oryza sativa
  Clone ID: PAT_MRT4530_14884C.1.pep
DEVCVESPLVHSCNVSRRLINFRSNHVMFCGTRL

SEQ ID NO: 110855 - protein, 65 aa, Oryza sativa
  Clone ID: PAT_MRT4530_14885C.1.pep
LRCPLCYVCLWSVMHMICSMHASVVSFVWAFQCYSVNGCKIIGVPVCICMHAWHCTSVYVRRSVL

SEQ ID NO: 110856 - protein, 203 aa, Oryza sativa
  unsure (1)..(203): unsure at all Xaa locations
  Clone ID: PAT_MRT4530_14886C.1.pep
PTRPPTRPHQATGRFSNGLNIPDIISEHLGAEPALPYLSPELRGDKLLVGANFASAGVGILNDTGVQFVNIIRIGDQLQYFREYQRKLRALVGEEQAKRIVNGALVLITLGGNDFVNNYYLVPMSVRSRQYAIQDYVPFIISEYRKILSRLYELGARRVIVTXTGPLGCVPAELALHSRRGECAAELTRAVDLYNPQLVNMVR

SEQ ID NO: 110857 - protein, 298 aa, Oryza sativa
  Clone ID: PAT_MRT4530_14887C.1.pep
MAREVSSEEEAGGGDELRRGPWTVEEDLLLVNYIAAHGEGRWNALARCAGLKRTGKSCRLRWLNYLRPDVRRGNMTAEEQLLILELHGRWGNRWSKIAQHLPGRTDNEIKNYWRTRVQKHAKHLNCDVNSQQFKDLMRYLWMPRLLERIHRSSQSQSHDADDADLSVSAATSCITSDLVVDAHHPPLAMADSNDSAAMWQQHQAPQMSVAGAPPPTTTMAQHVVLPTAAASCHQMQDQFVCARAAETTTCCWSESESLPGLAGLYYDDAAAALPEFDVETMAMWGPEDDPWYTQMLGL

SEQ ID NO: 110858 - protein, 53 aa, Oryza sativa
  Clone ID: PAT_MRT4530_14888C.1.pep
HGREPPPLEARVATAATCPNPSWLLLKLIIVTACLPNKLDWLSSAATTPNVFF

SEQ ID NO: 110859 - protein, 127 aa, Oryza sativa
  unsure (1)..(127): unsure at all Xaa locations
  Clone ID: PAT_MRT4530_14889C.1.pep
MATSMITLAVVAPPRTKGLPGICRRGSSLLIDCSGGKKIKTXDTPYGIGGGMXSDIXDASGQKSTGKDAYQMPDKYGAHDHGYSPIYCPEEWCPTGDTYVGGTTGLLIWAVTLGVLLDGRALVGYNT

SEQ ID NO: 110860 - protein, 262 aa, Oryza sativa
  Clone ID: PAT_MRT4530_1488C.1.pep
IEALVARDLGDDCGNGDPLPGRAPPRRRQSTPFPPPICRCAAGRGSSPDHAGALPATQGDRRWSGAADDGAAATGRTTGCGGGAHARAAGGRGGARPGVRRRRRRLPKWWAAEVELARAAGGGGGGEWFELGTPRPCLSRPPPTSPPSLPGLLPLPSPPRPLSLHCRKGEGVGTEGKGKGMSGGHRHSYAAPSRASPSWTRPSTPSPLRCPPHPPRRPQPPVRLPQRRRRAPVAPVARSPPRPPPAAPISGHLVVAPSDIFS

SEQ ID NO: 110861 - protein, 1029 aa, Oryza sativa
  Clone ID: PAT_MRT4530_14890C.1.pep
MGSLCLERRKQPDDPLSISQQLHLCLLPLLFCAASKFSAFEGVLAQYPDFSFFFFSASARNRGFDINVLHKEARSRWLKPSEVYYILQNHERFPITPEPPKKPPSGSLFLYNRRVNRYFRRDGHAWRRKKDGRTVGEAHERLKVGNVDALSCYYAHGEQNPCFQRRCFWMLEPAYEHIVLVQYREVGAAEGRYNSASLLNGPTDSLSVLSYPNATYGNQYLGSTSGVSDGSESLHSNLSSVTEVSSYSANKDNGILQSIQELSQSTIMGAPALGQSSLEQSIEVRWVDNSNSTNKSGLNRALKQIVEQLSLGDDEDDDYIHQAQPFDFITNIEAPDRQRDASRNVSEYQPPGSLYNSDMQQISAAKRFLLETEDSIDSPSYNYVPREEGNNGTNTLSVHDYSLQSSLNPDWKKTAPLTLQSNLYGSEIPSLLLDHGQFESLSSGENTRLILGQNPRFSIREVSPEWTYCYEITKVIITGDFLCDPSSSCWAVMFGDSEVPAEIVQAGVLRCHTPLHSSGKLTICVTSGNREICSEVKDFEFRAKSTASSFLDISPSSRSLKSSEELLLLAKFVRMLLCENGSHANSNGDPQSVQCPKLKMNDEHWQRLIDELKGGCENPLNVSDWIMEELLKSKLQQWLSVKLQGYDGIACSLSKHEQGIIHLISALGYEWALSSILSADVGINFRDTNGWTALHWAAYFGREKMVAALLAAGASAPAVTDPTAQDPVGKTAAFLASERGHLGLAAYLSEVSLTSYLASLTIQESDTSKGSAAAEAERAVESISQRNAQLHGGTEDELSLKDSLAAVRNAAQAAARIQNAFRAFSFRKRQQKTARLKDEYGMTQEDIDELAAASRSYYQSLLPNGQFYDKAAVSIQKKFKGWKGRRHFLNMRRNAVKIQLYFTQAQGPYLSGPFFVQAHVRGHQVRKKYKTFVSTVSVLEKVILRWRRKGHGLRGFRAEQTAMAEAEEDDEDDDDDDFNDDEAVKVFRRQKVDESVKEAMSRVLSMVDSPEARMQYRRMLEEFRQATAE

SEQ ID NO: 110862 - protein, 80 aa, Oryza sativa
  Clone ID: PAT_MRT4530_14891C.1.pep
AVALALVTFKLLLVHGTTAQVIYHAQSTPIHVSIRFLCSIEVTPSSFFYSYKLKNKLSSVTLFVDGTQNTCYLFVILPPG

SEQ ID NO: 110863 - protein, 47 aa, Oryza sativa
  Clone ID: PAT_MRT4530_14892C.1.pep
MGKKQDPAVGKKRTRQWLRRGRGGAVAAGIRLHDDDEEMILVPSNLI

SEQ ID NO: 110864 - protein, 594 aa, Oryza sativa
  unsure (1)..(594): unsure at all Xaa locations
  Clone ID: PAT_MRT4530_14893C.1.pep
MAAASSVLRCCLLVAALMTLSAMGAEAITRQYLFDVQTTSVTRLCSTKSIVTVNGQYPGPTLFAREGDHVEVTVVNHSPYNMSIHWHGIRQLLSGWADGPSYITQCPIQPGGSYVYRFTITGQRGTLWWHAHISWLRATVHGPMVILPPAGVGYPFPAPHEEVPIMFGEWWNNDTEAVISQALQTGGGPNISDAYTLNGLPGPLYNCSAQDTFKLKVKPGKTYMLRLINAALNDELFFSIANHTLTVVDVDALYVKPFTVDTLIIAPGQTSNVLLTAKPTYPGASYYMLARPYTTTQGTFDNTTVAGVLEYDDPCPTTAAGKIVPIFSPTLPQINDTNAVSNFTAKLRSLASAGYPAAVPQQVDHRFFFTVGLGTHPCAVNGTCQGPNGSRFAASINNVSFVLPATALLQSHFAGKSKGVYASNFPYYPLNPFNYTGTPPNNTNVMNGTKVLVLPYGANVELVMQDTSILGAESHPLHLHGFNFFVVGQGFGNFDPINDPAKFNLYDPVERNTVGVPAGGWVAIRFHADNPGMYSEXTSIPLRFHICTNLKMAWLVLDGSRPDQKLPPPPLDLPKCVVRSDIYFAASVSHRRST

SEQ ID NO: 110865 - protein, 123 aa, Oryza sativa
  Clone ID: PAT_MRT4530_14894C.1.pep
RLARDELGLPICVPRLPRRPEPAEHRQHGSRIDSIRPIDRSRRRGLHGFRLIRSDLVFCIAGGWVGLQDENLGSVSLGLLYTSFTAFSVVGSPVVRRMGSRRAIVLGTSGYLLFIAANLVPSW

SEQ ID NO: 110866 - protein, 92 aa, Oryza sativa
  Clone ID: PAT_MRT4530_14895C.1.pep
MAQNGGQEVIGSRHLNAETATGAGVGTTLSPATASSRPLSGHQDDEEEKDKRRSPLAYWTASPTRANEMNPHSTGEGSAAEGNEELEAFVFE

SEQ ID NO: 110867 - protein, 84 aa, Oryza sativa
  Clone ID: PAT_MRT4530_14896C.1.pep
LASYFPWRAEAEAKAAFSGVLWASRPATGSPIPNWEREMLMGLLTQSHLCLEHHRPGDAHNTGAEETRVPSTRRMSFMRAMTLP

SEQ ID NO: 110868 - protein, 53 aa, Oryza sativa
  Clone ID: PAT_MRT4530_14897C.1.pep
RFTTSLSPGPSCDCLLGARRAPLTVLMLTLKLNQWHSSLKSAGWNPRSSRAAP

SEQ ID NO: 110869 - protein, 100 aa, Oryza sativa
  unsure (1)..(100): unsure at all Xaa locations
  Clone ID: PAT_MRT4530_14898C.1.pep
MAEDDLNHHLIARGDGEEADTAHCWLRAGERNMAQLVVSLGILVADDKMEEQAFAAATIKFPSALSRMQLRTTTSASXLPAEIANGSMAPFDPATGFMHR

SEQ ID NO: 110870 - protein, 523 aa, Oryza sativa
  Clone ID: PAT_MRT4530_14899C.1.pep
MLPGSAAPAAGSGMFVPTQTVGTVLCCICGVAMQPNPANMCARCIRARVDITEGVPRHAAVVYCPDCTSYLQPPRSWLRAGPESPELMQILLRRLNRPLARLRVSLSAAEFVFSEPHSKRLRLKLRLRREVFNAVVLEQTHPVEFTVHDRLCDACARAQSNPDQWVAVVQLRQHVPHRRTFLYLEQLLLKHGQASLALRVAAAPGGLDFFFGSRSHAARLVDFLATVAPVQTQTAKQLVSHDTKSNVYNYKHTFSVEICPICREDLIALSPQVSRDLGGLGPIVLCIKVTNAIALLDPLTLRVHHLEEKKYRVYNFKAALTSKQLVEYIVLDIEHESPEITIDGSRYQLAYAQVARVSDFGKNDTMFTVRTHLGHLLNPGDLALGYDLYGANLNDDDMDTAMMRHSLPEVILVKKSFAKRPRTRRWKLKRLPMEEDAVNKAKGELEKRADEYEEFLRDLEHNSDIRFQIDLYKDEDYRSEMASTIGDDVPTVPIEELIEDLSLGDDEEEDEGGEGNQHAVMVG

SEQ ID NO: 110871 - protein, 800 aa, Oryza sativa
  Clone ID: PAT_MRT4530_1489C.1.pep
MAESKATSTAALGRACLPERRPPSPATPKRGGNRDVSIGGKWCWNTHGLAQGPDTIHAGWSGGARGIRHGWSMRDLLPSPIKEVFLSASWVWVPKGGSLSPHLGFPATRREVVRFGATTRRIWRAPARLTDGRSFLEVAKGSMDRKPQFQRPDQWVPNKRRAFEEEGGGGNWGNRNLQEREERELRNRLMGQQQQREEGRWQQVERRGANKQWQGDRNREGGAWEGGDRRPTRGKEKLGEEGRSGPSQKEEIKCFNCGESGYHQVNCQKPPLCYVCKNPGHISSHCPVHVGGSSSNLSKLEVKLKGYGIPEQGFFSLNVDNLGVAEKGAQFRGILTVEKGAGSVQKVANEMSHLFREKNWDWNVKQISSNNFLIDFPSEDARRQVTKSGGFAKKQEIIRAISDIVGEFKEVDEKSLKGEGAVRIKVGCLDPSAINYSVIIYINDIGYKIKWEAEVDTEGTGSIDWGGTMMMMMLMIWMMITLQEERKVGVRMPKGVQRKRNLLRMQIAKEGLSVENEVGVTAKGEDPIESITVEKKADKAVVLWKSEEFSQPELFEQVSQEEDKSGDLLKRMDVDLKLGGVRLFTDEEGEKCAIPADSDIELMRAEEDDDSEQLDLESEAEIQLKEVNFQKVRHKKKQVSLVKRQSSRVKDKEVSVHLKAELRKSKMNMTSGMSSKNSYAIFHSVSQDYLINIARARGISLGDNSVEVRCNLDAICARELAQATIFDADKSLQQMAEKASLEEEGGQEVPPNGNSVILGFSVVEMENDQFVEGLKEENRDELDDADKESSDNLGDFDLHD

SEQ ID NO: 110872 - protein, 93 aa, Oryza sativa
  Clone ID: PAT_MRT4530_148C.1.pep
GSNFFFVAVKKSPTPRFFIPPKPWVDRPVRVWFSPYTRGGEMGIPPGMGNLENFIPGLGGNLEFRALMGKGKLRAKAQKGVFGGKPPRAGQKG

SEQ ID NO: 110873 - protein, 116 aa, Oryza sativa
  Clone ID: PAT_MRT4530_14900C.1.pep
MTRTPRADDEAIEGAEVEATRRRSEEDGGGDVDLERRRAPPLLAGNKETERGDGKEAWRRGDGTAATPALLATGRRAFLFRWWLSLTTHSFLGVAAPPTSPHRFFLCSGYSPSSSD

SEQ ID NO: 110874 - protein, 240 aa, Oryza sativa
  Clone ID: PAT_MRT4530_14901C.1.pep
MLESNGNGGEEPSLARVLAALERNQSVNAMNQLKFLEAIATQLMSNRTLEASSSNGSALDYMQQFTYLSRYALDDVNTETKKVEAFFNGMQDSLKFHLSGFKFATLHELVDDAIQKEETRTNLEESRKRGKLDCAKKVVEIVGADGQNVEYKSNSKMNEFKKRVVNVAIAKGVVPIVNEYLEVFPDDLLGMPPDREVEFSIELKPGTKPVAKAPYRMSAREHDGLKRQKDECHTLKILNI

SEQ ID NO: 110875 - protein, 551 aa, Oryza sativa
  Clone ID: PAT_MRT4530_14902C.1.pep
MAEQTEKAFLKQPKVFLSSKKSGKGKKPGKGGNRFWKSIGLGFKTPREAIEGTYIDKKCPFTGTVSIRGRIIAGTCHSAKMNRTIIVRRNYLHFVKKYQRQVNNYGFYLCMRRGIPTFRLTSPHASVSRKVTMSSLASAAPAAINALRRLRRSSAPAPPADASAAAATANGSGRDSCSKMRLRLHLLILCLIILFLVYNMASYQHKQTKLEAKSRPFDTITVSDKVSSKVSKRSANRVGFLPHGIVEPYSDMELKPLWLTRSAQSKDSSQKDRCLLAIPAGIDQKRSVDAIMKKFLPENFTVMLFHYDGNVDGWNDLPWSKSVIHIAASNQTKWWFAKRFLHPSVVSMYEYIFLWDEDLEVDNFHPRRYLNIVKSEGLEISQPGLDPKLSEIHHRITVRKKGWSFHRWVEGMAPVFSRSAWRCAWHLIQNDLIHGWGIDYKFGYCAQGDRTKNIGVVDSEYIVHRGVQTLGGPSVKRSHGKNNDPLHQKTAEAQQQMRVKAGLDMRTKVRRYSRSELRDFQKRWERATREDRAWVDPFARPRRKRKRTDRQ

SEQ ID NO: 110876 - protein, 252 aa, Oryza sativa
  Clone ID: PAT_MRT4530_14903C.1.pep
RAVPERQGRPARPVRKGAFCRQLGITPLLKYTPNASLGSIVICAGIGLVDYKAPIIIGRVCKMDFISCMGAFFGVVFASVEIGLLIAVSISFAKILLQVTRPRTVLLGNLPGTTIYRNTDQYPEARHIPGVVIVRVDSAIYFSNSNYVRERTLRWLTEEEEKAKAEGQSKINFLIIEMSPVIDIDTSGIHALEDLYKNLKKRDIQLILANPGSIVMEKLLSSKLNEHIGSNNIFLTVADAVRFCTRKSMQEP

SEQ ID NO: 110877 - protein, 66 aa, Oryza sativa
  unsure (1)..(66): unsure at all Xaa locations
  Clone ID: PAT_MRT4530_14904C.1.pep
MGRHSCCYKQKLRKGLWSPEEDEKLMNHITKHXHGCWSTVPKLCRGFRDXAKAFRLRXWXNYLRAP

SEQ ID NO: 110878 - protein, 157 aa, Oryza sativa
  Clone ID: PAT_MRT4530_14905C.1.pep
MAEQTEKAFLKQPKVFLSSKKSGKGKKPGKGGNRFWKSIGLGFKTPREAIEGTYIDKKCPFTGTVSIRGRIIAGTCHSAKMNRTIIVRRNYLHFVKKYQRYEKRHSNIPAHVSPCFRVKEGDHVIIGLHRSMSLYSHYSWVVYRQILLLEVLAGLVF

SEQ ID NO: 110879 - protein, 161 aa, Oryza sativa
  Clone ID: PAT_MRT4530_14906C.1.pep
MAEQTEKAFLKQPKVFLSSKKSGKGKKPGKGGNRFWKSIGLGFKTPREAIEGTYIDKKCPFTGTVSIRGRIIAGTCHSAKMNRTIIVRRNYLHFVKKYQRYEKRHSNIPAHVSPCFRVKEGDHVIIGQCRPLSKTVRFNVLKVIPAGSTGGSGGKKAFTAA

SEQ ID NO: 110880 - protein, 88 aa, Oryza sativa
  Clone ID: PAT_MRT4530_14907C.1.pep
ISQPGLDPKLSEIHHRITVRKKGWSFHRKVNRGNKDCAKEGPPCSGWVEGMAPVFSRSAWRCAWHLIQNDLIHGWGIDYKFGYCAQGD

SEQ ID NO: 110881 - protein, 343 aa, Oryza sativa
  Clone ID: PAT_MRT4530_14908C.1.pep
MAEQTEKAFLKQPKVFLSSKKSGKGKKPGKGGNRFWKSIGLGFKTPREAIEGTYIDKKCPFTGTVSIRGRIIAGTCHSAKMNRTIIVRRNYLHFVKKYQRYEKRHSNIPAHVSPCFRVKEGDHVIIGQCRPLSKTVRFNVLKNGSGRDSCSKMRLRLHLLILCLIILFLVYNMASYQHKQTKLEAKSRPFDTITVSDKVSSKVSKRSANRVGFLPHGIVEPYSDMELKPLWLTRSAQSKDSSQKDRCLLAIPAGIDQKRSVDAIMKKFLPENFTVMLFHYDGNVDGWNDLPWSKSVIHIAASNQTKWYGIFLPFLCEKSLTLSALAVEYTLLHLAISTDLVSS

SEQ ID NO: 110882 - protein, 88 aa, Oryza sativa
  Clone ID: PAT_MRT4530_14909C.1.pep
MELDCWRKNGRWHQHVVAKSHTGVDMARGCFKKPSTDGQSSTLPSIDIVHGHLARPCPPQTPHLESTKPLASRQVVPRLDASLHLRHL

SEQ ID NO: 110883 - protein, 290 aa, Oryza sativa
  Clone ID: PAT_MRT4530_1490C.1.pep
MELCRHTCEACECEYGAEKTNVTRKTSDFKHHNLSLLEMKGFEVKKRVMQYLGLSQCTELRRTDRIQQNEKEKESKIITGFALHRRVGSHRLDGGSVTAGGGVEDGELVEADEAVAAGGCVAEALEPRDLAVAVVVELDEASHRRRSLPCSGPPPPSPSPPPSRPRPFTAASNRSPLQGLTRTTAEATRSAVLAGEMPSSAANTATDKLRRRWTETDVGGGLGRRCSRSPWWRRRGEARVRRRGRRGGGGEVNGEEAARSRRRRRGAWEGEEEGAVRLREREGSRERKGR

SEQ ID NO: 110884 - protein, 90 aa, Oryza sativa
  unsure (1)..(90): unsure at all Xaa locations
  Clone ID: PAT_MRT4530_14910C.1.pep
GKLFPHYQKKRDFLNVFFKTLKNSCGWGSGVLGFLFPRRVVFLLLVFRFVVGVFLSFVGGFFLGGVGGSPSFSLKVHTXWFLFAGVXRKW

SEQ ID NO: 110885 - protein, 95 aa, Oryza sativa
  Clone ID: PAT_MRT4530_14911C.1.pep
MTEWDGPREVPGKSARNFWAVLRKFFANKRRPEVSARTSGTLKVYGLCYETFKARVSFYGHRKNMTKFDPLSSNPKFWGNDDGAAASCVDNGELW

SEQ ID NO: 110886 - protein, 105 aa, Oryza sativa
  Clone ID: PAT_MRT4530_14912C.1.pep
MPTPCCFNRPPLSPELTVVDATRRRTIIIAPKLRVRGEGIEFGLIRDSHNHLQKPIDPRGKMRGLPGGSGRNFRAPFICKKFPKYCPEVPGTFARNLLAGFQFKL

SEQ ID NO: 110887 - protein, 135 aa, Oryza sativa
  unsure (1)..(135): unsure at all Xaa locations
  Clone ID: PAT_MRT4530_14913C.1.pep
HPLPGGGLWLCPPHPGPGLRGPTSPRGHXPPVFTVAPDPGRGXDPPGCASRPVPPPCLFRVRPPPPGRQRGRAPVTRRPRGRANDLEPGPGARHRAPPPRAXGXARPRPPGRLCNPGPGRARPPGAGSRDRCPAA

SEQ ID NO: 110888 - protein, 198 aa, Oryza sativa
  Clone ID: PAT_MRT4530_14914C.1.pep
STGGCCAGKLFDEMPPRSSDRGCPRSPSPAAMEHGFDRHCVVLGGMPKKRSRLELDAGVSLWAGLQPDILGIVLHFLPCLADRARMRSVCRHWRASANGHVLPPPLPLLMLPGFKFSSLSDKGDLMPVRCVPVPKEVAADDPRCVGYFDGWLVGVTPNKDRSDEYNRDADGDCFLVNVFSRKVIRLPQLCHMRYNFPA

SEQ ID NO: 110889 - protein, 125 aa, Oryza sativa
  Clone ID: PAT_MRT4530_14915C.1.pep
MSGASISPPPPPPPDILIAAASSAASDLLRPRARAGDSPRATSSRSAAKKPPPPPPPPLLRSMGWTDRDLFAIRENYGGNDETLMEKESKPQDEARLIYVDPLEQMVNAVQQGRTYHYGMLWRLP

SEQ ID NO: 110890 - protein, 441 aa, Oryza sativa
  Clone ID: PAT_MRT4530_14916C.1.pep
MDMDSFPDSPASSTNPQLPSRARRKSAPLPRSQRRSGVKTGGVSGCPTAPASRSASPALPPGRRMQLTSAFLVVTAVVAVVVFRRDWLPSPPPLLSPSPLPATSPHLRGGAAAAGSAAVPNHRQMHMRCGFRRAIPPPASPPCPPPLLSVSLAVAAFSASSIAVCLLRPRRLLRPPPSPSASPALAAVFAPSVTFVFASSVAAVFAPSVAVHLPALFTLPLRFAFGRRQAPAGGYAPGGYSSRQAASRPVAPRVASVRRRRRRGQRLGTAKSSDYAKGKGFSVRKNNLKRKDGEIIWRQFVCSCEGYRELKHFERTERKREPRALTRCGCLAKLEIERNEEKGVWFVKEFDNQHTHELANPDHVAFLGVHHVMSDFKKAQAVELRMSGLRPFQIMEVMENNHDELDEVGFVMKDLYNFFTRYEMKNIKGHDAEDVLKYRAS

SEQ ID NO: 110891 - protein, 45 aa, Oryza sativa
  Clone ID: PAT_MRT4530_14917C.1.pep
SIKTYIIGGVYFKIRWSFYQLGELTPEEITLYNNFQENSLRQRAL

SEQ ID NO: 110892 - protein, 430 aa, Oryza sativa
  Clone ID: PAT_MRT4530_14918C.1.pep
MAMSRAAAAAAGTPVARRRLMGAVAARSMASWFGHVEPAAKDPILGVTEAFLADPSPDKVNVGVGAYRDDSGKPVVLECVREAERRIAGSMNMEYLPMGGSIKMIEESLKLAYGENCEFIKDKRIAAVQALSGTGACRLFADFQKRFLPDSQIYIPTPTWANHHNIWRDAQVPQKTFTYYHPESRGLDFAGLMDDIKNAPDGSFFLLHACAHNPTGVDPSEEQWREISHQFKVKKHFPFFDMAYQGFASGDPERDAKAIRIFLEDGHQIGCAQSYAKNMGLYGQRAGCLSILCDDEMQAVAVKSQLQQIARPLYSNPPVHGALIVSTILGDPELKSLWLKEVKGMADRIIGMRTALKENLEKLGSPMSWEHITNQIGMFCYSGMTPEQVDRLTKEFHIYMTRNGRISMAGVTTGNVAYLANAIHEVTKTK

SEQ ID NO: 110893 - protein, 1146 aa, Oryza sativa
  Clone ID: PAT_MRT4530_1491C.1.pep
MACQPVSTRVYIIVGKHAVTGLTAWVRLNNTIESNEVLFSKTRSGLVRINSTVESNEVSLSKTRSGLIRGNTNVRSNEGSYSTTRSELAGANGVVDSNVGDLCSKTRSGLVRRNATLDSNEGSCSKTRSGLARGDGIVGLNQGSSSKTRSGLVRGGDIMNFSEGSSSKTRSGLVRGNTTVAASNGSYSATPSRFVRGNIIVGSKEGSCSRTRSGLVRESIQMDYSDSSCSRTRSGLVRRKPFMVQVKDEAAMNGLSDDCLKEDSPGKNEPNHKSNLVENSDKPVMKGPDGWWKEGMLTKNGSKYMSDPVQTKGEACINGLPGGQWKENSAEKNVSNHKNELVQRKDDLIVDGLPDGWWKEDRPRKNGSNLKTDPQQYPMPNIIATSNIVPLASWFYFEYYIDPVSGYEFRSLKDVHRFLKSGDIYKCITATLLQHTRPGTADKAIQCELLTSEGLMLPWEEQLSPYRELNNPKKMPELEGMIASQKHAYKVDAPREKKSFPRKRKQPSAGGKPKKHKIVPAKMVAMPVRASPRLASLKITHDLNTEPEDELIGVNLVNEVQSTKENPTDKSRLNQAGISTEMTSVQERADNQLLSSQADTGNHIRVMEGDTTDSSQLRQADTVNQILTDQENAVSQLQSSHTDYFVQIRPRQEYVTNYSQSQLSRAATVNQIETNQRNMSGQLQSSQADSLDQIQTEQESSASRLQSSQADSFNEIHTIQEYITEQSESQVSHANQIQIDLGNTVDLLPSSQADAIFQMETTQEYITNQSQSRQADIVDHMQVNQDNTANQFHLRQADTVNRIQTMQESTTDQPQLIQALTVNQIQVNGENTANHVQSRQADTVNHIQLNQDNTVNQFQLRRADTVNRIQTMQDSTADQPHLIQALTVDQIHANRENVVNHFQSRQADTVNHIQVIQDNTANQFQFRRADTVNKIQTMQDSTTDQPRFIQALTVNQIQANGENTANYLQPNYAENNIMQVGFSLTPEPEEAPATSFWRNVANQELPVSMQTDGKPVVSSALNVEYQNVPATAPAQPTRAPHPEAASYPSGLAVPSLFGNSWSDPCIEFAFKTLRGDIPVLDDTSAVEQYFPQHDLNKPPSPDYSASPSCFSSSFDNTRNFTQVDHASLPAPNPSDKLYNGGWFPPK

SEQ ID NO: 110894 - protein, 184 aa, Oryza sativa
  unsure (1)..(184): unsure at all Xaa locations
  Clone ID: PAT_MRT4530_14920C.1.pep
FRWILGSSLLGRAGRPARPVPPPLRDRAGVRDAHGRGGGAAAGGTAQHARRGAPGSHAAAAPPGGPREGRADAAATHGAPQGGPARGGQGGAPXARGGTRAPAPSPSPSRCSTACAPTPEQPRMMLGERGRAGRRGRRVPVHLRDEAGVREDQGRGGGDGGGGDVQDGARGAAGRQAAVARRGG

SEQ ID NO: 110895 - protein, 102 aa, Oryza sativa
  Clone ID: PAT_MRT4530_14921C.1.pep
MLLSRCSSRPSCLLAVPSTRCAAIAIARSSPGTRACTTVEASVDAERLGGPRREQAVAEPTGDLIHDALTSLGPFSKQENRLKTTATQLTTTVDPNQEPCKY

SEQ ID NO: 110896 - protein, 1193 aa, Oryza sativa
  Clone ID: PAT_MRT4530_14923C.1.pep
MAGAASKQEAATMSGVAAEGHCHGGGTFHPAAGAEFSSLFSVSYTLAMVMGVMDCLAEVLATSIARNTSEGLSSSGHDPVDSNAENDIYYGADEDNMISSSKQEKTNWSANKFSQFPQRNKHLRYRTRVFAAECVSHVPVAVGTEPAHFDLLLARSAVAEGVHLSNDWLILKLQELVSLSYQISTGQFEGMQPIGVKLLCLIMDKFGMAVDPEFPGHILLEQFQAQLVSAVRTAISTASSPLLLEAGLELATKVMTSSVIGGDRVALNRLFLLICRPLNDIEDLFYPSFADWVVLKCYTYQFLRMKENIPDEHQQLAPLLANSSSLLGKYWIGALKDYSSISFGLHSRINHKPFLDGIQSFLVSSKAKEYLDEVWALILQATALDAAPLEFEMDDSEDTLGQTFISGHSMVKLNLTEFKFLWGLSVLVLCHTQPSMSNSAIKINLDRNNEKKIGGLVVCAGLDNPRPCDQMLLVLSSLTSQVFFSMNFLTVDTCQELLQALTYADCSSAPVVCLFSQIIRLCPDNFFEVEEFVFVALEFYSWYLATILQSRCGSSQECLSNSLISELSVATETMACRMKNEHWWKLMMLLVSTSYQSFQQVPSNLCLSNIISFLQNTLPIMKKYLQERAEPGDECANCEVALGALVSLVAYLCTQCSNRISMLDNKISDSYKLLAKILYFCLGEAIALAKLVDEIGYHGENCTSNELMSGSFRHCTQVVQASLCSTTIQVQMLGVHVLKVSAQRELAEGSQTATHSFMVLFVELLADVFSVIQTALKIRWHSLTTLFLQGCSSKDSVSVIDECLKLLFLFHSLAQSKKCPQEATMLLLDALLMVFYSSSATGSQELTEVNNISKKLFSHFIQIPSAAIHIKDIMLSAAPTKRQLLQDMIRASVTQGQTIVPGHISANSEQNAQGGFSQEPGLNATDADEEKNEKQVSDDDWDDDWDNFQSLPAHGTNNGADSATAASPLPEQGSVASPHDEQIPQVNINQEVSDVDVSDGTTEGLSSFDKYLKEPSTSHFSDTAQQVESKSQEFSCKDHEESPKHPKVHCTGSSAHVTKEETDDESQQIHGDQFVSRESKNYDLYLSNEIAGSAGEEENDTSGEIRRATGDALDENISSVDDSNLNNISDGTEDKSNKACDKVLVANEKSETVITDSGEKVSASSDEVKSDLYPENVDTKPESSGGEIAESGS

SEQ ID NO: 110897 - protein, 76 aa, Oryza sativa
  unsure (1)..(76): unsure at all Xaa locations
  Clone ID: PAT_MRT4530_14924C.1.pep
QILFFSSSQNYHHQRSSSHHGYYGQGSSKKGYYXXQHQQPGITRVRLTRARQYSAQLPSMCRVEPPQCSXFSAGQY

SEQ ID NO: 110898 - protein, 180 aa, Oryza sativa
  unsure (1)..(180): unsure at all Xaa locations
  Clone ID: PAT_MRT4530_14925C.1.pep
NNLSGQIPAAWGELRSLKSFSAYENRFSGEFPANFGRFSPLNSVDISENAFSGPFPRHLCDGKNLQYLLALQNGFSGELPDEYSSCDSLQRFRINKNKLTGSLXAGLWGLPAVTIIDVSDNGFTGSISPAIGDAQSLNQLWLQNNHLDGEIPPEIGRLGQLQKLYLSNNSFFGEIXARSG

SEQ ID NO: 110899 - protein, 63 aa, Oryza sativa
  unsure (1)..(63): unsure at all Xaa locations
  Clone ID: PAT_MRT4530_14926C.1.pep
RKAXXKXXGAGPPRMGPVGWSXGGAAHRGGPGRDHXAWGRGXEGGPGLGDLACAAAXVTLXAR

SEQ ID NO: 110900 - protein, 300 aa, Oryza sativa
  unsure (1)..(300): unsure at all Xaa locations
  Clone ID: PAT_MRT4530_14927C.1.pep
FLXGGXXGXSPXPENFXKKXXSPQNFXLGRKNLKXNXXXWXLGXGXKKPAXLPFFGGXLXTXXAKGGXEKXEKKPKGXGXGAXKNFFXTKTXKRGXGSPXFWASPXXILGXPSPQWPPIVFSPPLGVGFPLGKFWGTXPKLGFPYXGXRPPPPQAGFLFKTTTXPWGFSGGFPXPTLLLFSLGGNKKGQRLQRFXNXPKTFYSIALIGFPXKGEKTXPPXRSXAWGXGGCLGLPWVGEIAXQTPLPKLGVLXTXNLIGFXGGGGXWAYSXLFPXXXEXFGIALEFPCXIAIGXFXGGVGX

SEQ ID NO: 110901 - protein, 249 aa, Oryza sativa
  unsure (1)..(249): unsure at all Xaa locations
  Clone ID: PAT_MRT4530_14928C.1.pep
PMRQKDQPKARRPLRRPNQLSIRRPLQRPNQPSTWRPLRQPDQPPTKTPTRRPNQLPIRRPLQRPNQPPTRQPLRQPDQLPIRRPLQPPNQPPTRQPLRQPDQLPIRRPLXRPNQPPTRQPLRXPDQLPIRRPLQRPNQPPTRRPLRQPDQPLIRRPLQRLNQPSTRRPLRQPDQPPIRRPLQQPNQPSTRRPLRWPDQPPIRTPIQRPDQPPRRRPLRQPDQLLSSTLRLRPRRQLMFNYKHSVLNIF

SEQ ID NO: 110902 - protein, 177 aa, Oryza sativa
  Clone ID: PAT_MRT4530_14929C.1.pep
MSGCHVISLPSSSLYHSLLFSVLWASRPTAGEEVATTTREDCSSTAAWSPHSLLSTVCHGIGLVGGERGARIPLRLVLRCCSLSRAWAAALSSDAFIDHYLRLAKRRRGPKLCILPESAFADTDLFGWHFSQQAAANCHAAEHAACCCSRSAAVGMAAEHANVYGEKYLGTGRVVLV

SEQ ID NO: 110903 - protein, 61 aa, Oryza sativa
  Clone ID: PAT_MRT4530_1492C.1.pep
CLGPAPPLTPLHLLPPQLGFVIYIVSPLCYSYFASVLLFSMCVPLWYPLSYVTNGETVNKF

SEQ ID NO: 110904 - protein, 143 aa, Oryza sativa
  unsure (1)..(143): unsure at all Xaa locations
  Clone ID: PAT_MRT4530_14930C.1.pep
AAAVVVEKHYTYVILRGGSLAGYEARELDKQGVKPGELWIHVXKVAVDPYERSALTKGYLFPQNAIRLPGFHVCAARGGERLSSEWYSEKGIELILSTRIVKAELASKTXTSATAATSTCDILIIATGSSIINLSDFGTQGAD

SEQ ID NO: 110905 - protein, 187 aa, Oryza sativa
  Clone ID: PAT_MRT4530_14931C.1.pep
MGQVYPQNHSPIKRSQFTSHAGFFLCCRTQDMLKSKLILEDDFGWNLPSMGSNSDQSNANNKGNLKYIGGVDISFSKEDPSTACAALVVLDAGTLEVVHEEFDVVRLQVPYIPGFLAFREVLMVDGNGLLHPRGFGLACHLGVLADLPTIGVGKNVLILLPLQLLLWKFSHLVVFRPFQVLDGFLMF

SEQ ID NO: 110906 - protein, 264 aa, Oryza sativa
  Clone ID: PAT_MRT4530_14932C.1.pep
MEAAVRLIHTPQDALKGAGEYINHALGPAAAVHSLKPPLLAASAVADDLPGYLNVLSRFEEALHFLSDNCGIASQWLTDIVEYLEDRSLAAALAFSHLTTAAATAYSSPASSPRPTNREGGGCTCRTIVVEGAAIGAGPVGVLSEVASQLLLPLPTLFPRGSSRTVGPSGSDWVSELGVRLERDGRPANYVVRRGDGSPSPRRRDGAGRTRDGCRGEHAVVDEEAGEEGVDGGDGGGGGGGERGRVGLPLRRRFRWSDLGKGWR

SEQ ID NO: 110907 - protein, 162 aa, Oryza sativa
  Clone ID: PAT_MRT4530_14933C.1.pep
MDNTPRFSGGGDDCELMQQKQEWAKTQDMLKSKLILEDDFGWNLPSMGSNSDQSNANNKGNLKYIGGVDISFSKEDPSTACAALVVLDAGTLEVVHEEFDVVRLQVPYIPGFLAFREAPILLGLLEKMKTNNQHFYPQVLMVDGNGLLHPRGFGLACHLGVL

SEQ ID NO: 110908 - protein, 254 aa, Oryza sativa
  Clone ID: PAT_MRT4530_14934C.1.pep
MPDGYASNIRRCVDENGWKMYPVERYLRTLKGYVRNKACPEGSIAEGYISEECLTFCARFFEDVSTKVNRPERQENSQVSAPPAGLSIFGSMLYSKNKFHIETASYSDLHRMRHYIISNCDEAMPWVNEHIEELKKTNRGNVDKRHKEQFVSWFERKMNILHADGKIDQDIYCLSRGPDHRVRVANRCSINGFLFRTTNVEKNLTTQNSGVVVQGEGMDWYGVIKKIITLNFPNDKEVLLFECDWFDVPGATTN

SEQ ID NO: 110909 - protein, 53 aa, Oryza sativa
  Clone ID: PAT_MRT4530_14935C.1.pep
TPRGPQIDDPPPRGFKDFFTERAINVFPLRVGRLIHPPFFGFFPPLLPPVFSL

SEQ ID NO: 110910 - protein, 221 aa, Oryza sativa
  Clone ID: PAT_MRT4530_14936C.1.pep
MEDGCSKVVSGGGSGSCGGGAKKPFHFARSLTYHHHQGHRVLPPAAKWRRHQLADEPRARPKDVVLYTTSLRGVRRTFADCSSVRAILRGFRVAVDERDVSMDAAFRRELRSLLDARGRAFSLPQLLVGGRLVGGADEVKQLHESGQLRRLLDGAAGQDPAYVCDGCGGVRFVPCTACGGGRKVFVEEEDRVQRCGDCNENGLMTLQFKTMRYGNDPTVLT

SEQ ID NO: 110911 - protein, 83 aa, Oryza sativa
  unsure (1)..(83): unsure at all Xaa locations
  Clone ID: PAT_MRT4530_14937C.1.pep
TGGQNGNIATDQFHPSKDDVNLMKSLNFXAYRFSISWPRIIPIWWRDEFNHRRLFHYLHTDLIQSSLLQQSASTPLWTMLYAL

SEQ ID NO: 110912 - protein, 163 aa, Oryza sativa
  Clone ID: PAT_MRT4530_14938C.1.pep
MGRTYDQFVETPPQRRRKPASKAAICTNLVTKTGQEGRKNHRLQHGADAARHARRDAGCERAVNTPKRSKKKTYSTRKQGGEPERKRWAGKGGQREADNTAVPNEPKGKAPRGPHTTRYGGEEHKELSIHSTTKQALCAHDVAGRSEYKEKRIGKSMSAQKTP

SEQ ID NO: 110913 - protein, 71 aa, Oryza sativa
  Clone ID: PAT_MRT4530_14939C.1.pep
VGVFFFFFFFFFFGETTPHFTKSPQVFHKQPGFIPFTLKEIGPPITRYSFPKPLYWGPLCIIYICLLPNTF

SEQ ID NO: 110914 - protein, 123 aa, Oryza sativa
  unsure (1)..(123): unsure at all Xaa locations
  Clone ID: PAT_MRT4530_1493C.1.pep
RNRISTTRTPTRTATRPVRDQLSIVASPFXTPVTFKLGTSRRMRQHCCQXLRLVVQQSNYQAICSVQAIVHHLLLHEVGVVYYDQTQAQAHAVLALNSPSICGIYTNYYIDTRSISTVGGVWY

SEQ ID NO: 110915 - protein, 151 aa, Oryza sativa
  Clone ID: PAT_MRT4530_14940C.1.pep
MATETQERHWSGDGGVRVRAGAAAAAAEIETAVEGEELSILLHLAPFLLYFVGGKWSFFNILTREFANPKDDDEELCFEMNEAENFIIEDMSRERMVVDVSTDSDDFDGSFDLEDMLRHVKPEVLPARSRGLENCQALEKARKLVLPDEAK

SEQ ID NO: 110916 - protein, 38 aa, Oryza sativa
  Clone ID: PAT_MRT4530_14941C.1.pep
AYIDSYLFMLIGSTSLCNTTPVNSSRILIYRILIFFKF

SEQ ID NO: 110917 - protein, 1159 aa, Oryza sativa
  Clone ID: PAT_MRT4530_14942C.1.pep
MGGKYLWKPLLRFSGESHRFSPLSRSCAQDRRGDGVRPRQIRRLRARSAASAPARPVPARVEMSDSRDPVWEHGENIPPGWRCKYCHTKRGGGGATRLKQHLAARGKGVTYCNSVPPDVREFFCRELDRIKDAGDQRKSDSGRRVEAARVNYYDLTGDADEEEQMEAAIAASRQDENFRRDVEERGGTYEHGGGSGSAQPEARKGRSNPITNMLRRATSHRESPAVRDYNLASAKAPVQPRIDTGFFTKKGKQARQAIGESWARFFFTAGIPGRNADNPYFVSAVRETQKWGESVPSPTGNEIDGKYLDSTEKDAKKQFDRFKKDWDEYGVTIMCDSWTGPTSMSVINFLIYCNGIMFFHKSIDATGQSQDANFVLKEIRKVVREIGSEHVVQIITDNGSNYKKACRLLRQEYKTIVWQPCVAHTVNLMLKEVGKMPDHEMVIESARKICRWLYNHNKLHAMMVLAIGGELVKWNATRFGTNYMFLQSFLRKRDLFMQWMASSVFMQSKFSGTLEGRYAHACLSSLSWWENLEAVVNSVQPMYSFLRFADEDKNPNLSEVLLRYQLLKMEYDSLFANQRDKFEAYMEIVNRRMHDLTNENLINAAAALNPRTHYAYSPSATVFQDLRQAFEWMMDIDTAAAALLEVEMYRRKTGEFGRVLARRMAIDGKTSPAQWWSMFASDTPNLKKLALRLVGQCCSSSGCERNWSTFAFVHTKVRNRLTHKKLNKLVYVNYNLRLRIQQANAQIRVEDDDPLQRLADLSFYETNNHISAWMDNARSNACPELDEDSAESDAPLPSQLVSDLVNLDDLRRTTGASSIAEWADTNVGDTHIGKRKTRKPPKARPSKKVKGKGPRSTSVDSDEETQGSPEYQESNDSSSRTETDDGDDDGQGGQGTTNMPPRGHTQQSDHHSPVQFTGEGDFTHATQDQDHGAPSSQRTTIAPGVRQQQQFSDIQQDSSSSFSASSFESGYPTSNISRLPSSYRGYRTKPCGYRVHTVDFEFKNLETKFVRFFVVTARLPRIVTLATLGVFEEKGIGKIRKMSGLSLVKCPRCGNAVVECKSWRQGGRVFFKCEKNEQYVPDACTFFKWYDSYQRMVEGMELDFNEEVATPVAIAAAGEADRVDEGKMDKLTKWMQLLVLINIGQGILVLMGVFVLLMK

SEQ ID NO: 110918 - protein, 723 aa, Oryza sativa
  unsure (1)..(723): unsure at all Xaa locations
  Clone ID: PAT_MRT4530_14943C.1.pep
MGGKYPWKLCFVSLAIPTVFPISRSCAQVRRGDGVRPRQIRHLAGEAASRAASGGNRLGRRARGWRWQIVGTLCGSTGRISDXGWRCDADKEEQMEAAIAASRQEENFRRDVEDRGGTYEHGGGSGSAQPQAXRKPRIDIGFLTKKGKQARQAIGESWARFFFTAGIPDRNADNSYFVSAVRETRKWGESVLLQLVRREIRKVVCEIGPEHIIQIITDNGSNYKKACRVLRQEYKTIVWQPCVAHTVNLMLKEVGKMLDHEMVIESAKEICIWLYNHNKLHAMMVSAIGGDLVKWNATRFGTNYMFLQSFLRKRDLFMQWMASSVFMQSKFSGTSEAAALNPRTHYAYSPSATVFQDLRQAFEWMTDIDTAAAALLEVEMYRRKTGEFGRALARKMAIDGKTSPAQWWSMFASDTPKLKKLALCLVGQCCSFSGCERNWSTFAFVHTKVRNRLTHKKLNKLAYVNYNLRLRIQQANAQIRVEDDDPLQRLADLLFYETNNHINEWMDNARSNACPELDEDSTESDAPLPSQLVADLVNLDDLRRTTGASSIAEWADKNVDDGDDDGQGGQGTTNVPPRGHTQQSDHHSPIQFTGKGDFTRATQDRDHGAPSSQRTTIAPGARQQQQFSVIQQDSSSSFSTSSFVSGYLTYVYNRTQSSDYPATTWVYEWQEPQWYAQLYAQWQTTSSWTGQSWEEYKAGLLHSHGLMLMSTEEYNMAYNRWNA

SEQ ID NO: 110919 - protein, 129 aa, Oryza sativa
  Clone ID: PAT_MRT4530_14944C.1.pep
MAFKAFFIILVVFVSSLASPAVARDGPTINPTMGTRGGPTIDSRRLPAAACAAASAAGGAEACRRRVDGCGRAALGLGQACRPPVHQATTQEFREFREGVFFDELYKNKKQDEQQSTFIGREFFVQVKG

SEQ ID NO: 110920 - protein, 891 aa, Oryza sativa
  unsure (1)..(891): unsure at all Xaa locations
  Clone ID: PAT_MRT4530_14945C.1.pep
LPGFCRVLLFLSSLSHSCALLRRGDEXLPRQIRRLRAGVADFRAVCSGNRVVGGGYRLARPPTVPPDVRDFFKRELERIKQTGDKRQNDSNRRVEAAGVNYYDLTGDADEEEQMEAAMAASRQEENFRSHVEERGGTYEHGGGSGSAQPEARKGRSNPITNMLRRATSHRESPAVRDYNLASAKSPVQTRIDTGFFTKKGKQARQAIGESWARFFFTAGIPGRNADNLYFVSAVRETQKWGESVPSPTGREIDGKYLDSTEKDVKKIFDRFKNDWDEYGVTIMCDSWTGPTGMSVINFLIYCNGIMFFHKSIDATGQSQDANFVLKEIRKVVREVGPDHVVQIITDNGSNYKKACRLLRQEYQRIVWQPCVAHTVNLMLKDVGKMPNHEMVIASGRKICRWLYNHNKLHAMMVTAIGGELVKWNVTRFGTNYMFLQSFLRKRDLFMQWMASSDFMQSKFSGTTEGRYAHACLSSISWWENLEAVVNSVQPMYSFLRFADEDKNPNLSEVLLRYQLLKMEYGSIFANQRDKFEAYMEIVNRRMHDLTNETLINATAALNPRTHYAYYPSATVFQDLRQAFEWMTDIDTAAAALLEVEMYRRKTGEFGRALARKMAIDGKTSPAQWWSMFASDTPNLKKLALRLVGQCCSSSGCERNWSTFAFVHTKVRNRLTHKKLNKLVYVNYNLRLRIRRANAQVRTEDGLMLIAMKRLKEAQTTKSLMIVVQELKPMTETTMVKEAKELLMCXPRGHTQQLDHHSPIQFTGEADFTHATQDHDHGAPSSQRTTIASRGQQQQQHVDIQQDSSSSFSASSIESGYPTYVYNRPQASDYPAPTWVYEWQEPQWIHISRXPFTYRGNRLKPCGNLDHTVXFEFKNLDAEFVRFLAVTARLPR

SEQ ID NO: 110921 - protein, 1006 aa, Oryza sativa
  unsure (1)..(1006): unsure at all Xaa locations
  Clone ID: PAT_MRT4530_14946C.1.pep
MGGKYLWKPLLRFSGESYRFSPLSRSCAQDRRGDGVRPRQIRRLRAGEAGSRAVSGGNRAVRDGNRLGRRARGNPSVLKVFARVEMSDSRDPVWEHGENIPPGWRCKYCHTKRGGGGATRLKQHLAARGKGVTYCNSVPPDVREFFCRELDRIKDAGDQRKSDSGRRVEAARVNYYDLTGDADEEEQMEAAIAVSRQDENFRKDVEERGGTYEHAGGSGSAQPEARKGRSNPITNMLRRATSHRESPAVRDYNLASAKAPVQPRIDTGFFTKKGKQARQAIGESWARFFFTAGIPGRNADNPYFVSAVRETQKWGESVPSPTGNEIDGKYLDSTEKDVKKQFDRFKKDWDEYGVTIMCDSWTGPTSMSVINFLIYCNGIMFFHKSIDATGQSQDANFVLKEIRKVVREIGSEHVVQIITYNGSNYKKACRLLRQEYKTIVWQPCVAHTVNLMLKEVGKMPDHEMVIESARKICRWLYNHNKLHAMMVLAIGGELVKWNATRFGTNYMFLQSFLRXRDLFMQWMASSVFMQSKFSGTLEXDKNPNLSEVLLRYQLLKMEYDSLFANQRDKFEAYMEIVNRRMHNLTNETLINAAAALNPRTHYAYSPSATVFQDLRQAFEWMTDIDTAAAALLEVEMYRRKTGEFGRALARRMAIDGKTSPAQWWSMFASDTPNLKKLALRLVGQCCSSSGCERNWSTFAFVHTKVRNRLTHKKLNKLVYVNYNLRLRIQQANAQIRVEDDDPLQRLADLSFYETNNHISAWMDNARSNACPELDEDSAESDAPLPSQLVSDLVNLDDLRRTTGASSIAEWADTNVGDTHIGKRKTRKPPKARPSKKVKGKGPRSTSVDSDEETQGSPEYQESNDSSSRTETDDGDDDGEGDFTHATQDQDHGAPSSQRTTIAPGVRQQQQFSDIQQDSSSSFSASSFESGYPTYVYNRPQASDYPATTWVYEWQEPQCSNISRLPSSYRGYRTKPCGYRVHTVDFEFKNLETKFVRFFAVTARLPR

SEQ ID NO: 110922 - protein, 1085 aa, Oryza sativa
  Clone ID: PAT_MRT4530_14947C.1.pep
MGGKYLWKPLLRFSGESYRFSPLSRSCAQDRRGDGVRPRQIRRLHAGEAGSLAVSGGNRAVRDGNRLGRRARGNPSVLKVFARVEMSDSRDPVWEHGENIPPGWRCKYCHTKRGGGGATRLKQHLAARGKGVTYCNSVPPDVREFFCRELDRIKDAGDQRKSDSGRRVEAVRVNYYDLTGDADEEEQMEAAIAASRQDENFRRDVEERGGTYEHGGGSGSAQPEARKGRSNPITNMLRRATSHRESPAVRDYNLASAKAPVQPRIDIGFFTKKGKQARQAIGESWARFFFTAGIPGRNADNPYFVSAVRETQKWGESVPSPTGNEIDGKYLDSKEKDVKKQFDRFKKDWDEYGVTIMCDSWTGPTSMSVINFLIYYNGIMFFHKSIDATGQSQDANFVLKEIRKVVREIGSEHVVQIITDNGSNYKKACRLLRQEYKTIVWQPCVAHTVNLMLKEVGKMPDHEMVIESARKICRWLYNHNKLHAMMVLAIGGELVKWNATRFGTNYMFLQSFLRKRDLFMQWMASSVFMQSKFSGTLEGRYAHACLSSLSWWENLEAVVNFVQPMYSFLRFADEDKNPNLSEVLLRYQLLKMEYDSLFANQRDKFEAYMEIVNRRMHDLTNETLINAAAALNPRTHYAYSPSATVFQDLRQAFEWMTDIDTAAAALLEVEMYRRKTGEFGRALARRMAIDGKTSPAQWWSMFASDTPNLKKLALRLVGQCCSSSGCERNWSTFAFVHTKVRNRLTHKKLNKLVYVNYNLRLRIQQANAQIRVEDDDPLQRLADLSFYETNNHISAWMDNARSNACPELDEDSAESDAPLPSQLVSDLVNLDDLRRTTGASSIAEWADTNVGDTHIGKRKTRKPPKARPSKKVKGKGPRSTSVDSDEETQESPEYQESNDSSSRTETDDGDDDGQGGQGTTNVPPRGHTQQSDHHSPVQFTGEGDFTHATQDQDHGAPSSQRTTIAPGVRQQQQFSDIQQDSSSSFSASSFESGYPTYVYNRPQASDYPATTWVYEWQEPQCSNISRLPSSYRGYRTKPCGYRVHTVDFEFKNLETKFVRFFAVTISHGYRSPNHFQSIKSLKTDH

SEQ ID NO: 110923 - protein, 151 aa, Oryza sativa
  Clone ID: PAT_MRT4530_14948C.1.pep
MAMQRRIAQGSEDMSQGSSFRAPGRQLSRFLLGPSGLPLVKCPRCGNAVVECKSWRQGGRVFFKCEKNEQYVPDACTFFKWYDSYQRMVEGMELDFNEEVATPVAIAAAGEADKVDEGKMDKLTKWMQLLVLINIGQGILVLMGVFVLLMK

SEQ ID NO: 110924 - protein, 1038 aa, Oryza sativa
  Clone ID: PAT_MRT4530_14949C.1.pep
MRLAIPVVVAIPAAVAFPFASRHPARSDRSGADLAVTVAAAQGGSPGHESYRFSPLSRSCAQDRRGDGVRPRQIRRLRAGEAGSRAVSGGNRAVRDGNRLGRRARGNPSVLKVFARVEMSDSRDPVWEHGENIPPGWRCKYCHTKRGGGGATRLKQHLAARRKGVTYCNSVPPDVREFFCRELDRIKDAGDQRKSDSGRRVEAARVNYYDLTGDADEEEQMEAAIVASRQDENFRRDVEERGGTYEHGGGSGSAQPEARKGRSNPITNMLRRATSHRESPAVRDYNLASAKAPVQPRIDTGFFTKKGKQARQAIGESWARFFFTAGIPGRNADNPYFVSAVRETQKWGESVPSPTGNEIDGKYLDSTEKDVKKQFDRFKKDWDEYGVTIIPLMRPGQSQDANFVLKEIRKVVREIGSEHVVQIITDNGSNYKKACRLLRQEYKTIVWQPCVAHTVNLMLKEVGKMPDHEMVIESARKICRWLYNHNKLHAMMVLAIGGELVKWNATRFGTNYMFLQSFLRKRDLFMQWMASSVFMQSKFSGTLEGRYAHACLSSLSWWENLEAVVNFVQPMYSFLRFADEDKNPNLSEVLLRYQLLKMEYDSLFANQRDKFEAYMEIVNRRMHDLTNETLINAAAALNPRTHYAYSPSATVFQDLRQAFEWMTDIDTAAAALLEVEMYRRKTGEFGRALARRMAIDGKTSPAQWWSMFALDTPNLKKLALRLVGQCCSSSGCERNWSTFAFVHTKVRNRLTHKKLNKLVYVNYNLRLRIQQANAQIRVEDDDPLQRLADLSFYETNNHISAWMDNARSNACPELDEDSAESDAPLPSDTHIGKRKTRKPPKARPSKKVKGKGPRSTSVDSDEETQGSPEYQESNDSSSRTETDDDDDDGQGGQGTTNVPPRGHTQQSDHHSPVQFTGEGDFTHATQDQDHGAPSSQRTTIAPGVRQQQQFSDIQQDSSSSFSASSFESGYPTYVYNRPQASDYPATTWVYEWQEPQCSNISRLPSSYRGYRTKPCGYRVHTVDFEFKNLETKFVRFFT

SEQ ID NO: 110925 - protein, 633 aa, Oryza sativa
  unsure (1)..(633): unsure at all Xaa locations
  Clone ID: PAT_MRT4530_1494C.1.pep
MYFRVILGRDTKPVDNRTVVFAVFFEAGLRFPYNVLLPEILRLFQVELPQLSPSALVRIAIFDWACRTFGFEPNAELFGAIFFATVNSKTVITPAGTKKTVFGSVNFNVRPERSDLWLVNAAMSKWDRHWMARWFYHTIPFKAGSESAKSLRCRRRAITPNRRPNIAVNGAMEARFVLLRKVCSRLSCRDLVEEFCMLRIFPLSQSWQVAVEQGKEVDGLPNLILPEGVNMLTLDQAEAEARRMIGDVSVVEYSQLLTRQAAGRANRVYNGELPPRANPQKANDEAGPSRKRMRGQVKLAPKKRRVPASSDSDADDEDDAEECDGEEEGEEEEEVEAVADKAAGEAVXNRADTPGYTPTPSPGNNETGILAAHCSTERTVRARLDGFKSRLRXKDDELGHKNLETEALANSLKEAKAENKRLQSELEKGKEARAEVDRLKAELEKEKAHTAVLIDYYNLTEPKMEALRQEVHKAEASAAEESRRFSREMGKTTESSRTACQTLRLTLTDMGTKVRGVPSEDASAFDFSEWTQQAGGSVSDCATAYGDCCARQFGCEHIAEFPKYAKGDWEISAQDISPALRAWRKQFWQKDGRSAAKARLLAQLAKAEAADLCEDEGMAAGGGGGDARDHPEV

SEQ ID NO: 110926 - protein, 48 aa, Oryza sativa
  Clone ID: PAT_MRT4530_14950C.1.pep
MWLEMPNCARAVHSRLGAWRSDRRYMRVLTGQVRRSDRPHRAGLTGRQ

SEQ ID NO: 110927 - protein, 1086 aa, Oryza sativa
  Clone ID: PAT_MRT4530_14951C.1.pep
MGGKYLWKPLLRFSGESYRFSPLSRSCAQDRRGDGVRPRQIRRLRAGEAGSRAVSGGNRAVRDGNRLGRRARGNPSVLKVFARLGAVTVRFCMVTVGFVIYETIYVCACTYNYVVLLHNGRVEMSDSRDPVWEHGENIPPGWRCKYCHTKRGGGGATRLKQHLAARGKGVTYCNSVPPDVREFFCRELDRIKDAGDQRKSDSGRRVEAARVNYYDLTGDADEEEQMEAAIAASRQDENFRRDVEERGGTYEHGGGSGSAQPEARKGRSNPITNMLRRATSHRESPAVRDYNLASAKAPVQPRIDTGFFTKKGKQARQAIGESWARFFFTAGIPGRNADNPYFVSAVRETQKWGESVPSPTGNEIDGKYLDSTEKDVKKQFDRFKKDWDEYGVTIMCDSWTGPTSMSVINFLIYCNGIMFFHKSIDATGQSQDANFVLKEIRKVVREIGSEHVVQIITDNGSNYKKACRLLRQEYKTIVWQPCVAHTVNLMLKEVGKMPDHEMVIESARKICRWLYNHNKLHAMMVLAIGGELVKWNATRFGTNYMFLQSFLRKRDLFMQWMASSVFMQSKFSGTLEGRYAHACLSSLSWWENLEAVVNSVQPMYSFLRFADEDKNPNLSEVLLRYQLLKMEYDTLFANQRDKFEAYMEIVNRRMHDLTNETLINAAAALNPRTHYAYSPSATVFQDLRQAFEWMTDIDTAAAALLEVEMYRRKTGEFGRALARRMAIDGKTSPAQWWSMFASDTPNLKKLALRLVGQCCSSSGCERNWSTFAFVHTKVRNRLTHKKLNKLVYVNYNLRLRIQQANAQIRVEDDDPLQRLADLSFYETNNHISAWMDNARSNACPELDEDSAESDAPLPSQLVSDLVNLDDLRRTTGASSIAEWADTNVGDTHIGKRKTRKPPKARPSKKVKGKGPRSTSVDSDEETQGSPEYQESNDSSSRTETDDGDDDGQGGQGTTNVPPRGHTQQSDHHSPVQFTGEGDFTHATQDQDHGAPSSQRTTIAPGVRQQQQFSDIQQDSSSSFSASSFESGYPTYVYNRPQASDYPATTWVYEWQEPQCSNISRLPSSYRGYRTKPCGYRVHTVDF

SEQ ID NO: 110928 - protein, 290 aa, Oryza sativa
  Clone ID: PAT_MRT4530_14952C.1.pep
MDACVPGLPPPRPRVLPAPVAPGESYARWAVRARGGRARQQQKPATTRPSRAPAAGARLACRWAGSIDRSAPAKLQSRRCSRTRGCSESTPSRSSLPTEAGAHSSRYRFGGRAERERAWPADARANALTISWDSASVCNAAPAPGSPGPRSTAGQREADAWTDLYSGFGRVIVRDRSCSESDRAREPGRCHRADARERRPVWAGGVAGCADPQLGHGGSSSPEREVARWGKEGGLAGEGFHIVGEHAVITAEEIEGEERKDIDLVKRGARSHSIVRGLGGRRRRRQSLDT

SEQ ID NO: 110929 - protein, 129 aa, Oryza sativa
  unsure (1)..(129): unsure at all Xaa locations
  Clone ID: PAT_MRT4530_14953C.1.pep
KLQSRRCSRTRGCSESTPSRSSGTXAGAFAFRWPADARANALTISWDSASVCNAAPAPGSPGPRSTXGRSLAXGLSRDTRAPPEPEAIRNRKLSRSRGGSSSPEREVARWGKEGGLAGEGFHIVGEHAV

SEQ ID NO: 110930 - protein, 251 aa, Oryza sativa
  Clone ID: PAT_MRT4530_14954C.1.pep
MPYIMKYLKAEQLLGAGDAPRAEPLPSAPAANYLPLSCVVITTGPPRVPVAPPRPSLARRARSLPSSSDYYREIRPHAIRRQFMPLVGSWVAWSGEFVAVSCGMVRWGEKERLHMSMAWSRNSEAREDDEMSSLTHGRPMLEVWTSAHCSRRRRPPLLLVRRVAGHWTSPWRLEREEGREMKRGKMRIEEEEEEGLLRLGSNDIVYVVDGHDEAKNMLCSSYAYEIAADASRVLPDKFKECDDRAAGSHRE

SEQ ID NO: 110931 - protein, 172 aa, Oryza sativa
  unsure (1)..(172): unsure at all Xaa locations
  Clone ID: PAT_MRT4530_14955C.1.pep
FFFFFFFKTNXKHFRSKYETTSQPIWGSNIGSHTIPXGVSGHPVTHGVSSSSPAHRADHSHRPHPCTLHRXQAHPSTLWGXSPVSHTXSLHLVITHILQPSSHQDAHIKVRTXGGTARRTNFPCLXCHQHPDPVGSVGYWSSGVKTLFPWYTQGHNXPRGGQATPVAVXTAF

SEQ ID NO: 110932 - protein, 60 aa, Oryza sativa
  Clone ID: PAT_MRT4530_14956C.1.pep
YSSLENHLGGSARVLRVVELSPLISFGSKQQLNQKYSYKHTIAVTIYLYFLTSSPFIMCT

SEQ ID NO: 110933 - protein, 156 aa, Oryza sativa
  Clone ID: PAT_MRT4530_14957C.1.pep
MLNFDEEKRRHVGGPRGGEPLMGEPVVKRVYPREAANVKRPGLPLSHMPINAIMRCRSPVAGRRACIEPSEERSNEGAEGRGGEGGEARPPPIGSHSSYYPIHFRRMKGGRKFVAEAVQMLVPGATRTLGFMHLLCRRACVFSWAVNVGTGKLIIL

SEQ ID NO: 110934 - protein, 156 aa, Oryza sativa
  unsure (1)..(156): unsure at all Xaa locations
  Clone ID: PAT_MRT4530_14958C.1.pep
ARGDLLKAIXALGSPNPIPVVVMSSENEPQRISRCLTAGAEDFILKPLKMNDVQRLRKCSGATRPKSAVAGDDDRCCNTAKKAAAAAAATPEQQQQQQRSPHVFWFLQVMNASSFEVSHYFQLIFKLILLAYAVLCLSQLLHRWSNGSSLLSLWCA

SEQ ID NO: 110935 - protein, 54 aa, Oryza sativa
  Clone ID: PAT_MRT4530_14959C.1.pep
AFIGSCQKIKYFKNSYIGLWCTHENFPRKILKTQKQVACQPNPLCMVSCHVTPL

SEQ ID NO: 110936 - protein, 150 aa, Oryza sativa
  unsure (1)..(150): unsure at all Xaa locations
  Clone ID: PAT_MRT4530_1495C.1.pep
SAMFRSSSNLTEPKMQSLRQKASRAEASAAEESRRFSREMAKTTESARTACQTLRLALTDMGAKVRGVPTEDASAFDFSEXTQQAGGSVSDCATAYGDCCARVSAAFTMGLLQQFGCEHIAEFPLFRGRRDGRRGWRRCPEPPRGVRPSA

SEQ ID NO: 110937 - protein, 64 aa, Oryza sativa
  unsure (1)..(64): unsure at all Xaa locations
  Clone ID: PAT_MRT4530_14960C.1.pep
ANHTTVALPVNKVSQMRCKELTPTQLKIAPLSTHARETAXVRSHLFLXPEFGTSFVPKSGPRXX

SEQ ID NO: 110938 - protein, 60 aa, Oryza sativa
  Clone ID: PAT_MRT4530_14961C.1.pep
TTKPREPNGYRIDQEKQQVAQSVKAARRGRPTTQIPTAARWAATPPCYSDLRRLNRRSPG

SEQ ID NO: 110939 - protein, 153 aa, Oryza sativa
  unsure (1)..(153): unsure at all Xaa locations
  Clone ID: PAT_MRT4530_14962C.1.pep
VTHTVCTRLIEFSHFDIHSPXAQIAMCQHLXDLRNAVFXLDRGNLFVRHSCESAVVRPRKATQGADLGPSSGRHVTDRSLXVSSTSSPHASGGSWQGLHMLSPQSQSVWRSSGSVQVNSIAHNVTXVRACSRSIPDTVMSVTGVVLYLVIQSF

SEQ ID NO: 110940 - protein, 79 aa, Oryza sativa
  Clone ID: PAT_MRT4530_14963C.1.pep
IYSFCYQLEGSDVHQFHQILTCAVQVFLVNRLICYVMRSGQTAYGAVHMMFSSVCKSSWLPKLVGRGSNAQIHLNCSCF

SEQ ID NO: 110941 - protein, 295 aa, Oryza sativa
  Clone ID: PAT_MRT4530_14964C.1.pep
MEGGTNARRRRLVERGADRLAFITGQAQTLPSDPLPDSPLNSVDAATPQISERNASEGGISGDKFSNITRLHKSQPSDVVPESQLSAKARQEIHDGDLLREFKTSSTVPEIQPVNETPMQRHGEETLGKRINHDRTATVTRKEMETRPKSVPPNQSNQAENAAWSVETLKEHLNFTPHEITQAISATEYNRFLASVAVAFLAVLSNWGLDIGGTITRVLVGTRPLLFLIITNVTIVFTLLMENKDPNVRGRSAGSNLGSADSLGQMLEIGLLLQKSLGALLMDCSICAVILICFL

SEQ ID NO: 110942 - protein, 162 aa, Oryza sativa
  Clone ID: PAT_MRT4530_14965C.1.pep
SLEKVFSEVGSKSEMLSVKLQREADNLLFNFEEPLKDYVRAVQSIKATMVDRANAFRQHHDLFQQKEYKGVNLEKLKFVNPDKFSELEAEVRELTADSEEATKRFEHIVAVMNEELARFQEQKTADIGFAFHEFAKGQAKLAKDIADAWRGVLPKLEACSTS

SEQ ID NO: 110943 - protein, 451 aa, Oryza sativa
  Clone ID: PAT_MRT4530_14966C.1.pep
MAQPQPQSQRQRVYEAWKGNNRFFFGGRLIFGPDAKSLLFSVALIFVPVAVFCAFVARNLRHQFPAYNAGYAILAVAIVLAIYVLSLLFITAAQDPGIVPRASHPPEEEFHYDNLSLADTPGRLVFPRVKDVMRNYRYFFLFVSSASILCIYVFAMSALYIKILMDGDYPTVWKALKHSPASLALLIYCFICLWFVGGLTGFHTYLISTNQTTYENFRYRADGRPNAYDRGCMNNFLEVFYTKVPPSKHKFREPIQEEARAPPANRAVEREEEPVGARTKVEDDLDIGGDLLKISQRHNYDGIDIEMGGGDRNSRNEAVSNSKLISKTDAQAPTVEDELSFLMHTLTLISSGGCRFHLECNPILYPYKQYNFLDRAIITSFHFETTLVGQFCSHTVLFLQYAVLLNSDCQQQAHLVVNAEDIGIITDMLPSQPDSELPFECWSCRCSTGIL

SEQ ID NO: 110944 - protein, 51 aa, Oryza sativa
  Clone ID: PAT_MRT4530_14967C.1.pep
MATGWDGTELGKNGPGPAPRICPPPRIACRVKNPTRPRPCKGLARQATDTG

SEQ ID NO: 110945 - protein, 471 aa, Oryza sativa
  unsure (1)..(471): unsure at all Xaa locations
  Clone ID: PAT_MRT4530_14968C.1.pep
MKRKYIMMPIIIQGPKQPCNDIDVYLRPLVEDLKQLWKKEGVPVWDEDKQEEFNLRALLFVTINDWPALSNLSGQSNKGYKACTHSNHPVRKKGKHFEHKADHRTNPKHRSGKTVFAMVKDLKVVFGKGPGSQHIESEDGVYRKSKDTLEARNDLKHMEQRGDLHPEPKEKGSHYLSPASYTLSKAEKENNXRYWIHRPSESKRRNARPISTRNRGQSRPSPEGAALQDVHTVAIQHRIPLGAFTHRPGGLHRQRXKQKQGTNLCGYYVCEYCHCLTDQIITTRELDEGNDASNVIVAGLVETGLGFHPPITTCESTAGAPMLHHHQTSAGTWNHCISAPCRPAFQSTPPPPAAADRHSAIAIQIRPSWGGSGGLRRRGRQTPHRHVHYQVPPSPRSLPAARDPSARSDRARPGYGHRRRRRSEERPWPPSAWRPVARRGRRREKEEGAGGVASQVTRGKVTREEEEFPIG

SEQ ID NO: 110946 - protein, 198 aa, Oryza sativa
  unsure (1)..(198): unsure at all Xaa locations
  Clone ID: PAT_MRT4530_14969C.1.pep
LLCEIVAVKWVRCLENLRLMGSARPGWPFESLAPPAGMAARGGHLSVASWQYMVFWYYGEWKRERGSGMMVTDKVYLLSYDLWNISIRYILTYTDCTHKXTWKPFRMERNISTSQVIXEVLLARVLEGQEDPWYKRDPXEGFRESNSISDTPTKVYEAGVRGAKSPGDLVESIDYDLTLVPTYPNTLLIRSTSITRRQ

SEQ ID NO: 110947 - protein, 51 aa, Oryza sativa
  Clone ID: PAT_MRT4530_1496C.1.pep
MVVLEVVKGYYVGDEMELEMDVEVGGCRGEIREDAVGGECCPKGETDDALR

SEQ ID NO: 110948 - protein, 196 aa, Oryza sativa
  unsure (1)..(196): unsure at all Xaa locations
  Clone ID: PAT_MRT4530_14970C.1.pep
MAIAEWRSAAAGGGGTCGVRGYGGRGXGGRHGARXGATSGGGGRLSTVRRGRRCRRPVTTRRGAAGGXRRRARCDKEELPVGAVRSTTHEGWPAGGADAVVPRASRSLMVVEHRSAAISAVFCCWPSGGRSCLAAAGXGASLLLDLCVGVAGVWVVVYFFXFLVTTFQGCNLVIFXCSINXTLHRLLRVVQKKFTF

SEQ ID NO: 110949 - protein, 66 aa, Oryza sativa
  Clone ID: PAT_MRT4530_14971C.1.pep
RLDGYRLHLRKAEEDLHHKEDERQVVADALKKASAENKSLVGENKSLRADLEGANKRAAERERQLE

SEQ ID NO: 110950 - protein, 66 aa, Oryza sativa
  Clone ID: PAT_MRT4530_14972C.1.pep
PHQMYALYSSIFHMFKKKKDQNIVQVGTTHDSPPAGPGLPVLRFHETTELKPTKFNKPNFTIFFFT

SEQ ID NO: 110951 - protein, 296 aa, Oryza sativa
  Clone ID: PAT_MRT4530_14973C.1.pep
MDVSRRKKWVAWVAAVTIFVVLMLVTPAIPQNEEYHDFADQRRRFRGGGHHLHRAHARHPGHPAERGVPRLRRPAPPLPRDPQYAECDFKHPLLFCGCGVTAVAFGSSYYHLKPNDATLVWDRLPMTIAFTSVMAIFIIERVDDRAGTKSLAPLVIAGALSIMFFDDLRPYAVIQFVPCIAIPVMAIVIPPMYTHSSYWLWAAGFYLLAKVEEAADKPIYKWTHQIVSGHTLKHLAAAMVPVFLALMLAKRTVEPERVSLFQRWKVKLVAVRETRFNKDRNTVDYNYIAVSTTPEP

SEQ ID NO: 110952 - protein, 165 aa, Oryza sativa
  unsure (1)..(165): unsure at all Xaa locations
  Clone ID: PAT_MRT4530_14974C.1.pep
MFVARQRAAFVARQLQRTARTYASDAHAHHKAAEVNESFSTGSLFAVAGFFGSVLVYQFVPAEGEQSAILNFINKYTSRSKDWEEINALHTKAMEQAGYDRNLFEXAATSTXFVDVAYPEAISSYANRNHIAGHLPNMDYVVEHYRQQHLKEEERKATKLAQKQE

SEQ ID NO: 110953 - protein, 194 aa, Oryza sativa
  Clone ID: PAT_MRT4530_14975C.1.pep
MGDDHDDGRAFPCSPETTPRRGRPRPPPPPPPRPTFAAASARRGCHSSQTVPIEAAAATAVAQREESIPSRTCETYTFLGGVPEAARELEAHGRFNQLVTQMQVDIAARDAAGFVEVDHGAGAGSGILRWAVGSVFAVFWVALIIGLVGGEKDPVPAVRAVTRSPHDITHLGLYLAGLITVLDQYGLSVPVIRT

SEQ ID NO: 110954 - protein, 72 aa, Oryza sativa
  Clone ID: PAT_MRT4530_14976C.1.pep
MIIPVRCFTCGKVIGNKWDLYLDLLQADYTEGDALDALGLVRYCCRRMLMTHVDLIEKLLNYNTLEKTETAG

SEQ ID NO: 110955 - protein, 96 aa, Oryza sativa
  Clone ID: PAT_MRT4530_14977C.1.pep
ARGMKSKFECFLLPLLFAMQKFCIGLLFSPQKWLKVAYDRLLVYDIPVKIEWLLCLAVGLGESIRIFSAYSCSHFGRMCVTYRIYIKIYPLRPRIT

SEQ ID NO: 110956 - protein, 417 aa, Oryza sativa
  Clone ID: PAT_MRT4530_14978C.1.pep
MSCFPCFGGGKKKSLSADTARFDDADAAPASQMTPPAPAAAPMTPPRPDQAPKPSEDASAGLAIAGQAFAFRELAAATDHFTPYNLIGEGGFFRVYKGQLEKTGQTVVIKQLDRHGFQGNNEFLDEVSKLSRLHHDNLVDIIGYCADGDQRLLVYEFMSAGNLEEHLFDLPADKKPMDWCTRMKVAYGAAQGLEYLHEKASPPVVYGDFKASNVLLDDALTPKLSDFGLAQLGQVGGNAPAPMMGSFGCCAPEYDRSGQATMKSDVYSFGVVLVQLISGRRAIDPDKPTEEQNVVAWAMPMFKDQKRYHELVDPLIKSEYAAKALNQVVAMAAMCLQEEDSVRPLMADVVMTLGFLTSLPPDPPAASVPAPAPSASPAPKSDHSDSSSSSSSDDDDDDNDNEEEEGEEEEEEDAEEQ

SEQ ID NO: 110957 - protein, 82 aa, Oryza sativa
  Clone ID: PAT_MRT4530_14979C.1.pep
AGSLTDCATAGTPSNLLSEINPFWFLQMRLTFPNNTFRVLLYNLKLTLCITYNLQNYLFNVYIFCPSIINHRDHFHLQVYST

SEQ ID NO: 110958 - protein, 911 aa, Oryza sativa
  Clone ID: PAT_MRT4530_1497C.1.pep
MGRLAIAGLMGRKGFLGPRGGELVKAKSSSFGRQSSPCTLRLRRLWPSATLRLALLSLHSLRHGFRQVSSKGLMPSANKPLTGKGETGASAKTVQTMWNLPFRLPLRHVALYYWWRLSTPQAFRRISFFATANAPFAMAPRKPNPTSVKGPDPGRVDDDSTAFLGVSLVDDVELAKLVSSGGLVEGQAFALGKTVVPKPVDNRTVVFAVFFEAGLRFPCNVLLPEILRLFEVELPQLSPLALVQIAIFDWACRTSEFEPNAELFGAIFFATVNSKKVITLAGTKKTVFGSVNFNVRPERSDLWPVNAAMSKWDRHWMARWFYHTIPFEAGSESAKALRCRRRVIAPNRRPKIAVDGAMEARFVLLRKVCSRLSCRDLVEEFCMLRIFPLSQSWQVAVEQGEEVNGLPNLILPEGRTLAPKKRRVPASSDSDTDNEDDAEERDGEEEGEEEEEVEAVADKAAGEAVEDRADTPGYTPTPSPSHNETGDLEGAKALVAFSSGASAKGGPVKKVAKKKGLVNVARVFSNDESSDGTPTSPAGRSLDLSAAPIPPLGAARVDGSTAAGASASAERIVMAAAKVFGSPPHQPVASPLMEAKGKRAVAEMSASEYSLSVPRFAPGDFETRADLLPFVEGVSNLVLPASAPSLFTELNEFDEGCSAIKSLAVRILAAQCSTERTVRARLDGFKSRLRAKDDELGRKNLDMEALGNTLREAKAESKRLQSELEKGKEARAEVDRLKAELEKEKAHTAMLIDYYNLTEPKMEALWQEVRKAEASAAEESRRFSREMVKTTESARTACQTLRLALTDMGAKVRDVPSEDALAFDFSEWTQQAGGSVSDCATAYGDCCARVSAAFTMGLLQQFLDFHRGWRRCPGSPRGVRPSALLLDFHSFLLVFARCGEPLYIRQTAAKP

SEQ ID NO: 110959 - protein, 55 aa, Oryza sativa
  Clone ID: PAT_MRT4530_14980C.1.pep
RTYTYAWLLLPGWPDGYATMIYIASCRENIICCQKNNPAATQVACYLLPPLVTRV

SEQ ID NO: 110960 - protein, 49 aa, Oryza sativa
  Clone ID: PAT_MRT4530_14981C.1.pep
LKLNLSRYMDWIDDYLTLRVENPICSKITSSSAEEQGKLSKNLMSYLAD

SEQ ID NO: 110961 - protein, 56 aa, Oryza sativa
  Clone ID: PAT_MRT4530_14982C.1.pep
ESPWEFLWSKNICTHNKLCLLCMIPWSLFSQKFTWFYCSSGFCSTGSPPKNMGFVP

SEQ ID NO: 110962 - protein, 80 aa, Oryza sativa
  Clone ID: PAT_MRT4530_14983C.1.pep
FSSLCIKTCYVIYILINVSAWRCIQWIILIPSPTTRRRSTPTVTPPTPIRCALKNWSTFSTIMPSPGALTITWRSSCGAS

SEQ ID NO: 110963 - protein, 414 aa, Oryza sativa
  Clone ID: PAT_MRT4530_14984C.1.pep
MRALLSRIHPPGPGSISTTSFLQCPSSTAASASKTLAPTLTFRRFAAMAAAAAEEFVKGRVTPNGVAVITLDRPKALNAMNLEMDLRYKAFLDEWETNPSVKCVLVESSSPRAFSAGMDIKGVAAEIQKDKSTPLVQKVFTAEYSLICKIHEYTKPYICLMDGVTMGFGIGLSGHGRYRIITERTLLAMPENGIGLFPDVGFAYMGERALDEGSYLGMTGKRISSPADALFFGLGTHYVPSANLGPLRESLLSANFTDDPHRDVESLLTKFKNEPESGPQLDKFLPYIISSFGPDKSVAESVEELKKCSQSDDAAVAEWANEALAGLKKGAPFSLCLTQKHFSQVASAYRNNEHYLSKLAGVMKVEYRIALRSSVRNDFVEGNPKWKPATLEDVDKGEVESVFEPLAAEAELNV

SEQ ID NO: 110964 - protein, 78 aa, Oryza sativa
  Clone ID: PAT_MRT4530_14985C.1.pep
MAAAAAEEFVKGRVTPNGVAVITLDRPKVLNAMNLEMDLRYKAFLDEWETNPSVKCVLVESSSPRAFSAGDHLSVFIR

SEQ ID NO: 110965 - protein, 386 aa, Oryza sativa
  unsure (1)..(386): unsure at all Xaa locations
  Clone ID: PAT_MRT4530_14986C.1.pep
MGCSHVTMRALLSRIHPPGPGSISTTSFLQCPSSTAASASKTLAPTLTFRRFAAMAAAAAEEFVKGRVTPNGVAVITLDRPKALNAMNLEMDLRYKAFLDEWETNPSVKCVLVESSSPRAFSAGGDVKRLAKDXQCQRRIIERTLLAMPENGIGLFPDVGFAYIGAKAPGGGAVGSYLGMTGKRISSPADALFFGLGTHYVPSANLGPLRESLLSANFTDDPHRDVESLLTKFKNEPESGPQLDKFLPYIISSFGPDKSVAESVEELKKCSQSDDAAVAEWANEALAGLKKGAPFSLCLTQKHFSQVASAYRNNEHYLSKLAGVMKVEYRIALRSSVRNDFVEGVRAVLVDKDQNPKWKPATLEDVDKGEVESVFEPLAAEAELNV

SEQ ID NO: 110966 - protein, 64 aa, Oryza sativa
  Clone ID: PAT_MRT4530_14987C.1.pep
IDARLAKAQEILEELLKPVDESQDYYKRQQLRELALLNSPLREESPHPGSASPFSNGGMKRMKQ

SEQ ID NO: 110967 - protein, 180 aa, Oryza sativa
  unsure (1)..(180): unsure at all Xaa locations
  Clone ID: PAT_MRT4530_14988C.1.pep
SLWNGSDDNLCTIKVRVNIENPSRAESYSPRAGRISSVYRHKLPMLILIHMSASRVNLVQTAILSPVWNVNAHRLVYIIHGRSQVKSFGTFXKTVFDGVXLRTRQLWIIAQHYAVLKKAERDRCLYIAIKTDANAFVSHLARKNSVFRALPVDVVANACRISREQARILKNNGEKRRCLH

SEQ ID NO: 110968 - protein, 173 aa, Oryza sativa
  unsure (1)..(173): unsure at all Xaa locations
  Clone ID: PAT_MRT4530_14989C.1.pep
MALAYSFFRQEMYEEAVTLYAELAEAALTSSLISKEPPVIEPVRLHSGTEENKEALRKSRGEDDEDFQITEYQAQRGNTVAMHKLGLLYYYGLRGVRRDYGKAYHWFSKAVEKGDTRAMELLGEIYARGAGVERNYTEAYKWLTLAAKQQQYSAXNGLGYLYVKGYGVEKKNL

SEQ ID NO: 110969 - protein, 46 aa, Oryza sativa
  Clone ID: PAT_MRT4530_1498C.1.pep
FNSFKIPLKFIHSKGGIKWFYYGGHPTQKFLLGISKKKNIYEAKML

SEQ ID NO: 110970 - protein, 57 aa, Oryza sativa
  unsure (1)..(57): unsure at all Xaa locations
  Clone ID: PAT_MRT4530_14990C.1.pep
MAAPDVEYRCFVGXXXWATDYRSLDFVFSTYFDILYSNIIIFRYTXLSRGFHFFHHF

SEQ ID NO: 110971 - protein, 50 aa, Oryza sativa
  Clone ID: PAT_MRT4530_14991C.1.pep
DQQLISKFKCQAWDIIIMHVQGSIDLLHCQLIEQRALSHGIQRKAMLDHR

SEQ ID NO: 110972 - protein, 1016 aa, Oryza sativa
  Clone ID: PAT_MRT4530_14992C.1.pep
VDLQALLGFKQGITSDPNGALSNWNASIHFCSWNGVNCSQARPWRVTGLNLTRKSLSGQISSSLGNLTFLRKLLLRDNNFYGPIPLLNDLQHLEVLNLSQNSLNGIIPDGLANCSSLTALVLSSNNLTGRIPPTIWNSLTKLEYLDLAANNITGIIPASVQNLTHLNFIRLINNYLEGSIPNRIWQLPNLSILLIGNNTLSGEIPSTLNLSRIELLSLELNMLGKALPKNFGDAFPRLQQATLDYNNFEGQIPTSLGNASGLWYIDLSSNYFTGQIPTSFGRLSELSRLNLAYNKLEANGNQGWEFLHSLTNCTALTTLSVAENNLQGSLPHSVGNLSINLQNLIFSVNNISGVVPPSIGNFPNLIRLSLGKNNFSGEIGEWIGNLKNLQGLFLRENNLIGPITPSIGNLTQLTMLSLQNNKFEGIIPPNIGHLSQLSILNLSYNNLQGSIPEEVGNLQELVVFLALNNNNLTGAIPQSLGNITYLDQVYLELNQLGGNIPDEIGNLTQLIYLKLTSNKLTGKIPDALEMCQNLVTIQMDQNFFTGTIPISFGNLKGLSILNLSHNCLSGTIPAVLGDLPLLSKLDLSCNNLQGEIPRNGLFRNATFVYLEGNRALCGGVMDLHMPSCHQVSHRTERKSNWARLLIPIFGFLSLTVLICLIYLVKKTPRRTYLSLLSFGKQFPRVSYKDLAQATGNFSQSNLIGRGSYGSVYRAKLSLVKIKVAIKVFDLEMRCADKRFVSECEILRSIRHRNLLPVLTACSTIDYSGNAFKALIYDYMPNGNLDMWLHKKNTSVASKCLSLSQRVNIAVDIANALSYLHHECERSIVHCDLKPTNILLDNDMNACLGDFGISSLILESRFTSLGHYSPNSSIGLKGTIGYIAPEYAQCGHASTCGDVYSFGIVLLEMLIGKRPTDPMFENELNIVNFVEKNFPEQIPQIIDARLQEEYKGFNQAVTKKENCFYVCLLSVVQVALSCTPLIPKERMNMREIAIKLLAIRTSYAEATKREDLLCRKE

SEQ ID NO: 110973 - protein, 78 aa, Oryza sativa
  Clone ID: PAT_MRT4530_14993C.1.pep
SIVYEEIVNTQVLAYSGQPEKNLMNFWSMVENSTGEFLLLDLLYDLIVVLVTQPARAWTQDILTPHCIPDAMPADLIT

SEQ ID NO: 110974 - protein, 42 aa, Oryza sativa
  Clone ID: PAT_MRT4530_14994C.1.pep
YILYMDIRLLPVMGPCASMGSEHSSRVVSMRLSLFVKYTLPV

SEQ ID NO: 110975 - protein, 103 aa, Oryza sativa
  Clone ID: PAT_MRT4530_14995C.1.pep
MTVKARVTSSCADVEASQLTSRTLLTLRLADRTKPDDEPHNANELLLPDKILLVVTIVHIVASSVAHSYINLVIEIHFNHQCVRELTPRNFMNSVTKRTKCMV

SEQ ID NO: 110976 - protein, 95 aa, Oryza sativa
  Clone ID: PAT_MRT4530_14996C.1.pep
KKWGLKGNKGAIGFCPQKFKKIPPFFFFQRVQRGVKQPFLKNRFPLKNFLDKKPLPKKGVFKPKRNRGPPGFLVVPKTFGGVWCPSKPPLGGLLG

SEQ ID NO: 110977 - protein, 96 aa, Oryza sativa
  Clone ID: PAT_MRT4530_14997C.1.pep
IPIDTATVFTPHMQTELNSWSLHGRRTPTIASMHRGLLDSREPLEQLIAGLHHDLFSSPIGMNILPSWTPAVILSSCSRNSSSTLSIDSVCSVLRR

SEQ ID NO: 110978 - protein, 454 aa, Oryza sativa
  Clone ID: PAT_MRT4530_14998C.1.pep
MAGSLSAALCLTLFCLLGACIAPGARANGRHSRRDLDINLGNGNGGGISIGIGGSGGGGGGGSSGGSSGGGGDLRPCDFENERLYKAYKVIQKFRRTVTCDPQNIISSWSGADLCSTYKGFFCERPPNITDRTIASVDFNGYNLQASSLKEFVDALPDLALFHANSNNFGGAVPDLSRLQYFYELDLSNNKLSPATFPTDVLKLKNATFVDIRFNSFYGELPGGVFCSFPQVQAIFVNNNQFSGSLPDNIGDSPVNYLSLANNNFTGEIPKSIARMANTLFEVLFLNNKLSGCLPYELGLLAKATVIDAGTNQLTGPIPASFACLRKVEQLNLADNLLYGEVPNALCELAFSWSGRLRNLTLSNNYFTSLGSCCWDLIKEGKLNVDRNCIPYAPNQRSHDECAAFFHRTKTSACPCNTYVPCGHNKHSAAGAGSEQDTAAAEEDKYRTYSALHP

SEQ ID NO: 110979 - protein, 567 aa, Oryza sativa
  Clone ID: PAT_MRT4530_14999C.1.pep
MMNSLIRKLATVSSEDIDVRPLERKIIRINSDRLLKVIHHVGDAQAMEWMRQILEVAYDVEDWIDLCIHLHGRVRADQLERIEEFIVRIDNVEERLSSQSPIGDNPHMLYAMEEDLIHHCERKVRLRRDLVLNLMDKLVVDSDQQLKVLFILGDRGIACQINHTELYIKSGGDEHQVIDNFRNFLRNKSSNNEILPKIWVCGVGPWVVLDCWWSAGVGGGGVRGGYMCFIVIDDIWTTTAWKAIKCAFADNKNGSRIITTAQIDKVSRLSYRHHTDLVVMLGGLKNCTISKGRLIRRWAAEGFIDERDEGSIWETGESYFNELTIRQLIMREFIEDKTSNNIDLEDGSGFAVGCKVHGLVHDFIVSLSSRENMVTSDAELGSMQRGVIRRLTIKNDFSSIPKDSTQPSGSGTMDVQSINRALASAQKGKIRSLAFLGNSRLLSDVVGFKLLRVLDLEDCKSLGNEHVQKIRSLFLLRYLGLRGTGVTELQEDIGELHELQTIDVRRTRVKQLPVSVNELKKLVFLLGDGLQAQAGMTAMQNLEEVSTIDVSERSSLDMVSELLVKSN

SEQ ID NO: 110980 - protein, 697 aa, Oryza sativa
  Clone ID: PAT_MRT4530_1499C.1.pep
MALRKPNPSSAKGPDPGRVDDDSTAFLGISLVHDVELEKLVSSGALVEGQAFAPGKTVVPKLVDNRTVVFAVFFEAGLRFPCNVLLPEILRLFQVELPQLSPSALVRIAIFDWACRTSGFEPNAELFGAIFFTTVNSKTVITPAGTKKTVFGSVNFNVCPERSDLWPVNAAMSKWVRHWMARWFYHTIPFEAGSESAKALQCRRRAIAPNRRPKIAVDDAMEARFVLLRKVCSRLSCCDLVEEFCMLHIFPLSQSWQVTVEQGEEVDVLTLDQAEAEARRMIGDVSVVEYSQLLTRQAAGRANRVYNGELPPRANPQKADDEAGPSRKRMCGQVKLAPKKRRVPASSDSDADDEDDAEERDGEEEGEEEEEVEAVADKAMGEVVEDRADTPGYTPTPSPGHNETRVESNSSPLRRKDLEGAKALVAFSSGVAAKGGPVKKVAKKKGLVDVARVFSDDESSDGTPTSPAGRSQDLSAAPIPPLGAAGVDGSTAVGASASAERIAMAAAKVFGSPPHQPVASPLMEAKGKGAVAETSASEYSLSVPRFAPGDFATRADLLPFVEGVSNLVLPASAPSLFTELNEFDEGCSAIKSLAVRILAAQCSTEQTVRARLDGFKSRLRAKDDELGRKNLEMEALANTLKEAKAENKRIQSELEKGKEARAEVDCLKAELEKEKAHTAVLIDVANHCIFGKLPLNL

SEQ ID NO: 110981 - protein, 124 aa, Oryza sativa
  unsure (1)..(124): unsure at all Xaa locations
  Clone ID: PAT_MRT4530_149C.1.pep
TPLSCAAARRRXPAARRHRFRRPRTAPRPPIALHRPTAPRHPLHFPSPPPKHRRHAHHLFLHHRQLQPHTTATIALGHRSVFPFPPCHRLHRIRCIPPPLGRGSAVVGRRRNAVLVASRADRRH

SEQ ID NO: 110982 - protein, 76 aa, Oryza sativa
  unsure (1)..(76): unsure at all Xaa locations
  Clone ID: PAT_MRT4530_14C.1.pep
IYGSWWYVACDRCRRXARPYGKTYXCGGGDCPATVPASPRFKLGLIAXDDTAXTXFXLXGRMAXRXIGKSVESFXD

SEQ ID NO: 110983 - protein, 250 aa, Oryza sativa
  Clone ID: PAT_MRT4530_15000C.1.pep
MVEQLHLHCLLHRQTQLQLLRKLFYFTNHDVYKSLDISAYVTKYDAVTSTSSALTSPPLLRDDYVLAAGTCEGSCSAGKHPMAVVSGSGCRREFLQCVVRVNNFPTKLRPWDLSWLCKPFGPLRMYHLVMRNTAAANAPATATKLTEAKTAPAVLFSAAAGTSAGMNSLLDRAIPVPASAGLGAAADESTSDKAKDIGGTGGAAIVIGGGGGPGERALARLPSLPSLALAPTSTSLPVRRCRRRRRILRR

SEQ ID NO: 110984 - protein, 1318 aa, Oryza sativa
  unsure (1)..(1318): unsure at all Xaa locations
  Clone ID: PAT_MRT4530_15001C.1.pep
MRWGMSPDRRLAAFAFSKIFASASLTKLNSRGERGSPYLSPLNKSSLSMRNLIVSYNSGCGACVILIAKYNPKTDEVTEFNVNSCLTLLYSIHFCSIITTEGLGNTKDGFHSIQKRMSGFHASQCGFCTPGMCMSIFSSLVNADKSKKPAPPKGFSKLSISEAERSFSGNMCRCTGYRPIVDACKSFESDVDLEDLGLNIFWKKGDKHPDPTKLPSYTLGGGICTFPDFLKSEIKSSLDFNDASISGPREGWYCPKSIKQYYKLVNSGLFSESSVKVVVGNTSTGVYKDQDLYDKYIDIAGIPELSAIVRKDKGIEIGAATSISRTIEILNQESELTSSPNGSVVFRKLAEHMSKVASPFVRNTASIGGNIILAHKYPFRSDIATILLGAAATVNLQVSSKTLHVNLEQFLEQPPLDHSTLLLSIFIPHWASDCKKEHTLVFETYRAAPRPLGNAVSYVNSAFLGHVSLDKSSGDNILSNLHLAFGAYGTKHAIRARKVEEYLTGKILSASVVLEAIRLLRETIVPVEGTTHPEYRVSVAVGFLFSFLSPLCKGVIESGKTLSISEDLVDTDNVHNKPLSSRRETLSDDEYTPVGDPIKKYKVEVQASGEAIYVDDIPAPKNCLYGEFIYSTQPLANVKSIKFKPSLASKKIITVVSAKDIPTGGRNIGSTFWFGDEEPLFGDPIAEFAGQVLGVVIAETQPYADMAAKQAVVEYTTDGLKAPILTVEQAVQSNSYFQVPPERAPKQVGDFSNGMAEADHKIMSEEFVIGVTNFPQAISKAHLRQHSITSSHYYFYMETQTALAIPDEDNTMTVYSSSQFSELAQNVISKCLGIPFNNVRVITRRAGGGFGGKRRVFFYPASTSNQIYTAIEIGNLASQTTQSKIRSIGDLNSGPWGTTQIATAAALCAHMLRRPVRMYLNRNTDMIMVGGRHPMKARYSVGFKPDGKITALHLDLLINAGISADASPIIPGTIISGLKKYNWGALSFDVKLCKTNNTSKSVMRAPGETQGSLIAEAIIEHVAAVLSLDANTVRQKNFHSYDSLVLFYPESAGESSTYTLHSIFDRLASTSSYLKRAESIKKFNSCNKWRKRGISSVPLILKVRVRPAPGRVSVLSDGSIVIEVGGIELGQGLWTKVQQMAVYALGQLWPNGCEGLLDRIRVLQSDTLNLIQGGVTAGSTTSESSCAATLQACNMLVERLKPVLDRLQLQSGIVSWDTLISQASQENVNLSASAYWVPDQDSKFYLNYGAGTSEIEGSFIQGIGFFIYEEHQTNSDGLVISNSTWDYKIPSVDTIPKQFNLEVLNTGYHRXRVLSSKA

SEQ ID NO: 110985 - protein, 99 aa, Oryza sativa
  unsure (1)..(99): unsure at all Xaa locations
  Clone ID: PAT_MRT4530_15002C.1.pep
FIRVLANKLSGRCIGLQRLHPIGFYWIILYNYIDYHQPIVFIXIIYIGHIADSSEPYHYRLDQTDWHARTSSTFGPALELSRSPRPVCVFCINTISTCT

SEQ ID NO: 110986 - protein, 1365 aa, Oryza sativa
  Clone ID: PAT_MRT4530_15003C.1.pep
MMMMKKKVVAPVERVVFALNGERQEVAAADVDPSTTLLEFIRTRTPFKGPKLGCGEGGCGACVILIAKYNPKTDEVTEFNASSCLTLLYSIHFCSIITTEGLGNTKDGFHAIQKRMSGFHASQCGFCTPGMCMSIFSSLVNADKSKKPDPPKGFSKLSVSEAERSFSGNMCRCTGYRPIVDACKSFASDVDLEDLGLNIFWKKGDKHPDPTKLPSYTLGGGICTFPDFLKSEIKSSIDFNDASISSPREGWYCPKNIKQYYKLVNSGLFSESSVKVVVGNTSTGVYKDQDLYDKYIDIAGIPELSAIVRKDKGIEIGAATSISRTIEILNQESESTSSPNGSVVFRKLAEHMSKVASPFVRNTASIGGNIILAHKYPFRSDIATILLGAAATVNLQVSSKTLHVTLEQFLEQPPLGHNTLLLSIFIPHWASDCKKEHTLVFETYRAAPRPLGNAVSYVNSAFLGHVSLDKSSGDNILSNLHLAFGAYGTEHAIRARKVEEYLTGKILSASVVLEAIRLLRETIVPVEGTTHPEYRVSVAVGFLFSFLSPLCKGVIEPGKTLSISEDLVHTDNVHNMPLSSRRETLSGDEYKPVGDPIKKYKVELQASGEAIYVDDIPAPKNCLYGEFIYSTQPLANVKSIKFKPSLASKKILTVVSAKDIPTGGRNIGSTFLFGDEEPLFGDPIAEFAGQALGVVIAETQRYADMAAKQAVVEYTTDGLKAPILTVEQAVQNNSYFQVPPERAPKQVGDFSKGMAEADHKIMSEEVKLASQYYFYMETQTALAIPDEDNTMTVYSSSQFPELAQNVISKCLGIPFNNVRVITRRAGGGFGGKAVRSLHIATAAALCAHTLRRPVRMYLNRNTDMIMVGGRHPMKARYSVGFKSDGKITALHLDLLINAGISADASPVIPGTIISGLKKYNWGALSFDVKLCKTNNTSKSVMRAPGDTQGSFIAEAIIEHVAAILSLDANTVRQKNFHTYDSLVLFYPDSAGESSTYTLHSIFDRLASTSRYLQRVESIKKFNSTNKWRKRGISSVPLIFKVEPRPAPGRVSVLNDGSIVVEVGGVELGQGLWTKVQQMTAFALGQLWPKGCEGLLDRIRVLQSDTLNLIQGGLTAGSTTSESSCAATLQACNMLIERLKPVMERLQLQSDTVSWDTLISQASQENINLSASAYWVPEQDSNFYLNYGAGTSEVEVDLLTGAITIIRSDLIYDCGKSLNPAVDLGQIEGSFIQGIGFFIYEEHQTNSDGLVISNSTWDYKIPSVDTIPKQFNAEVLNTGYHKHRVLSSKASGEPAVVLGASVHCAVREAIRAARIEFAGNNGSGSSLLTFQLDVPAPMTVVKELCGLDIVEKYLEDLSNRGAASGN

SEQ ID NO: 110987 - protein, 137 aa, Oryza sativa
  unsure (1)..(137): unsure at all Xaa locations
  Clone ID: PAT_MRT4530_15004C.1.pep
GRVGGAGTSEVEVDLLTGAITIIRSDLMYDCGKSLNPAVDLGQIEGSFIQGIGFFIYEEHQTNSDGLVISNSTWDYKIPSVDTIPKQFNAKVLNTGYHKHRVLSSKAXGEPAGVLGASVHWAVREAIRRARIEFASN

SEQ ID NO: 110988 - protein, 1158 aa, Oryza sativa
  Clone ID: PAT_MRT4530_15005C.1.pep
GCGACVILIAKYNPKTDEVTEFNVNSCLTLLYSIHFCSIITTEGLGNTKDGFHSIQKRMSGFHASQCGFCTPGMCMSIFSSLVNADKSKKPAPPKGFSKLSISEAERSFSGNMCRCTGYRPIVDACKSFESDVDLEDLGLNIFWKKGDKHPDPTKLPSYTLGGGICTFPDFLKSEIKSSLDFNDASISGPREGWYCPKSIKQYYKLVNSGLFSESSVKVVVGNTSTGVYKDQDLYDKYIDIAGIPELSAIVRKDKGIEIGAATSISRTIEILNQESELTSSPNGSVVFRKLAEHMSKVASPFVRNTASIGGNIILAHKYPFRSDIATILLGAAATVNLQVSSKTLHVNLEQFLEQPPLDHSTLLLSIFIPHWASDCKKEHTLVFETYRAAPRPLGNAVSYVNSAFLGHVSLDKSSGDNILSNLHLAFGAYGTKHAIRARKVEEYLTGKILSASVVLEAIRLLRETIVPVEGTTHPEYRVSVAVGFLFSFLSPLCKGVIESGKTLSISEDLVDTDNVHNKPLSSRRETLSDDEYTPVGDPIKKYKVEVQASGEAIYVDDIPAPKNCLYGEFIYSTQPLANVKSIKFKPSLASKKIITVVSAKDIPTGGRNIGSTFWFGDEEPLFGDPIAEFAGQVLGVVIAETQPYADMAAKQAVVEYTTDGLKAPILTVEQAVQSNSYFQVPPERAPKQVGDFSNGMAEADHKIMSEEVKLSSQYYFYMETQTALAIPDEDNTMTVYSSSQFSELAQNVISKCLGIPFNNVRVITRRAGGGFGGKRRVFFYPASTSNQIYTAIEIGNLASQTTQSKIRSIGDLNSGPWGTTQIATAAALCAHMLRRPVRMYLNRNTDMIMVGGRHPMKARYSVGFKPDGKITALHLDLLINAGISADASPIIPGTIISGLKKYNWGALSFDVKLCKTNNTSKSVMRAPGETQGSLIAEAIIEHVAAVLSLDANTVRQKNFHSYDSLVLFYPESAGESSTYTLHSIFDRLASTSSYLKRAESIKKFNSCNKWRKRGISSVPLILKVRVRPAPGRVSVLSDGSIVIEVGGIELGQGLWTKVQQMAVYALGQLWPNGCEGLLDRIRVLQSDTLNLIQGGVTAGSTTSESSCAATLQACNMLVERLKPVLDRLQLQSGIVSWDTLISQVIPVFYNVSLCTVK

SEQ ID NO: 110989 - protein, 119 aa, Oryza sativa
  unsure (1)..(119): unsure at all Xaa locations
  Clone ID: PAT_MRT4530_15006C.1.pep
MDISRANEGYTGCGSVVEMSWHRAGVLXARGSILPTCLGIPAVGEVGSVLLSRLGWVKGLCHXFTTGSTAMECGVKMCLVGWPXLAWDELGPRSGCKFGLNHRRPWVKAGSCGKTWQED

SEQ ID NO: 110990 - protein, 58 aa, Oryza sativa
  Clone ID: PAT_MRT4530_15008C.1.pep
QHHGLRTPNTRSMDIALLNSREPLDTITTPLDDKMIFTRIANDNWTPYAPPFRTSIFP

SEQ ID NO: 110991 - protein, 579 aa, Oryza sativa
  unsure (1)..(579): unsure at all Xaa locations
  Clone ID: PAT_MRT4530_15009C.1.pep
MAPRKPTKAGSTGEDPSGLGEGWSCFLGKSLVKEADLAELVSSDALXRAKDHVGAKPLSLRPVMGERLSSLXYFAAGLHLPCDDFLSSVLATYEVRLPQLSPSAFLKLAVFAWMCRTCGSAPTAELFAVLFMACATTKDVQTPTGPRKTVFGCVNFMLRLECSNAWPVPASMANARPTTEVNRVHVGELPSQSNPSRARDDEVGTSKKRKRAVAKGGQVRTRRGAKGAVESDGEEEEEEDGEAGSEDDGFHGYTPSSTPVKSGAGSHISPTRPQDIVVANTLLAISSTAAKPGMTARRKKKKGKVVQVARGFSNSEGSDGTPTSPILQHGPPRGRRMSPPPASDAEAAMGGSASALAAKGLAAHLNAKKSALQRLDGYRLRLRKTKEDLRHKEDERRVVAETLKKANAENKLPPRPWFRPQSAKQACYTLRLPLNDLGARAEGALGEGGTVFDFSEWTQEAAGLVVEVAGAYGDCCARVSAGFVLSLLHAHGCDHIGNFPDLVKEEWLSNTQCSGAAFRKGFWEDGGRDCAKTRLRENLERIARDEEAAAGNTEVDPGPSEQAAGYEGKNNGGQDHPDV

SEQ ID NO: 110992 - protein, 155 aa, Oryza sativa
  Clone ID: PAT_MRT4530_1500C.1.pep
LVRSLAGERCHVEVGPPLDGEVVLPHQPVASPLIEAKGKRAVAETSASEYSLSVPHFAPGDFETRADLLPFVEGVSNLVLPASAPSLFTELNEFDEGCSGIKSLAARVRTCFFFPLFYLLLFLYLAFTIDTCSLSRSYFAPRSSRLTAQRSEPCE

SEQ ID NO: 110993 - protein, 59 aa, Oryza sativa
  Clone ID: PAT_MRT4530_15010C.1.pep
KLHELDLPDSRDAGIPAVDLSPCKGHTVVALDPIKERAICAAQQALAFVDLGSLRTCGR

SEQ ID NO: 110994 - protein, 113 aa, Oryza sativa
  Clone ID: PAT_MRT4530_15011C.1.pep
MASAARVADEKGDLPPSPLFLPSPSKSNTSSLGSTGGSTRERSEERAAASLGRGRHARAWAIALGCGRRRRAARAAALGDREARGTGSGDGEVRGGGSGDGKARGGGSGDREA

SEQ ID NO: 110995 - protein, 124 aa, Oryza sativa
  Clone ID: PAT_MRT4530_15012C.1.pep
RRVAAAAAPDAAACAAARTRWPAWTAPSPRQPPSPAGSSPAPPAATARPRPPSRPRAPRTPRGTPRPRPSRRSRRRRRRPPLPHAPRPRAAVPPAAAPRRRWRGRVARRSGRTRWRRWRRRSGT

SEQ ID NO: 110996 - protein, 84 aa, Oryza sativa
  Clone ID: PAT_MRT4530_15013C.1.pep
MTALLTWMIPSSPWIPNHLWEKATTGKQGKQIELKSPIDHCLGLDLDLTLAGSSFCRIPLLTPCSSTVTTTKSRMGRGMDANAS

SEQ ID NO: 110997 - protein, 104 aa, Oryza sativa
  unsure (1)..(104): unsure at all Xaa locations
  Clone ID: PAT_MRT4530_15015C.1.pep
RXPSNDEVXPPTTCQPXGEXTRHXKGXQCXTQVSXXKSDKQTXHNRKAXVFQNQTHKLXXKXPHGQIXXKAPXIKXCRAPXKNXXXLXYXXPTXAXTXFFFSXR

SEQ ID NO: 110998 - protein, 35 aa, Oryza sativa
  Clone ID: PAT_MRT4530_15017C.1.pep
RDIFEPIYSSINNRGPQIQTLGPYYHKITMNRFSN

SEQ ID NO: 110999 - protein, 162 aa, Oryza sativa
  unsure (1)..(162): unsure at all Xaa locations
  Clone ID: PAT_MRT4530_15018C.1.pep
RPPAPLLPLFVRRTLSKGSAHAARASAPANAAACLRRSPRGRLDEERAADDGGGAETEPLDGGAHYGELAANLGLRLTLGWLPVTLAAEGRAFILRCRYSCRRGSGIMGLSGADRTEVPYXYKTFGVVVQRYIGEWRDIVITLKGGTKVDLKSEPRFRGASD

SEQ ID NO: 111000 - protein, 1473 aa, Oryza sativa
  Clone ID: PAT_MRT4530_15019C.1.pep
MSRLQGGEEEVAATDGGGHVPVAGRRARRRGRGMAPGGLRGSGRGRPATRRHARQARAARTSTARDGRRRKASRRSSPSEWMVVVAVRVLAGPSSPDSTFGRWSDSGRRLGRPLRGGGGLVSHPLVKADEPSLKNNEDKTLLDELQGREPSQTQPRQGRSGPVRSRKKNLKYCSPEWDNEGGRVHVIDRFGESFSGSIHQRERYTGSMAQSNQFELLMKTIAENEKKREAADERTRAEYLELKKIVEAKIPEVEKKVEDLNTALISLSDKVEHLEDTVMQQARGGASRKIKNEQFSINRSTSTQFLQGKRDPQFNSLDGSPGSASPEFGDGSGWSELSGAVPPMTFPQFTGENPQMWKANCEQYFDVYGIHPRNWVKVATLNFSRNAAFWLQSIRHSVGYYLGGILNLEPIYFVTKFVEGLKDEIRSAILLQRPQDLDTACSLALLQEEALGGTKTGGYRKLQLLKMLGKKHNLLRLERTDCLLSGHSFKGDFRLIPLGTYDIILGMDWLEQFSPMQIDWVHKWLEFQHLGKEIRLQGIVNKKDHCSLITSNQLQGMVKQGSVLCMVQLQTIEQAPANIILESVQPLLQEFQHIFTEPTALPPKRNCDHHIPLVEGTKPVNLRPYRYKPALKDEIENQITEMLQSGVIQHSQSEFSSPALLVKKKDGTWRLCIDYRQLNSNTIKSKYPVPAIEELLDELSGSKWFSKLDLRAGYHQIRLAEGEEYKTAFQTHPGPGHYEYKVMPFGLTGAPATFLSAMNDILSSVLRKFVIVFFNDILIYSPDLQTHLLHLREVFQLLAQKQWKVKLSKCSFAQQQLSYLGDIIGAHGVSTDPQKIADVINWAVPKTLKKLRGFLGLAGYYRKFVKNFGLISKPLTSLLKKGISFTWTQEADAAFNQLKQALVSAPVLQLPDFSKPFTIETYASESGIGAVLSQEGHPIAFLSKALGPRTKGLSTYEKEYLAILWAVDHWRPYLQQGEFLILTDHHSLMHLTDQRLHTSWQQKAFTKLMGLQYKVRYRKGISNAAADALSRNDTIPSSEVPAISVCTPLLLQEVVQGYEQDTYTSQILAELVVHPTARKHFSLSQGLLRYKGRIWIGNNTQLQHRIIDELHSSPMGGHSVCLQAKPDRAKYPGLLQPFPVPEGAWQVVSLDFIEGLPKSHGFNCILVVVDKFSKYAHFIPVSHPFTAASVAQEFMTHVYKLHDLPRIIISDRDRIFTSQLWEFLFTKSGTKLHKSSAYHPQINGQTERLRKAQGFQPDVLSQLPPSLKHLQVPETFLDHRIVRKAVNATWEDMEDLQHRFPKALAWGQASFQYWGLVSHHLVKADEPSLKNTEDKTLPDELQGREPSQTQPRQGRSGPVRPRKKNLKYCSPEWDNEGGRVHVIDRQRRASHRTASSAAIETVEMHSAVQICTFLDKECLGIVGAWTDFLIQELRSSRGERGAFLNVDEQWCPRRCLVVVGASDLTVDEATTAS

SEQ ID NO: 111001 - protein, 746 aa, Oryza sativa
  Clone ID: PAT_MRT4530_1501C.1.pep
MAKPSFFELDARANWTWRSRPSSLDARANWLWRSRPSSAGGTPTVEPVGAGSDLGLRLGMPDFRVRTQRYPLRRHILCRRELEDAGYSGWNEEDGGGEEEEVEIVVEKATGEAVGGRAETPGYTPTPSPGHNETGVESNSSPLRQKDLEGAKALVAFSSGTAAKGGPVKKVAKKKGLIDVARVFSDDESSDGTPTSPAGRILDLSAAPVPPLGAARAGGSTAAEASASAERIVTAAAKVFGSPPRQPVASPLIDAKGKRAVVETSASKYSLSLPRFAPGDFETRADPLPFVEGVSNLVLPASAPSLFTELNEFDEGCSAIKSLAVRILAAHCSMERTVRARLDGFKSRLRVKDDELGRKNLEMEALANTLKEVKVENKRLQSELEKGKEARAEVDRLKADLEKEKAHSAMLIDYYNLTEPKMEALRQEVHKAEASAAEESRRFSREMVKTTESGRTACQTLRLTLTNMGAKVRGVPSEGASAFDFSEWTRQAGGSISDCATAYGDCCARVSAAFTMGLLQQFGYEHIAEFPKYAKEDWEISAQDISPALRAWRKQFWQKDGRSTAKARLLEQLAKAEAADLCEEEGAAAGGGGGDAQDHPEGVRRKSCIRPPFGSWRSQNEKFVALKGLPKVRCTFRPIYREMEINGRSYKVFKVADWLRVHPGRTLEDYDLIHSRHLEDMARFWRNHQKTKRQETIFQRRYSLVCVSPPTPLKVVYDISSDDEPSSPDPSLGRDSDYGGEDVIYL

SEQ ID NO: 111002 - protein, 242 aa, Oryza sativa
  Clone ID: PAT_MRT4530_15020C.1.pep
MDLEALPGDVLEEVLRRLPPRSLAACRCVCSALRALVDDRRVLRADLLPLKLAGIFIGVIWVPQFFARPVLPHALDLTRLPETMLDCRNGLLLAHNVVVNPATGRWARLPRSPPPPPGCSCNDVFDYLVFDPTVSAHYEVYKIPSPFGDGMSDWPPSPFIIDVFSSKTLQWEKRSYVREGEAAGTVANLLARGFNSSSATALTSSSAAAASPRLEQCELPPPLPCLLRRTPLPLAASSPACR

SEQ ID NO: 111003 - protein, 439 aa, Oryza sativa
  Clone ID: PAT_MRT4530_15021C.1.pep
MDRIMRQWRSLLLLLLLLCVVGSSSLLLVSSQTSSSSSDSCTAALAVGDLIPFNTTGLNCFQAWSSQDFILRFGQDASAGSNVWNFVLSAPDAGGYISVGFSPNGGMVGSSAVAGWVASGGVGTARQYYLGGTSSRSCPPGQGKLSLSTGAAAPTIVSQGSRLYLAFQFSGQPRTDLVYAVGPAGSLPGTNGFLAQHQYMTSGTITLPTGTSGGGGGGSTSTGGGGGGGDSDDGNEGGGGEGKGKHKHSGGDGDGDEGKGGRRTSPSSSSSATASGAAGGLSSKRRHGVLAVVSWGAMIPAGVAMARFMKRFEPLWFYAHAGVQGLGFVVGAVAIVAGFRLDGEDDVGAHKAVGVAVLVCACLQVMAVLARPIKEAKARKYWNWYHHYVGRAAVVLGVGNVFYGMSLAKEGDEWSYVYGIFVGVCAVAYLVLEEWRRRH

SEQ ID NO: 111004 - protein, 50 aa, Oryza sativa
  Clone ID: PAT_MRT4530_15022C.1.pep
MRLHWTKCLSSMLFSRKLQCLSEHELVNHFRSCTLMLSRTIGAHCELSCL

SEQ ID NO: 111005 - protein, 305 aa, Oryza sativa
  Clone ID: PAT_MRT4530_15023C.1.pep
MESFPLLASGLFLPLATSMLAFAGKVCHITELVDVLRCFTSCNMDPYLRIGEDLQLYVRLQSDLGNYGSDSDQEIARSVLSDCRTKVGINDQRVLDVVACALCNLTEMDKDVLVKELTEMFTPEEVPLFGSNSAFDWANFHVQAFSDESLSFDEECSRTSSVDGGLHESPITNTGSSISKTTMPQSVPRVLGVGQLLESALHVAGQVAGASVSTSPLPYGTMTSQCEALGSGTRKKLSSWLVNGHDSTPDNPAPSLPSAQHFIIPKVNSCGFESSIRTTLEPCSAVKLPPASPFDNFLKAAYRAQ

SEQ ID NO: 111006 - protein, 998 aa, Oryza sativa
  Clone ID: PAT_MRT4530_15024C.1.pep
MGFMSAKLFPSCESMCVCCPALRPSSRRPVKRYKKLLAEIFPKTPIAKFLEQRSHKELRSAHVNFIKIITEAYSKLLFICKEQMAYFAISLVNVLTELLESKQENIHILGCQTLAKFIYSQVDNTYARNIESLVRKVCVLSRQQGVEHSLLRAASLQCLSAMIWFMKEHSYIFVDFDEIVQSVLENYRVEESAAGDEERHAPQHNWVDEIVRREGRAGLGGGNDVNCNSTAIRLRSARDSSALTREERESPEVWAHICVQKLAELAKESTTMRRILDPMLSYFDKKKQWAPRQGLALLVLSDMSYLEKSSGNEQLILTSVIRHLDHKNVLYDPQIKSDMIQTATLLARQLRSRGIAAELVVAGDLCRHLRKTLEAMESASIEELNLNESLQNFLQDCLLEVVTGINDVRPLYDMMAITLENLPSMPVVARASIGSLLILSHIISLTSMSLNAPMLFPEALLQQILKSMVHPDVDTRVGAHHMFSAVIVQGPSRQRSESDFLYETKKWQSRTTSVFASATALLEKLRREKESLGSDKTGNMDDEKEKSISEEENKHVWARKNSAYFSKLVFSFTDRYAALTSSAEEANIVMLTEDQKNQLLSAFWVQAIQTDNTPFNYEAIGHSYSLTVISSRLKDSRNSNNIQFFQLPLSLRSVSLTSNGVLSPSCQRSIFTLATSMLAFAGKVCHITELFDVLRCFTSCNMDPYLRIGEDLQLYVRLQSDLGNYGSDSDQEIARSVLSDCRTKVGINDQRVLDVVACALCNLTEMDKDVLVKELTEMFTPEEVPLFGSNSAFDWANFHVQAFSDESLSFDEECSRTSSVDGGLHESPITNTGSSISKTTMPQSVPRVLGVGQLLESALHVAGQVAGASVSTSPLPYGTMTSQCEALGSGTRKKLSSWLVNGHDSTPDNPAPSLPSAQHFIIPKVHDLSCLSPMSFWNVAYSASVCIIWPSRSQSTFIQVNSCGFESSIRTTLEPCSAVKLPPASPFDNFLKAAYRAQ

SEQ ID NO: 111007 - protein, 117 aa, Oryza sativa
  Clone ID: PAT_MRT4530_15025C.1.pep
SPLHKLGNDLITPRARHQRSGWPDEGKYGGGGCRSGEAAGGSSVGDDARWRGEQRAPLPSRSVAAAAVTVTAARPPSRSAVVVTVPAVVVAVPAAVEEGSAAHGRLVKGGHRRCRVA

SEQ ID NO: 111008 - protein, 90 aa, Oryza sativa
  Clone ID: PAT_MRT4530_15026C.1.pep
AKIMIVTTKMFRKITPALHKTTAIYLCTSFQLQFVHFRSMKKHCLFCRMERPSVEKWKRLRVLNHGIITSCMICCQILLLLKPDLYIDGA

SEQ ID NO: 111009 - protein, 92 aa, Oryza sativa
  Clone ID: PAT_MRT4530_15027C.1.pep
SMCPCGMGFRHDYDGHVYGVELLLAASGPCKPLRIQQQSVIRGRPWYATCGSIARSSTQSVTRCCSFRRRLRPLLCPLNFSEACWSGIRLFP

SEQ ID NO: 111010 - protein, 62 aa, Oryza sativa
  unsure (1)..(62): unsure at all Xaa locations
  Clone ID: PAT_MRT4530_15028C.1.pep
PRPDRGRPAHWLVGPRHPPRHASSSXPTTAAATTTIAVKPTVAAVHDKRAMTTTMAGTSSSS

SEQ ID NO: 111011 - protein, 148 aa, Oryza sativa
  unsure (1)..(148): unsure at all Xaa locations
  Clone ID: PAT_MRT4530_15029C.1.pep
MEMILDALASYLGEQFAKMVKDEARMLLGASGEVEKLTGMLSRLKKFLANAERRHITDAKEGEYVHEWVRKLXKDAMYDATDIVDDVHLKSEQRRERYASPYPGSCSNSSLLWCLQDPLFAHRIGSRVKELNERMDGLFKQAEADQQA

SEQ ID NO: 111012 - protein, 549 aa, Oryza sativa
  Clone ID: PAT_MRT4530_1502C.1.pep
MSLAAESPSPSSPSSSSGSDDFAALLDAELELTSAADSASAGDPSAATDDDDEGGDEEEEDVVVVVEQEDAIVEQSRGWRWLLIFCAVRAFDIRWVNIDSLGGALMESQLPSVKTSFISMSRWYTVAGSSKDVKIDECPPHPGFFGGLCYRCGKRQDEEDVPGVAFGYIHKGLRLGTTEIDRLRGADLKNLLRERKLVLILDLDHTLINSTKLFDLSAAENELGIQSAAKEVVPDRSLFTLETMQMLTKLRPFVRRFLKEASDMFEMYIYTMGDKAYAIEIAKLLDPDNVYFGSKVISNSDCTQRHQKGLDVVLGDESVAVILDDTEYVWQKHKENLILMERYHYFASSCRQFGFGARSLSETMQDERENDGALATILDVLERIHTIFFDPVIKRVRQEVLQGCKLVFTRVFPLHQRQQDQMIWKMAEQLGAVCCTDVDSTVTHVVALDLGTEKARWAVSNKKFLVHPRWIEAANFRWQRQQEEDFPVARPKEKGKENAADAPISKENGDKNAADAANAKKGNENVADAGSTKEGSKENADDAANSEEE

SEQ ID NO: 111013 - protein, 75 aa, Oryza sativa
  Clone ID: PAT_MRT4530_15030C.1.pep
GRVGGGGGGGGGGGEGGGGGYGGSGYGSGSGYGEGGGSGGAAAGEYGRDEGDGHAGAEGGASHSGYGSAQGSGYG

SEQ ID NO: 111014 - protein, 49 aa, Oryza sativa
  Clone ID: PAT_MRT4530_15031C.1.pep
LLITEMEAHSVMLVIHQSCLHVWGETCNMTDNDLRTAYISFQLNFVFSS

SEQ ID NO: 111015 - protein, 72 aa, Oryza sativa
  Clone ID: PAT_MRT4530_15032C.1.pep
KGNLCMYTSNHENRKSSISSVTSYRMPFSPVQGELLNTKGSGFGISISTASKRWRGRADCQEDNPRAIYEGA

SEQ ID NO: 111016 - protein, 50 aa, Oryza sativa
  Clone ID: PAT_MRT4530_15033C.1.pep
MGLYRLLGSHLHREKGTLLDQSGPTDSVRDERLKDSHRHDVMGHGRLHAA

SEQ ID NO: 111017 - protein, 84 aa, Oryza sativa
  Clone ID: PAT_MRT4530_15034C.1.pep
MACRTSQRTEKFPSEILNLEIVFVWKHLNVAIPSSQERSCKNVCRLCPWLHVAVWALKHEEGTATINGLPTVSILPWPRVAPPI

SEQ ID NO: 111018 - protein, 43 aa, Oryza sativa
  Clone ID: PAT_MRT4530_15035C.1.pep
MGVRPNPGAKRREQIAWRDQWSTVGWCETGLASYFIDDDDKMP

SEQ ID NO: 111019 - protein, 292 aa, Oryza sativa
  Clone ID: PAT_MRT4530_15036C.1.pep
MGKSWKNKLPDALWAYRTAYKTPIGMSPYQLVYRKTCHLPVELEHMAHWAIQTWNMDLKEARQHRKMQLFELEEWRDKAYHNAKIYKDRTKKWHEKRIKPKEFKAGDKVLQFNSRVKLFGHGKLRTGTTLADQQGSVLEAIDRKLPLLSKALYTLQIWQEALYGMISQPDRQINTTPATRAAGSDGPDLPPGRSDGGCSSRPARTGTAQAGPAAMARGGERPAAEDGGVVATRAAIATAKRLGGGAAAKRHGREGERGGGASPTTIDDGERWRAMATARRAPGPPKGSKGMS

SEQ ID NO: 111020 - protein, 105 aa, Oryza sativa
  Clone ID: PAT_MRT4530_15037C.1.pep
MAAGNGRMEAALGCLAALPDEVLCAVVDLLPPTDVSRLACVSSVMYILCNEEPLWMSKCLSDGGLLVYRGSWKKTALTRLSLCSENDEIYQKPRHFDGVNSMHLY

SEQ ID NO: 111021 - protein, 62 aa, Oryza sativa
  Clone ID: PAT_MRT4530_15038C.1.pep
SSVPGDPLTKLVLSATTLPVLSALGLARCLGQRSEALGKLSEEVFRGDRLPVLPFPVEEEAG

SEQ ID NO: 111022 - protein, 102 aa, Oryza sativa
  Clone ID: PAT_MRT4530_15039C.1.pep
RRLRLQAVNRWPPPSLTNGETLDGVGVNGVSGWSRCYFARFHGPHLQGNGWAPPGGPTRSPEGPRAYGPPAAAASDGGSSFCFSFSFLFLLSVTIISYLSFC

SEQ ID NO: 111023 - protein, 145 aa, Oryza sativa
  unsure (1)..(145): unsure at all Xaa locations
  Clone ID: PAT_MRT4530_1503C.1.pep
EIRICLFWNGPPKCGVRISFTXVIRFGYAEKRSCKHPDXSVLISIYKLSRRLXRNTRNQSRVCLLLCIAPLLVVYSIPLVDVHRQSGEQVSKTSAFDVLHREKVAIRFLGSASRDCSLFEHNGSSSCSFAYCAPSSTSATASNSC

SEQ ID NO: 111024 - protein, 179 aa, Oryza sativa
  unsure (1)..(179): unsure at all Xaa locations
  Clone ID: PAT_MRT4530_15040C.1.pep
MWSHLSYVQMKFQGKRSLSARTRNRTPGQRGAADRGQLDPVAAEVAPTWRLRGSYVGRREEDDDVGWNGRRTAAASGGAIYSDASKGERTGRLHGTRGDEPTARIRRGMLDGGGLRRRHPAARKGGNGDVATGVRFLRTRASTRPPESVSSVGLGGATPSEAGDERXLPSSGGDVGEHI

SEQ ID NO: 111025 - protein, 74 aa, Oryza sativa
  Clone ID: PAT_MRT4530_15041C.1.pep
WVGSGPEFLISLANHGEWKGAYTVFGSVVPEDMAIAEEMALLSTSTDVWSNVTVKVLRDPVYFKVKRSTSSGVP

SEQ ID NO: 111026 - protein, 121 aa, Oryza sativa
  unsure (1)..(121): unsure at all Xaa locations
  Clone ID: PAT_MRT4530_15042C.1.pep
ILNDTFNNLLSVLECXCEVRECDDDTTSSDMTMTNLCIHQPNHQLQTDLAADLKEISRTISTCWKAYVVYFKMVLVPSQNSHRTIRNLQNKARISLLGEVNRXNARLITRGDVLLLLQGSD

SEQ ID NO: 111027 - protein, 323 aa, Oryza sativa
  Clone ID: PAT_MRT4530_15043C.1.pep
MGEEEKVKEEAAAEKGKEAAVAEEKEAAAAGEEKKEDAPSTPPPPEEVVMRVFMHCEGCARKVKKILRGFDGVEDVVADSKAHKVIVKGKKAAADPMKVVHRVQKKTGRKVELLSPMPPPVEEKKEEEKKEEPEPPKPEEKEPTVIAVVLKVHMHCEACAQVIRKKILKMKGVQSAEPDMKASQVTVKGVFEESKLTDYVHKRIGKNAAVVKSEPAPPPENAGDANAKDDKKAAEGGEEKDESKEEKKEGDDEKEKEKEKDDSNAAEVEEKDKEKDPSALAAANLYMHYPRFSNPGGYGVPGYAYPYAPQLFSDENPNACVVM

SEQ ID NO: 111028 - protein, 114 aa, Oryza sativa
  unsure (1)..(114): unsure at all Xaa locations
  Clone ID: PAT_MRT4530_15044C.1.pep
PXXXFGXGXAFXRPXARXTPXTPGVPKRXXTFXASSXQSXAXQTXLAEGPXPXTQQXPRDTFSSFXDLLNRRXIVRCRQXKKQGRRNXVXFFLLMRQRRCGRLAXXRRCKGXXX

SEQ ID NO: 111029 - protein, 31 aa, Oryza sativa
  Clone ID: PAT_MRT4530_15045C.1.pep
QVQGVSILFSIMTVGFSPSPCVFHFQRDLVM

SEQ ID NO: 111030 - protein, 447 aa, Oryza sativa
  Clone ID: PAT_MRT4530_15046C.1.pep
MGEQVKLNDDKEEGGKEKNSKQVEEVAPAAEKKEEAAAAADAGSKEEEQVPPPPAPVILGVELHCTGCARRMRRCILRSKGVQGVEVDMGGNQLTVTGIVDPQALCARLRHKTLRNATVISPPPPPTSTEDQDQHQPSPRPPLVHSQVSDVTTVELLVNMHCEACAQQLHKKILKMRGVQTADTNLSTGKLTVTGTVSGDKLAEYIHRRTGKLATVVVPPPPKPKEEEEEKTNDDKPPPPPAAEADKKDEENKPAAEDGSSKLQNEAEGNANKEAAAAAEEEAPEEEKAAAIANNKQQQEDGSVVVEGFPPEEMMKRMHLYWPPYGHGYTSYYHHHHHHQGGQLLFKERPKSSPIGGNKTSCRCTGWSLEGEELRRTGIGGLGEGKGDARAVRVPLEAVASSTGSEPLGAEVVLHVYMGPPKNEGPVRVPIWHMPIDGLVDRQSSDN

SEQ ID NO: 111031 - protein, 82 aa, Oryza sativa
  unsure (1)..(82): unsure at all Xaa locations
  Clone ID: PAT_MRT4530_15047C.1.pep
PFGAGXRICPPPPLGVLPIQVMLANMVPEFPWVPPPGEGPPDPPETFAFPVVMKNPLRPALFKPRVGGELPPGGGGGAPASP

SEQ ID NO: 111032 - protein, 176 aa, Oryza sativa
  unsure (1)..(176): unsure at all Xaa locations
  Clone ID: PAT_MRT4530_15048C.1.pep
RIRTREXGTXTDRKXIXXDFHISXLXXTSNVGXSXIQKGGRKIXXDLHXXXKDGIXCKIXXLXVXDMXNYFRPXFLNXLDKXIVFRQLTXLXVRRMGXILLXEVFXRXKAQDXDLHVXEKXKDRIFHKCFXPXYXXMXLTRAIMKXXXDILPXKIWGSERRQSPLIPMGCDFFNCG

SEQ ID NO: 111033 - protein, 381 aa, Oryza sativa
  unsure (1)..(381): unsure at all Xaa locations
  Clone ID: PAT_MRT4530_15049C.1.pep
WRRRRGSRRTASNLPRRRXLDLTDELLEEVFVRLPTAADLARASTAFASFRRLITGHAFLRRFRRLHPPPVLGILAAGFLAAQPPHPSAAAARALADPDAADFSCSFLPSRDRWCLRHFSDGRYLLSAIPERSDPAPDHRALVREFAVCDPLYRRYLLLPPIPDDLASVVNQSEIVNFEPFLCPATEDEEDTMFRVICLAQCEAKLVAFTYSRCSGQWHAVEFDGWRDLTRGTSNPFEFSSIDLPPGPSSRRMVIVEALEGKLGLFTLCNDNALYYFLWYDILENDDEGALQWTFKLEWFCGTTYAIISPDMWLICTQLRLRLRHALVGLRRFELQGWLAMVEEKQNVVETNGLGGRTSVFYGVPPSVPRWNFHPIDPSSM

SEQ ID NO: 111034 - protein, 619 aa, Oryza sativa
  Clone ID: PAT_MRT4530_1504C.1.pep
MGAAFLSSWPWDNLGAYKYVLYAPLVGKAVAGRAWERASPDHWLLLLLVLFGVRALTYQLWSSFSNMLFATRRRRIVRDGVDFGQIDREWDWDNFLILQVHMAAAAFYAFPSLRHLPLWDARGLAVAALLHVAATEPLFYAAHRAFHRGHLFSCYHLQHHSAKVPQPFTAGFATPLEQLVLGALMAVPLAAACAAGHGSVALAFAYVLGFDNLRAMGHCNVEVFPGGLFQSLPVLKYLIYTPTYHTIHHTKEDANFCLFMPLFDLIGGTLDAQSWEMQKKTSAGVDEVPEFVFLAHVVDVMQSLHVPFVLRTFASTPFSVQPFLLPMWPFAFLVMLMMWAWSKTFVISCYRLRGRLHQMWAVPRYGFHYFLPFAKDGINNQIELAILRADKMGAKVVSLAALNKNEALNGGGTLFVNKHPGLRVRVVHGNTLTAAVILNEIPQGTTEVFMTGATSKLGRAIALYLCRKKVRVMMMTLSTERFQKIQREATPEHQQYLVQVTKYRSAQHCKTWIVGKWLSPREQRWAPPGTHFHQFVVPPIIGFRRDCTYGKLAAMRLPKDVQGLGACEYSLERGVVHACHAGGVVHFLEGYTHHEVGAIDVDRIDVVWEAALRHGLRPV

SEQ ID NO: 111035 - protein, 116 aa, Oryza sativa
  unsure (1)..(116): unsure at all Xaa locations
  Clone ID: PAT_MRT4530_15050C.1.pep
FWLIGENSPNFLPICFLILIQAERFDFEFFLQGMVRVPGIGLVYTDLTSGVPAIXYRFVTNLPAFHRVLVYVCVKSVPVPHVLSAERYLDGRVGPAGHRSNRCIVRHGFGDVHQDE

SEQ ID NO: 111036 - protein, 495 aa, Oryza sativa
  Clone ID: PAT_MRT4530_15051C.1.pep
MDRFAMPCQVSVDLVHRHSPIGVAMLLADRSVMAIQQPRALNYEGSRNHTQREREGATRVMEVFLVWRALVWLALITPAAALAQQEEAPGCRRRCGNVTVPYPFGIGSERCYRGGVRGFRLDCDDARRPPRLTVAGYGHEVTSISLAAAEVTVLLNASRACYGGGDYGRGRRGREEQPMSLNGSAFLFSSMKSKFVAIGCPGLAYFVDDGGDYVTGCMSVCRPSARALPGSCRGDDGCCQSNIPLGLASYRPRLRSFGRRQGGAFLANATACAYAFMVDAWWFWYAGSNFNRTGDFAVPVVLDWAIRPDAGSGSGSGSCAAASRTPLPSYACRSAHSVCIDSSNGPGYICNCTAGYHGNPYVVGDCTDINECEHKDEYPCYGVCTNTAGSYACSCPKGSSGNASVEGGCRRDDKFTLALKTVTGLRVRHTLYPSIYVTYRHGIPTRTRIFPTYPKENFHEIYRWEESFSDRTGSSTYRIGSDISESYLETSRSVI

SEQ ID NO: 111037 - protein, 102 aa, Oryza sativa
  unsure (1)..(102): unsure at all Xaa locations
  Clone ID: PAT_MRT4530_15052C.1.pep
IPFTLRYTLHIDVAYPRACGYFLHILRKPFTKSTDGKNPSRTELGRRRIVLGLISPSPTWRPPDLRYKRDPRXEGIGHRISEPTQPTQPTKPESTRSQVFES

SEQ ID NO: 111038 - protein, 614 aa, Oryza sativa
  Clone ID: PAT_MRT4530_15053C.1.pep
MGLHAILLLLLLRISASAAASRPPLDTLGIPPQDEAYFRGGVIRCRDGSGRFARDKLNDDFCDCPDGTDEPGTSACPEGKFYCQNAGHSPITIFSSRVNDGICDCCDGSDEYDSNVTCKNTCWEAGKAARDKLKKKVATYKSGVVIRNQEIQKAKVAFAKDEAELAKLKGEEKILQGLVDKLTEQKKLIEKAEEEERLRKEKEEKRMKEEAEKQAADEKKASDASQEVDSQENHETVQEDESKVAEHHDGHATSHDNHTPESESSVEQHDPESQDDISIKAAPADESPPEETSAAPTKEQESTPADSEGLSREELGRLVASRWTGEKVDEVSKDDKNEHEAEHDMPEHSEETHEDESDVPESAEDSYAGYHSEVEDDRHKYDDEDFSHESDDEYVDDHDEHVASYKSDDDQKGDDHSDFTASGQASWLDKIQQTVQNVLRTFNFFKTPVDLSEASRVRKEYDDASSKLSKIQSRISTLTDKLKHDFGKEKEFYYFYDQCFESKEGKYVYKVCPFKKASQVEGHSTTSLGRWDKFEESYRVMQFSNGDRCWNGPDRSLKVRLRCGLNNELNGVDEPSRCEYVAVLSTPALCDEQKLKELEQKLKASSNQRDHDEL

SEQ ID NO: 111039 - protein, 110 aa, Oryza sativa
  Clone ID: PAT_MRT4530_15054C.1.pep
MGGPIKAVLYLPNADRVGEFVKTRNAKWYLCGDANGLEISEEIFGHYVAEVAFGMHPRDPNYGKSGTCPILGLGLVQLSTSYPVQHQNRSGFGGESCSKNRVRIGCEGIG

SEQ ID NO: 111040 - protein, 57 aa, Oryza sativa
  unsure (1)..(57): unsure at all Xaa locations
  Clone ID: PAT_MRT4530_15055C.1.pep
NKXFVRXEPXGPXXPRXRRXXXXCXGREXRERRPSXRXVXVEIRPERLXRVAVTAWG

SEQ ID NO: 111041 - protein, 1207 aa, Oryza sativa
  unsure (1)..(1207): unsure at all Xaa locations
  Clone ID: PAT_MRT4530_15056C.1.pep
CGRFALILRWTRVLAELHRQKGAVGIFFPQIVPSFSPPPISRRTLTPSPPVAAAAMDDEIARAQEQRRNVEDDXLSSVPFDADLYGGVSDPDRFASYETSIAATAEDDDDDDDATEPVNPAARSLASYSGHAIASSSSGLPRAADEEGDGLRAREGEYHRRHPVRGMSPDRHDPFSAAETTPDPSTRTYADAMRDNQPAPATKRRNRWDQSQEDEGDGAAATGAKKAKTASSSSSSHWDAAPDAATPGIGRWDATPGRAGGATPSLKRNRWDETPTPGRMADADGTPAPSVAWDSSSTPTPKKQRSRWDETPAGVGSTAPRATDAVTPAGYAPGPTPFDAADLATPSPGQIARGPMTPEQYQLLRWERDIEGRNMPLTDEELDTMLPQVGYKILDPPASYQPIRTPARKLLATPTPLFTPLYAIPEENRGQQFDVPKELPGGLPQMKPEDYQYFGTLLNEGEEEEKLSPEEHKERKILKLLFKVKNGTPQQRKAALRQLTDKAQEFGAGPLFNKILPLLMQPTLEDQERHLLVKVIDRVIYKLDDLVRPFVHKILVVVEPLLIDEDYYARVEARQIISNLSKAAGLATMIATMRPDIDNTDEYVRNTTARAFSVVASGLGIPALLPFLKAVCQSKKSWQARHTGIKIVQQIAILMGCAVLPHLRSLVDIIEHGLSDENQKVRTITALSLAALAEAAAPYGIESFDTVLRPLWKGTKSHRGKVLAAFLKAVGFIIPLMDVEYASYYTRGVIPILIREFQSPDEEMKKIVLKVVKQCVSTEGVEADYIRNGILPEFFRHFWIRRMALDRRNYKQLVETTVEIANKVGVADIVGRIVEDLKDESEPYRRMVMETIEKVVAHLGASDIDRHQEELLIDGIVYTFQQQTSDDSNVILNGFETVANALGQRVKPYVPQICGIIKWMLNTSSAKARQRAADLMSRIAIVMKLCQEERLMCHLGHILYESLGEEYPDVLGSILGALKAIVNVVGMTKMTPPIKDLLPRLTPILKNRHEKVQENCIDLVGRVADRGAEFVPAREWMRICFELLEMLKAHKKGIRRATANTFGYIAKAIGPEDVLATLLNNLKVQERQNRVCTTVAIAIVAETCSPFTVLPALMNEYRVPEFNVRNGILKSLSFLFEYIGEMGKDYIYAVTPLLEDALMDRDLVHRQTAASAVKHMALGVAGLGCEDALVHXNLVWPNIFETSPHVI

SEQ ID NO: 111042 - protein, 70 aa, Oryza sativa
  unsure (1)..(70): unsure at all Xaa locations
  Clone ID: PAT_MRT4530_15057C.1.pep
GDGAGVHDEITMXIDVPSKLARXPSNIVRHXHTLTTTTXVLFRRQSKRQGLPTYKLGTNCKQIKASVQSX

SEQ ID NO: 111043 - protein, 163 aa, Oryza sativa
  unsure (1)..(163): unsure at all Xaa locations
  Clone ID: PAT_MRT4530_15058C.1.pep
GCGFGTRKTSPPRSTTPTPTLGGXTSPKXVDGXEPNDSISPXVLXLRSXVENLTXKSXLLEXDLEKTTXQLXEAIXIAGXETAKCXXAXEIXXXLTXXLXGXAXKLXKNRTGEKKXTAXLPXISIPTDXXXASENLGSPXILENXSNXSYGLLVSHGXTSLXN

SEQ ID NO: 111044 - protein, 140 aa, Oryza sativa
  unsure (1)..(140): unsure at all Xaa locations
  Clone ID: PAT_MRT4530_15059C.1.pep
MSASSLLSPMETYLCAAPLTLVGMTXRAGREVVAALARGRGRELVVXGGGAATSLPVNILNWPNILGVEYSGKGXQARTRRGGRWMSAATRSSTGAGAGPXLLSLERTAASFSVHEGTSRTLKDHDLCLVRNAIWEKTGF

SEQ ID NO: 111045 - protein, 1028 aa, Oryza sativa
  Clone ID: PAT_MRT4530_1505C.1.pep
MAPRKLNPTSAKGPDPGRVDDDSTAFLGVSLVDDVELAKLVSSGALVKGQAFALGKTVVPKPVDNRTVVFTVFFEAGLWFPCNVLLPEILRLFQVELPQLSPSALVRISIFDWACRTSGFEPNAELFGAIFFASVNSKTVITPAGTKKTVFGSVNFNVRPERSDLWPVNAAMSKWDRHWMARWFYHTIPFEAGSESAKALRCQRRAIAPNRRPKIAVDGTMEARFVLLWKVCSRLSCRDLVEEFCMLRIFPLSQSWQVAVEQGEEVDGLPNLILPEGANMLTLDQAEVEACRMSDDVSVVEYSQLLTRQAAGRANRVYNGELPPRVNPQKDDDEAGPSRKRMRGQVKLAPSKRRVPASSDSDADDKDDAEERDGEEEGEEEEEVEAVADKAASEAVEDRVDTPGYTPTPSPGHNETGVESNSSPLRRKDLEGAKALVAFSPGVAAKGGPVKKVAKKKGLVDVARVFSDDESSDGTPTSPAGRSLDLSAAPIPPFGATGVDGSTAAGASASVERIVTAAAKVFGSPPPQPVASPLIEVKGKRAVAETSASEYSLSVPRFAPSDFETRADLLPFVEGVSNLVLPASAPSLFTELNEFDEGCSAIKSLAVRILAAHCSTERTVRARLDGFKSRLRAKDDELGRKNLEMEALANTLKEAKAENKRHQSELEKGKEAWAEVYGLKAELEKEKAHSAVLIDYYNLTEPKMEALRQKASRAEASAAEQSQRFSREMAKITESARTACQTLRLALTDMGAKVRGVPTEDASAFDFSEWTQQAGRSVSDYATAYGDCCARVSAAFTMGLLQQFGCEHIAEFPKYTKRDWEISAQDISPALRAWRKQFWQKDGRSAAKARLLEQLAKAEAADLCEEEGAAAGGGRGDAQDHPEGVRRKSCIRPPSGSWRSQNKKFVALKGLPKTRCPFRLVYREMEINGRSYKVIKVANWLRVHPGRTLEDYDLVHSRRLEDMARFWRNHQKTKRQELISQRRYSLVCVSPPTPLKVVYDISSDDEPSSSDHSLGRDNDYWGENVIYL

SEQ ID NO: 111046 - protein, 397 aa, Oryza sativa
  Clone ID: PAT_MRT4530_15060C.1.pep
MSSSLGPYSSIPTSSVTVASVPSSSSAASSSSGYGAPAEHGEAVQWTSWPDAQLQPAPARAEQTTGGATTPTTRAHAGFFVLFFFFFCFHPRDPTPPTTSVSLASSSSRSTATSYHLEASGSFGKEAAPRAALPGLAMPEEKEYAPVPLGQAPEAVDPEDPVKSPPRPTSPANSTRKACFAVLQSWVSRKFMTGCVVLFPVAVTFFITWWFVKFVDGFFSPLYAKLGFDIFGLGFLTSLLFIFLVGIFVSSWVGSTVFWIGEWFIKKMPFVRHIYSASKQVSTAVSPDQNTTAFKEVAIISHPRIGEYAFGFITSTMILQTDKGDEELCSVYVPTNHLYIGDIFLVRSEEIIRPNLSIREGIEIIVSGGMTMPQVIAAPGQTPHKGQSTRLNRMMSA

SEQ ID NO: 111047 - protein, 96 aa, Oryza sativa
  Clone ID: PAT_MRT4530_15061C.1.pep
VTATTAAAMISILAQERLLGFALGSVSMGGFVLHQRRAIYRSLADADAVAAPSPFSSYQPSETRSRTSSTELAHVWNKGVDETLGRLVAYLSSRGW

SEQ ID NO: 111048 - protein, 72 aa, Oryza sativa
  Clone ID: PAT_MRT4530_15062C.1.pep
ELATALSSILQSLLLLRSIRMGKYIWCESYDFRCSFGRMQCRCHNVCRCKSSSAQVLVFWAVVCVMERGLTF

SEQ ID NO: 111049 - protein, 40 aa, Oryza sativa
  Clone ID: PAT_MRT4530_15063C.1.pep
VFGQGPQLFSVFFKGGPFRLGKPPLLKVGGFRPGNRFSGR

SEQ ID NO: 111050 - protein, 178 aa, Oryza sativa
  Clone ID: PAT_MRT4530_15064C.1.pep
MDEKTNFITCHKTLSSKSSPRLVVRRRRRRSNAVGGNNKFLINHPIKESILKAENLPFPSVHKMEELTFKSAIDNPNPKQISSLVVRQDFRSHITGWSLSLPLVLHPMGVLVGEGVLFKSELEIWGCGVKVGDAGWAVPAPPDLDLPRCEPYFGLGPFYFYLAQSSKLVIWHFHVLSQ

SEQ ID NO: 111051 - protein, 87 aa, Oryza sativa
  Clone ID: PAT_MRT4530_15065C.1.pep
MAIKDRFTGSPGRLTVLTTSGSAAGFTAAHEETAHCLLRGGDKYYNSLCPSYGFDVGVLCPSYGFDVGVLCPSYGFDVGVISEDNDL

SEQ ID NO: 111052 - protein, 329 aa, Oryza sativa
  unsure (1)..(329): unsure at all Xaa locations
  Clone ID: PAT_MRT4530_15066C.1.pep
MAAAAAAGAGADEEVDFEFFPIIRRYKGGRVERFMNIPPLPAGTDPATGVTSKDVVVDPAVGLWARLFLPPGGGAPQGKLPVVVYYHGGAYVVGSAADPFTHSYLNGLVAEAGILAVALEYRLAPEHHLPAAYDDSWEGLRWVASHANGGGGVEPWLLEHGDFSRVFLAGASAGGNIAHYVAARAGEHGGLGLSIRGLLVVHPYFSGAADICAEGTTGKAEKAKXDEFWRFIYPGSPGLDDPLSNPFSDAAGGHQRGXVAADRVLVCVAEKDSLRDRGVWYYESLKASGYAGEVDLLESMGEGHVFYCMDPRCERAREMQARILSFLRK

SEQ ID NO: 111053 - protein, 61 aa, Oryza sativa
  Clone ID: PAT_MRT4530_15067C.1.pep
MLSLQSKCGCAAGASHAGFLPVQEDGTPLFGGSLPPPFPSPCTVGKSSHQQSLHLVSSLQP

SEQ ID NO: 111054 - protein, 64 aa, Oryza sativa
  Clone ID: PAT_MRT4530_15068C.1.pep
LWMCCELVEQLGSFSASSLISKHAAAVYMTIMGSIAIYIWDYIYIYPPMQQVHLISAFWIVKKK

SEQ ID NO: 111055 - protein, 561 aa, Oryza sativa
  unsure (1)..(561): unsure at all Xaa locations
  Clone ID: PAT_MRT4530_15069C.1.pep
PSSKQSLITTTSSSRCLAQPLVDSTAXCELMSFLDAYSGYHQIYMNPADIPKTAFITPFGTFCHLRMPFGLRNAGATFARLVYKVLGSQLGRNVEAYVDVIVMKSSKGFDHTSDLQETFNNLRAAGMKLNLEKCVFGVRAGKLLGFLVSERGIEAIPEKIDAIQQMKPPSSVRQVQKLAGRIVALSRFLSKAAERGLPFFKTLRGAGKFCWTPECQIAFDELKRYLQSPPTLVSPVAGNELWLYLPASPIAVSAALVQETEAGQKPVYFVSEALQEAKWAAKLSPFDLHFVARTTIKSQVLADFMPEWTLASVPEPEPVKQPWVMHSDGSWSHKEAGITAILTSPGGIPIRYAVRLEFGTTNNTIEYEAMLMGLRKAKALVVRRSLVRTDSKLVASQVDKSFDAKEGMRKPNIMVIDQAFSPGVLFEALYTPSVPEDSPDIMVIDQAEXGEDPDDWXTSFVKHLKEGWLPDEEAXRRAAIQKFVWKNIMVLKEFITDNGKQFDSEKFKEMCEELNLQIKFASVAHLQLKHGAMTPAELGTNSPWVMFSGGEXGREVSLELV

SEQ ID NO: 111056 - protein, 243 aa, Oryza sativa
  unsure (1)..(243): unsure at all Xaa locations
  Clone ID: PAT_MRT4530_1506C.1.pep
MAAAAFYAFPSLRHLPLWDARGLAVAALLHVAATEPLFYAAHRAFHRGHLFSCYHLQHHSAKVPQPFTAGFATPLEQLVLGALMAVPLAAACAAGHGSVALAFAYVLGFDNLRAMGHCNVEVFPGGLFQSLPVLKYLIYTPTYXHDPSHQGGCQLLPVHAAVRPHRWHPRRPVLGDAEENQRRPVSRHPRRGREADEWTVWCGVGVCKGGRGAGVRVPGARGGRDAVAARAVRAADVRVDALL

SEQ ID NO: 111057 - protein, 215 aa, Oryza sativa
  Clone ID: PAT_MRT4530_15070C.1.pep
MARSKLPLLLVLAVVTAAVSSAWLPSPASAASDAAAGGEYCRDSLSGLLACRDFMFGGAAAASPACCAAYSAAFDADPFCLCYIADGVYGRSTGYDVNVTHALEIPVSCGLATPPIELCNTQGLVLPPYEPSSPQQPPSAGKLAESPAATPAQSPTAAPSLPQAPKPSSPPPFTSPSPLPPPPPPPTSHGARGATMGIGTVAAAVAMTTLLALLS

SEQ ID NO: 111058 - protein, 200 aa, Oryza sativa
  unsure (1)..(200): unsure at all Xaa locations
  Clone ID: PAT_MRT4530_15071C.1.pep
MATSEEVVAAAPEAAAPEAGLKHKLERKWTFWCDNQSKPKQGAAWGTSLRKVYTFDTVEEFWCLYDQVFKPSKLQINADFHLFKTGIDPKWEDPECANGGKWSITSNSGRKANLDNMWLETMMALIGEQFEDAEDICGVVASVRQWQDKLSLWTKTAANEAAQMSIGRKWKEIIDVNDKITYNFHDDSRSXGSTKGRYTV

SEQ ID NO: 111059 - protein, 37 aa, Oryza sativa
  Clone ID: PAT_MRT4530_15072C.1.pep
LPTPNILESPPPMPRFSGFNKFSLAIKSYLNWARIYG

SEQ ID NO: 111060 - protein, 100 aa, Oryza sativa
  Clone ID: PAT_MRT4530_15073C.1.pep
LKGGKTTQYGQELHCDLSKLLSADWIMDTQVHFGHQLKHLESQCMDDNARWLLNHNTSCEFQKDCQHTMAAQCVVGNLTMLVILHPATCWHNSHQEYSTW

SEQ ID NO: 111061 - protein, 40 aa, Oryza sativa
  Clone ID: PAT_MRT4530_15074C.1.pep
MAGCTEATIVGIGRGRSERQRGANSGKEFKIAYMAPLTVF

SEQ ID NO: 111062 - protein, 61 aa, Oryza sativa
  Clone ID: PAT_MRT4530_15075C.1.pep
MVVGSGGSATPALGSDDGGQIRRPRPRKQQWPAYHKGLRRTCRNESTIVRAKRSSEALIDA

SEQ ID NO: 111063 - protein, 40 aa, Oryza sativa
  Clone ID: PAT_MRT4530_15076C.1.pep
FYGEGYDYSDKRILRMAIIIKQLGWNLKTPVKGLVKITLS

SEQ ID NO: 111064 - protein, 236 aa, Oryza sativa
  Clone ID: PAT_MRT4530_15077C.1.pep
RGGRGGRGDGGGGGGGGGGENPRAGGGAVREGVQGHRGGGLRRRRRLPQPRPRDQGCTSWRTCSGMCYAHILSMDVPCYTKLRMRLSACEGEIEQLSGILSELEKKLEDLEQAMSTPSSVMDEIMKRIASKAGGEQNATDTMPAAASFNSSSQMAGSSNGFDSSTLSTAATTGSTGSTVTDLGVVGRGIKRANIKPISAEPPPKRAAADSLSVKGDSSNNSDVHTPAQEGDDSVSK

SEQ ID NO: 111065 - protein, 93 aa, Oryza sativa
  Clone ID: PAT_MRT4530_15078C.1.pep
SIPLSFIPTAPASSLLPRRLLVSTASYFHPSKRMDIPFSPSSFHCHPTPGALIRATPLEFAVSPVPEKKGRSPELQDKGLQHESQSTSSDPKL

SEQ ID NO: 111066 - protein, 38 aa, Oryza sativa
  Clone ID: PAT_MRT4530_15079C.1.pep
MLDAGIHGYVSVKRVVLASVSTYCSQHAIRTVIIVSKP

SEQ ID NO: 111067 - protein, 839 aa, Oryza sativa
  Clone ID: PAT_MRT4530_1507C.1.pep
MAPRKPNPTSAKGPDPGLVDDNSTAFLGVSLVDDVELAKMVSSGALVEGQAFAPGKTVVPKPVDNRTVVFAVFFEARLRFPCNVLLPEILRLFQVELPQLSPSALVQIAIFDWACWTSGFEPNTELFGAIFFATVNSKTPVNAAMSKWDRHWMARWFYHTIPFEAISESAKAFRCRRKAIAPNRRPKIAVNGTMEAWFVLLRKVCSRLSCRDLVEEFCMLRIFPLSQSWQVAVEQGEEVDGLPNLILPEGANMLTLDQAEAKACRMIGDVSAVEYSQLLTHQAAGRANRVYNGELPPRANPQKVDDEAGPSRKRTRGQVKLAPRKRRVPTSSDSDADDEDDAEERDGEEEGDEEEEVEAVADKAASEAVEDCVDTPGYTPTPSPGHNETGVESNSSPLHRKDLEGAKALVAFSSGAAAKGGPGKKVAKKKGLVDVARVFSDDESFDGTLTSPAGRSLDLSAAPIPPFDAAGVDGSTAAGASASAERIVTAAAKVFGNPPPQPVASPLIEVKGKRAVAETSASEYSISVPRFAPGDFETRADLLPFLEGVSNLVLPASAPSLFTELNEFDEGCSAIKSLAVRILAAHCSTERTVRARLDEFKSRLRAKDDKLGRKNLEMEALANTLKEAKAENKRLQSELEKGKEVRAEVDRLKAELEKEKAHSAKASRAEASAAEESQRFSREMAKTAESARTACQTLRLALTDMGAKGRGVPTEDASAFDFSEWTQQAGGSVSDCATAYGNCCARVSAAFTMGLLQQFGCEHIAEFPKYAKGDWEISAQDISPALRAWRKQFWQKDGRSAAKARLLEQLAKAEAADLCEEEGAAAGGGGGDAQDHPEV

SEQ ID NO: 111068 - protein, 80 aa, Oryza sativa
  unsure (1)..(80): unsure at all Xaa locations
  Clone ID: PAT_MRT4530_15080C.1.pep
MPRGRKSTARVQAGAAGADACDKTLEIMRKFSEQCGRRFNTLLXYEKCDTAVGIKGLAEHKDQLGAPICPWRXYDDIAAE

SEQ ID NO: 111069 - protein, 103 aa, Oryza sativa
  Clone ID: PAT_MRT4530_15081C.1.pep
MATAKKHKATTSFSMELPLRLHLPPELAIGASPKNQLLFKPHAAAAAVERRLISRPDLGSWKAGQGSEEVKLDWWRDLDGLLTANSELEYEATLNVAPVQGRA

SEQ ID NO: 111070 - protein, 123 aa, Oryza sativa
  Clone ID: PAT_MRT4530_15082C.1.pep
ASPAAAAGVGELLVGVLVGVLIYLTWLLPLYSSYLFFGSFFGLVLVRLLFCNEGAEGACIYVERGGNGNSAERLGRMGKQPFWKGGRRCPFLNEAVQAIFFRNFSGALFQGLARKFTKIGTLA

SEQ ID NO: 111071 - protein, 789 aa, Oryza sativa
  Clone ID: PAT_MRT4530_15083C.1.pep
GTASRVAGEEVSSTHALCHRTNEVRRQGFRAKRFRPPTPFAIVPIWHGVKGCGQRGFATRQTLRHSTNEVRRQGVRANRFRPPTPFAIVPMRFRQPTSFAIVPIWHGVKGCGQRGFATRHILRHSTNEVRLQGLRANMFRPPTPFAIVPIRGLQSHPSLCTPFATRHALPHSTNKARRQGLRTNRFRQPTPFAIVPIWHGVKGCGQRGFATRHTLRHSTNEVRRQGVRANRFRPPTPFAIVPIWYGVKGCGRTGFATPTPFSIVPIRYGVKGLRAKRFRQPTPFAIVPIWHGVKGCGRRGFATRHTLRHSTNEVQHQGLRVNRFRPPTPFAIVPMRFPQPTSFAIVPIWHGVKGCGQRGFATRHILRHSTNEVRLQGLRANMFRPPTPFAIVPIRFRQPTPFAIVPIWHGVKGCRQRGLPHAIPYAIVPMRYDVKGTHFATRHALRHSTNKARHQRLRTNRFRQPTPFAIVPIWHGVKGCGRRGFATRHTLRHSTNEVRHQGLRVNRFRPPTPFAIVPMSRPSRWTPFATRNALRHSTNKAQRQGLRANMFRQPTPFAIVPIWHGVKGCGRRGFATRHTLRHSTNERQGLRANMFRQPTPFAIVPIWHGVKGWLRANRFRQPAIPFAIEPMRVSGEEVSSTHALRHSANKARRLGLRANRFRQPTPVAIVPIWHSVKGCGRRGFATRHTLRHRTNKARRQGLRANRFRQPTPFAIVPIWHGVKGCGEEVSPHAIPFAIVPMRAAGEQLLPHAMPFAIVPIRYGAKGCGQTGFATPMPFATVPARYGDKD

SEQ ID NO: 111072 - protein, 85 aa, Oryza sativa
  Clone ID: PAT_MRT4530_15084C.1.pep
MGVSHGAGGPAHQLTARCFHPHYPFITGETPLFPVVAASTLVWEGKKICKMKARVISSKRVFRSRGVQTFDMTGYKIFVCELNRT

SEQ ID NO: 111073 - protein, 86 aa, Oryza sativa
  Clone ID: PAT_MRT4530_15085C.1.pep
PAYPVQISAKGVVSKALIFPIFRARKRSEARKREQLRRGEEETNTGKEAKKTDRTRGLLIYQEKERGRAVAEGIVGTWVSGCKRIA

SEQ ID NO: 111074 - protein, 106 aa, Oryza sativa
  Clone ID: PAT_MRT4530_15086C.1.pep
LFFFLLAPAMIPSFQLQASAVPLKKKALRDRVKRLNHAKLVATRGHELPDGPKNLPVGCLVTFQVCWEFYFSSVRYVYIVQCTEIVIYMRACCLQLCKEMSVATKC

SEQ ID NO: 111075 - protein, 249 aa, Oryza sativa
  Clone ID: PAT_MRT4530_15087C.1.pep
MAVLTGKRHGVGFGGGIQWKRGGRGGPHDGERDGVVGRLGAAASGDRSGGGGGEEEGDGARALEGSRGLGEMGKKREGWRWCLNRGGGARTWPVEAGIAGRRGEVEEEREAGFAFRIPAVSGAGAGEREGEWVRETWRMRGRGRHGLEEAGTWARRRLRALNSQGAGTGFILTSLTGDQFKHAIHLNFRATNNTAEYKALLVEIKAAAALGSKQLIMKGDSELVVNQVHKDYKCSNPELAKYLVEVRKL

SEQ ID NO: 111076 - protein, 85 aa, Oryza sativa
  Clone ID: PAT_MRT4530_15088C.1.pep
FFFFFFHVNISIHLPRNFSHSICKQIQDKVRTSQANKKIGTPPSSATALLSIVGAPPPCPLLLLLLVLLPASSKPEVPVAKGRGG

SEQ ID NO: 111077 - protein, 260 aa, Oryza sativa
  unsure (1)..(260): unsure at all Xaa locations
  Clone ID: PAT_MRT4530_15089C.1.pep
MAVTRVAAAVDRVHGXGKDGAPRGADVAPTRRPHGSHVGGRTDSSSGRSDGERGSRPARAGTAQAGPAAMARGGMARVQRRRKAATGGGGRRRRDDAGDEAAAKQLSGGAAASGAGERERGRGGGISPTTTDDGERRRTAATAGLSPEPPSEHGXKGLERERELEEGEDAGRRRRPWRCSPANGAEWVPAAGSNGRGVDGVARTTANAAASSARLGAAASGDRSGGGGGEEEGDGARALEGTGGLGEMGKKREGVAVELK

SEQ ID NO: 111078 - protein, 98 aa, Oryza sativa
  Clone ID: PAT_MRT4530_1508C.1.pep
MASVQAAEMSVTGLFACPGSSPAQGHDTQGLACGVAEVLPTNKLAHQGGHRYAKWPSLCRTTRGTPVTGKQSPMVGTKCVRERRLGHRWIGFTDEIPM

SEQ ID NO: 111079 - protein, 53 aa, Oryza sativa
  Clone ID: PAT_MRT4530_15090C.1.pep
VKAAQQAQPQAGVFYWTREFLDETAKEDRPARCTLTNTASHSHPALEATARPT

SEQ ID NO: 111080 - protein, 259 aa, Oryza sativa
  unsure (1)..(259): unsure at all Xaa locations
  Clone ID: PAT_MRT4530_15091C.1.pep
AGRRAPGRAAPAPGPPPAAAPARGGPRRAPRPARAGRPAAGPGAPGRRAPPGAAAAAATAPPPPAPTXPGARPHPAPAPGPPPARQPRGARAADPARAARAPPGAAARRARPPPRPAPPPRRPPRAGGRPARPRARRAAARGGPGARPPPARPGARRAPRRPAARPPPPPRGPRPRAPRPXGPAPAAAAPPRAPPPPRPPRGGGGISVPPFSASSFSSVDFSSMRFSTKLPDVPTPPTRERAIRRMVPGWQGGGHEGWV

SEQ ID NO: 111081 - protein, 462 aa, Oryza sativa
  unsure (1)..(462): unsure at all Xaa locations
  Clone ID: PAT_MRT4530_15092C.1.pep
MGIFVFTDRSPSSPPIGVSAYMVGWLYHCLWASTSSLSAXLRRRRLLFLPIRLVSYTTVDGCLRLHRQLAFVAVDWCPRLHDWLVTLSLMHIYVFITDLLSSPLIGVFACTTGLLCHRGWPSLYSQPACLYRRRLVPSPSWLDGYTIIDGHPHLHLQSLHLPPWLVLSPALQEWISXNITTGSPSLPPTDVFAYTVDWSHHCYSASTSSPTGRLVRRXLVSPPTWLVGHTTVVGRQCLHHRPAFVAADRCLPLHGWLVTPPLLGIYIFTEQPPRAPPTGAFVYTVGLSHYRCWASTSLPNGRLVRRQLXPARLVGHTIVVGRLHLHRTAALFSADWSLRLHGWLVTAPLLGIYIFTDRPPRPPPSGVSAYTVGWSHHRCWASMSSPTDCLCHCQLMSPPTRLVGHTAVDRRLCLRRWLSLCRRRPWCLRFHGWLIMPLPMGAFVFTGVIVFTTTHIFVNSDE

SEQ ID NO: 111082 - protein, 101 aa, Oryza sativa
  Clone ID: PAT_MRT4530_15093C.1.pep
QDRTGNPGLRHPRLRPHAAAGGDGCSSRPNAPTPRNKATRTNATRKQRRTPSRTTQRVSQRTTATRQHHRDRRHRANDPHSRPQHQAPQRTGRDTRRQEGG

SEQ ID NO: 111083 - protein, 111 aa, Oryza sativa
  Clone ID: PAT_MRT4530_15094C.1.pep
PFGLSEGVLMSPRGEGPGFSLSARKSWVRLGGFFKTVNGFPRVVLVMHPLFTGWGPPPVKMTPEFFCWPHHAQAWVFCWGGRPAELVVSGALGCPQFFWLTFCRILVSISG

SEQ ID NO: 111084 - protein, 45 aa, Oryza sativa
  Clone ID: PAT_MRT4530_15095C.1.pep
PRNRLRFPGVTAFSSLVTARSLVARQFKVAPSPTGRCCLVKKERY

SEQ ID NO: 111085 - protein, 161 aa, Oryza sativa
  Clone ID: PAT_MRT4530_15096C.1.pep
CNRKGARVAPPTPTTSPDLARHSPILKPPPLDPGGGRPPSPDRARDSPAEPVARRWRRPSSSLAAGAGRRRRPSLEEAGGTPPPAARHTEEAQAGDRPPPTCNRRSTACRTRRPSSSRRLETPWPYAIVGRTMTSSMNLISDVAFAVASCVRLPMTRLGTT

SEQ ID NO: 111086 - protein, 48 aa, Oryza sativa
  Clone ID: PAT_MRT4530_15097C.1.pep
MESNEASELVNMTAQQSVKGMATGGGEGSSGVGAAMNGWATNESDDDN

SEQ ID NO: 111087 - protein, 87 aa, Oryza sativa
  unsure (1)..(87): unsure at all Xaa locations
  Clone ID: PAT_MRT4530_15098C.1.pep
QPXCHASLLHHTIYNKXTSPQIHIKIYTXHXXSPGGDHPSFSPYLXKINFXMFPIFTITLAKSAPNNSXFAAYYLTSPSFDPPFNNT

SEQ ID NO: 111088 - protein, 211 aa, Oryza sativa
  Clone ID: PAT_MRT4530_15099C.1.pep
MQAILAAAMAAQTLLFSATAPPASLFQSPSSARPFHSLRLAAGPAGAAAARALVVADATKKAVAVLKGTSQVEGVVTLTQDDQGPTTVNVRVTGLTPGLHGFHLHEFGDTTNGCISTGPHFNPNNLTHGAPEDEVRHAGDLGNIVANAEGVAEATIVDKQIPLSGPNSVVGRAFVVHELEDDLGKGGHELSLSTGNAGGRLACGVVGLTPL

SEQ ID NO: 111089 - protein, 195 aa, Oryza sativa
  unsure (1)..(195): unsure at all Xaa locations
  Clone ID: PAT_MRT4530_1509C.1.pep
SAMFRSSSNLTEPKMQSLRQKASRAEASAAEESRRFSREMAKTTESARTACQTLRLALTDMGAKVRGVPTEDASAFDFSEXTQQAGGSVSDCATAYGDCCARVSAAFTMGLLQQFGCEHIVKFPKYTKGDWEISTQDISPALRAWRKQFWQKDGRSAAKARLLEQLAKAEAADLCEEEDVAAGGGGGDAQDHPEV

SEQ ID NO: 111090 - protein, 80 aa, Oryza sativa
  unsure (1)..(80): unsure at all Xaa locations
  Clone ID: PAT_MRT4530_150C.1.pep
NYLFSGALPSAGGALXSFKAENNQFSGALPDDMSRLANLTELILAGNRLSGSISSPITSLTMPTPLNLSRNPISAENLSF

SEQ ID NO: 111091 - protein, 391 aa, Oryza sativa
  Clone ID: PAT_MRT4530_15100C.1.pep
MRGTRHGTADKEGRDLKGHPVQIPPPNVGNARMTYIVKRRKYFYLMGYLYKGSIFFCAFPYFHYGLYRKNGFGPHECDDSNNDDITDCIDNIDDMSQEDTCGSSDTSGNGTAEDIAEGNGSISVKPPKFQKGVLRTNCIDCLDRTNVAQYAYGLAALGHQLHALGSIESPELDLDSPLAHHLMHFYERMGDTLAVQYGGSAAHNKIFSAKRGHLKFAIQSQEFFRTLQRYYSNAYMDAYKQAAINLFLGYFQPCEGEPALWELEPVAGEGVLGENASSSDAINEISSAPDNTVTVSKSRYTPTEPHVKHVSCELDYCNGSGDSNFLDIDWLSSSDNERPTTISTPDVNASADSVSAGVSSRRTEDHAAEIQAQGLSEHFVQWIDQGETFWF

SEQ ID NO: 111092 - protein, 385 aa, Oryza sativa
  unsure (1)..(385): unsure at all Xaa locations
  Clone ID: PAT_MRT4530_15101C.1.pep
MVLADIRRRSREIDLLPDDIVSDLRASACVAVYSLGLSILRKKKKQKRRIFQSGTSPTLCLPSAALRRRMQAILAAAMAAQTLLFSATAPPASLFQSPSSARPFHSLRLAAGPAGAAAARALVVADATKKAVAVLKGTSQVEGVVTLTQDDQGPTTVNVRVTGXLTPGLHGFHLHEFGDTTNGCISTGPHFNPNNLTHGAPEDEVRHAGDLGNIVANAEGVAEATIVDKQIPLSGPNSVVGRAFVVHELEDDLGKGGHELSLSTGNAGGRLACGMFSESYFCSINVLVTCCWADPVVGRCKLQLKCQYRIHVTLFVIFEPEAVVLRWWRWKCRQIHAWIWRGGDRRWGLLVAAATATPGGAEVGEVRLRDGRIRLDDDRRRWVHP

SEQ ID NO: 111093 - protein, 57 aa, Oryza sativa
  Clone ID: PAT_MRT4530_15102C.1.pep
RCCPATRNIAFASTAVDHRSPPIAINRHGAVVFLHGVSPIYGLGCESGMMGREVRWA

SEQ ID NO: 111094 - protein, 383 aa, Oryza sativa
  Clone ID: PAT_MRT4530_15103C.1.pep
MGSVSLNVPAPRRGGGRRISCHCTPSLLNLLMFLALLSTNALALLAFFSSSSSSSSSPAASAATAAASTISDHVAAIAREIDTSSSSHLPYRADGLPPELLLFLSPHALPLGRDARTGLTHMPASVAHSCFRSPATLSLLAAFMSYDPHAACPRNATLQQHRLLSKACEPLPRRRCLSGGPRAALPASNMGVDGRRWVRPRHDYEFLLDDVLRLGATRIRIGLDVAGGAANFAARMRDRGVTVVTTVLDNAGKPMNEFVAARGLFPLLLSPAHRFPFYDGVFDLVHVGTNALDEGGAPSMGNSGTEEALEFFMFDVDRVLRVGGLLWIDSYLCQSEERRQLVVNLIKRFGYKKLKWMVGEKAGTGSAKTALYLSALLQKPARD

SEQ ID NO: 111095 - protein, 143 aa, Oryza sativa
  unsure (1)..(143): unsure at all Xaa locations
  Clone ID: PAT_MRT4530_15104C.1.pep
PKXWWWQXXAQTXXVMVIASKSETWKVRWXRLWRWWLGSXRXKGPXXRITGVKXXARDTGIVDMAQVEEQXXHXNXWGGVGACGVVXXIRXNGVVXWXXRSEXTPTXRXSRRXTQQQQKQHAVVXXTWXSGKNXLXVHERGEA

SEQ ID NO: 111096 - protein, 75 aa, Oryza sativa
  Clone ID: PAT_MRT4530_15105C.1.pep
AHRGVTMRSRLVDDLNVKHVAEDYGIKATQSTALWYASGRSDRTLRVGVHTTSTSCWITYGDAHPTTMGRTDHSR

SEQ ID NO: 111097 - protein, 128 aa, Oryza sativa
  unsure (1)..(128): unsure at all Xaa locations
  Clone ID: PAT_MRT4530_15106C.1.pep
MAEVNPKAYPLADSQLAQAIQELVRQAGNYKQLKTGANQATKEXGRGIAEFVVMAADAEPLEILLXLALLAEDKSVPYVLVPXKQGLGRACEATRPAIACSVSSCAARCSSAPMLRSGRLWRRSYGVP

SEQ ID NO: 111098 - protein, 704 aa, Oryza sativa
  unsure (1)..(704): unsure at all Xaa locations
  Clone ID: PAT_MRT4530_15107C.1.pep
MSHLEGDKELDENGDGSTSKGTSTPKGASISFDYNKLTIPSHNFVSVPSLRSPQFDGTYYAAWKHKMKLXVHLISLHPSIWKVVCTCVDVPNEDMEFTTEQEKAIHLNAQAANAILSALSPEEFNKVDGLEEAMEIWDTLQLAHEGSPAVRESKIELLEGRVGRFVMDDKETPQEMYDRMMLLVNKIRGLGSEDMTNHFVKRLLRVFVPRNPILVSMIRERKDYKRLSPSDILGRIVSNEMLEEEARELKQMVKNAAMIKNQEIGLKANQEEMALIVNRFKHFLRKSGYGKGRKEDDKGKRQSKRACFKCGEYGHFIADCPKTNEAKHKVVKKKPDRAHVAEAHMAEVWYSGDEGSPKAMEKGDGDGGVATVAIKSSSTKERLFNILSDDDNDSYHHSCFMDHGRKVMPIQKPSLDDDNTSDEDSDNELDXMFKNFSKPAMKQLSKLMKALDSKERFLERQEDLLILEKKXNLALEEDLAKEGERIELLQYEISLLNDSMASLTSVNETLQEELVVLDKXHINLEVEIDTLRNSASSLNETPMTPMPSISVGCARCYNYDLSSYATNLEAMEALEKKNERLGTLVKYGCMKTYHSKDALYKTIATNPNKDGHELGFSDESPVSKRVVVNGKIFLMFVREGKAPQESEVTLPFVGQRPGASGQNVQNFLAPVRIIVLLAPGLAGPWPSAGPARAREGEGNGPAAH

SEQ ID NO: 111099 - protein, 68 aa, Oryza sativa
  Clone ID: PAT_MRT4530_15108C.1.pep
LIEFKIYIYIYFLGQCKNIFEICMCRLNYYHLLTKKFTYKIHKNSTKLLCEILLYTECMPCLILKYCF

SEQ ID NO: 111100 - protein, 231 aa, Oryza sativa
  Clone ID: PAT_MRT4530_15109C.1.pep
KKKKKKKPALHLNRATQTHTLPIPFLGLILAAAMASSLALVALLLVSCAVVAAAATKYTVGDTSGWAMGADYTTWASDKKFKMGDTLVFNYAGGAHSVDEVSAADYAACTASNALQSDSSGTTTVTLKTAGKHYFICGIAGHCSNGMKLVVDVAAASPAPAPKAPSTTPTTPSTTPATPASPGTSSGLTPTTPATVLAPPAKQSAGAAGLRARSWAMLGLAGLAAVQLGLF

SEQ ID NO: 111101 - protein, 141 aa, Oryza sativa
  unsure (1)..(141): unsure at all Xaa locations
  Clone ID: PAT_MRT4530_1510C.1.pep
MLLMLSLLLHLLIPSSSSATYTNHTGALPPAVPCLPDQASALLQLKRSFTITDDSTAAFRSWNAGKDCCRWEGVSCGDADGRVIWLDLGDCGLESNSLDPVLFKXNLPSAGFERLSKLTHLNLSSSNFAGQVPVQSIGQLH

SEQ ID NO: 111102 - protein, 137 aa, Oryza sativa
  Clone ID: PAT_MRT4530_15110C.1.pep
MASTVVAPILALSLLLFAVIVRGCTPNCSGEQVVPTPPTAVPTPLHHGGHGEHGRCPINALKLRVCANVLNRLVDVKIGHGPDDCCSLLSGIADLDAAVCLCTAVKANVLGIRVNLPVDLSLILNKCGKSCPSDFTC

SEQ ID NO: 111103 - protein, 210 aa, Oryza sativa
  Clone ID: PAT_MRT4530_15111C.1.pep
DGVASLATTDMQHLHGDVLESAVERVPAPDLAAAALVSREWLRAVRAALRRRMLRLPWLVVHVIHLRGQRRLAAAYDPRSGAWLAVPTAPPARHGATSPPQPHSHVRLMRGASGDRVCALSLSGLAVARDALGMDDDALVVALKAPGVWRVDPVLAAVGDRVVAMGGACRLALGDGEDTSAVEVHERGGWTHCGAVATALRESAAAAATW

SEQ ID NO: 111104 - protein, 84 aa, Oryza sativa
  unsure (1)..(84): unsure at all Xaa locations
  Clone ID: PAT_MRT4530_15112C.1.pep
MSFVISLTLLTIVNDAIIGNNLISSWFGMVYSWFGDRTVQLGWLYIMVGPIQQGMLYSVGLILFNXYSTVLLNSEKFVKCCFCK

SEQ ID NO: 111105 - protein, 821 aa, Oryza sativa
  Clone ID: PAT_MRT4530_15113C.1.pep
MSVPDENPIAVERKIFSAVDRILVNIKVLIGDIGSNLKKLPKQSDHSCNTGDDEFDDAVALRHIEVNIHAEQLGAGVNRFQDSIGTKHHAEEESMPSLAEQEDEPARPMSGLHVRRLLDTLDGQLMQCLLCLAIFPPGEAIKKRLLIHWWLGEGIVQSADAGKERFNELFDRGLVQPALRRGHCRRFWVMAKATSTNNAFLSVFNLDMEYVKIHIAKSRITRVVQLGRWKRSRKHHIELVGDNDLLKKVLACKNLRYLSLRGISLIESIPEAIGTLAELLVLDLRACHNLEKLPGSIGSLLKLEYLDLSECFLLEEMPKEIGELSKLQVLKGFLVGSSRKKSSPCRLADLATKAQNLRKLNITTGRQSLVCDEDELCQLAKCQHLESLTITWIGEASTEPYLPLPSSLTKLDLRRAPTASLLNIIHPSTSVSLKRLYIRGGKLRTLGQDGGWNVETLRARCLNDLECEWSELHGLFRELRFVEMWRCARLSFWPCDGRGVWDKGSPSLARRSIGVCYGVKGNNLPPWHEVVQLYASNNIPAMRIFYPHHDVLEALRGTGIGISLDVEGQFLPSFASEPSVAAAWVKTNVQAFYPAVSFKFITVGNQVALREMRYILPAMQNIYAALSAVGLDHIKVSTSVRRDVLGLSYPPSAGAFSSAMEQYMAPIVQFLAKIGAPLLASVFPYFTYVHNQEGIDIDYALFTSPGTVVQDGEHSYQNLFDAIVDALYSAMEKVGGSTVRIVVSDSGWPSAGAPAATKDNARAYVQNLINHVSKGTPKRPVPIETYIFAMFNENEKTGDEIERNFGLFEPDKSPVYPITFS

SEQ ID NO: 111106 - protein, 636 aa, Oryza sativa
  Clone ID: PAT_MRT4530_15114C.1.pep
MAKEEDGGGGPEFVRWREDFVSQERGSRVVHYYLEDAAGASHLAVVGTERSLRHMLYVVSEDFREAQGADGGGPGVFARKWRSRREVVDWLASFLPAKSLASKLSKFGSHMGNDIGLDGYSEPDSFMGHNLGKACSSDIMWSGSSWTCGKQLYHYKAFCRNGTTISTHSFVLVMSEEESRYLAYLEDMYEDKKGQKKVKVRWFHQNQEFACAIPPPPPHPCEVFITPYSQVISVECVDDIATVLTPEHYEKCVNTLPNSSMVGIRFCFRQYSKNKFKRFDLRSLRGYFSQAVVLSLKLPPEQEKDDGSDIIKTFEQWTPGKTKFPKQFERLYSKCLGTKICRGPQEDSIASYQKPSSKQSPRKHLSVKFIGPQNQRMPTYNVGDRIEVLSQDSGIVGCWFRCTVLKSCTNHNKLKVQYDDLQNADDSGRLEEWVPVSTLARPDKLGLRCPERRRVRPRPQQNSLADGTNLLPGAAVDVWQFSGWWEGVLVSADNISADSLQIYFPGENFFSVCQLKNLRISKDWVKSHWVDIEMKPDVLSKIPSVGVQTRQPDNLTSVERPDSRNSAMSDQELAAIQTNSSEDKQTGADQPAEVSLTDMASAFAEDQKQTVLGKRPRDDDAEQHCNGEVGIDVGKL

SEQ ID NO: 111107 - protein, 274 aa, Oryza sativa
  Clone ID: PAT_MRT4530_15115C.1.pep
MIHPLAVSLSTASHCCSLPSLHLQPPPQPYTSTIEEVAFSSGYFFGGDVSICKSEQDYLRSSAVADVLSCAYAVLLSSIGSGRSWSRGISIVRDVRDSFGSLSRRSFEVRISGLPGLSGHHRGKSLGSLSELRDRPVVVDQSRWVGLPPELLRDVMKRLEEGESNWPSRKDVVACAAVCRTWREICKDIVQSPEICGKLTFPVSLKQPGPRDGLIQCFIKRDKSKLTYYLYLCLSPAVLSENGKFLLAAKRNRRATSTEYIISVDSKNISRSSN

SEQ ID NO: 111108 - protein, 102 aa, Oryza sativa
  Clone ID: PAT_MRT4530_15116C.1.pep
MDLYVPSVYAWNTDASGAEAPSNDKIKNSLAAVLARFPHLAGRFFGVDEHGRRYFDLNDAGALVLEATASASLADALSHDVPAHVNELYPKADKVVYQNGNK

SEQ ID NO: 111109 - protein, 1005 aa, Oryza sativa
  Clone ID: PAT_MRT4530_15117C.1.pep
MGSGDGGFIILSLNCLPSLGILFTPCIPVNDAKQVFKRLRLFVGDFSSKYPLNQTSELAQGRHGEITGDWIGPLQNPDSGRLRHKPRRRRRIALQLRSPGLRASAPTLRWPFPRLLDAIAFRPLPCALACCGSSAPSVVRHLRACGSDVFFLRADAWRTVFVNTKAMLLNLPKAIIASGLLSLPTPLLSVSLPALPSEPFISPRSLGTGVVASYLACGATDYALLVLERVTPSPAVWWNLLIREHIKQGRLDSAINVSCRMLRAGTRLDHFTLPHVLKACGELPSYRCGSAFHGLICCNGFESNVFICNALVAMYSRCGSLEEASMIFDEITQRGIDDVISWNSIVSAHVKSSNAWTALDLFSKMTLIVHEKPTNERSDIISIVNILPACGSLKAVPQTKEVHGNAIRNGTFLDVFVGNALIDAYAKCGLMENAVKVFNMMEFKDVVSWNAMVAGYSQSGNFKAAFELFKNMRKENIPLDMVTWTAVIAGYSQRGCSHEALNVFRQMIFSGSLPNCVTIISVLSACASLGAFSQGMEIHAYSLKNCLLTLDNDFGGEDEDLMVYNALIDMYSKCRSFKAARSIFDDIPLEERNVVTWTVMIGGHAQYGDSNDALKLFVEMISEPYGVAPNAYTISCILMACAHLAAIRIGKQIHAYVLRHHQYDSSAYFVANCLINMYSKCGDVDTARHVFDSMSQKSAISWTSMMTGYGMHGRGSEALDIFDKMRKAGFVPDDITFLVVLYACSHCGMVDQGLSYFDSMSADYGLTPRAEHYAYAIDLLARFGRLDKAWKTVKDMPMEPTAVVWVALLSACRVHSNVELAEHALNKLVEMNAENDGSYTLISNIYATAGRWKDVARIRHLMKKSGIKKRPGCSWVQGQKGTASFFVGDRSHPLSPQIYALLESLIDRIKAMGYVPETNFALHDVDEEEKNNLLVEHSEKLALAYGLLTTFPGCPIRITKNLRVCGDCHSAFTYISKIVDHEIVVRDPSRFHHFKNGSCSCGGYW

SEQ ID NO: 111110 - protein, 109 aa, Oryza sativa
  unsure (1)..(109): unsure at all Xaa locations
  Clone ID: PAT_MRT4530_15118C.1.pep
FFFFFFFFFLKFKYEHVMYMFGLQNLTKISIKFRQNFDTISIRCAAAGGGKGADDVHVRRLHDRRRQQQLPAPPCTPSAAAXSRTARLRSLSRRXCTGHPXGPPPXTRA

SEQ ID NO: 111111 - protein, 284 aa, Oryza sativa
  unsure (1)..(284): unsure at all Xaa locations
  Clone ID: PAT_MRT4530_15119C.1.pep
MRAPHVIGXGRQSTVDXVHGTGEEGSTTWRTRGDHAGGRMDGPNXTRGGSDGGGGGTRPARTGPAQAGPAAMARGGAARXRRRSGSGAGGXRLGGXSGVGERERKGRKGEREIIEGGDASXRWRPWRSSPACGANGAPAAEIGGGGADSVALGLVNPTAAMARLGAAASGDRSGGGGDGEEGDGARAEEGTGELCEMGKNREGGAVRVSGCGEARGRRRRGRRGPGGTGEAGAAVAGAGRAGRRFGDGPGRWAHLSVTRGEEGLGRPAAGPSEVPLGSSEALPG

SEQ ID NO: 111112 - protein, 71 aa, Oryza sativa
  Clone ID: PAT_MRT4530_1511C.1.pep
LNIFIQWVLISRCLTHNEDRYCTTHPYYTRRYMLHPTGLIDPTQHNPPRKRVWKLTGAHVWTLYGTLTAHV

SEQ ID NO: 111113 - protein, 69 aa, Oryza sativa
  Clone ID: PAT_MRT4530_15120C.1.pep
FDEAFNHLSHTLAVLHGVRCRDCRLGKPCASHTRQWQAFLSPFYSLVSEHYCSSFVEDIWIKTIFFLFV

SEQ ID NO: 111114 - protein, 99 aa, Oryza sativa
  unsure (1)..(99): unsure at all Xaa locations
  Clone ID: PAT_MRT4530_15121C.1.pep
MEKRRFLGVCLLVAVLVLRAAVLGRGDDGGGGGRLLDPGKLEMFVDELPDMPRMRGYGVAEGGKLVAGNLTIGMYETMWXKFHRDLPATRVFAYGTSKE

SEQ ID NO: 111115 - protein, 89 aa, Oryza sativa
  Clone ID: PAT_MRT4530_15122C.1.pep
TQGAGLSNKRCTPYDQHLLCLATCSPRKPAARAPPIWPELKVSRRPAAVAVTDAAETTPVGPRSSAQRAHPQPADRRRTSGSGASEESE

SEQ ID NO: 111116 - protein, 147 aa, Oryza sativa
  unsure (1)..(147): unsure at all Xaa locations
  Clone ID: PAT_MRT4530_15123C.1.pep
TAPHPFLPPPPTPPLSPPPPRPWLWQPTSSLHVLRRRPPPAPRRXPRLAMPPPPPRSXASPLPPPSPVAPPPPPDLVEGSARRRRRPRPPGQPPPLPPDPAPAPAPAHPAXPPLLPPTGLPPPLLQPSSATPPVRQPTTPSSPPSTA

SEQ ID NO: 111117 - protein, 602 aa, Oryza sativa
  Clone ID: PAT_MRT4530_15124C.1.pep
MPTPGSSPVATAAAHRHRRSRRRHPQGPPPRQPWCCSFALDPLSAVHRSPAGTTTAAPPPHHRRRSKHAATTAPPLSRRMRSPGRVSPVDDATAYGGAAASASACSSARLSSVSECPPPPPPPLPRPRPPPPAVEALRIRLVSKGVILEVAEVERVRRECRVVGRILEGAGGKVAVEGKVEVKAIREPVEMMLEDADEAAAMRRLSRAGVARAIAVLEVSFSLMFDRGVTNCLKYLEAVPWSEPEEERIKSLLSQYPCNKTVSQDLLARLQPQEPSSSAELVVELMDSITKGTNNNARKDLRTLVDGILSRTSIYIKSDKELDMMNIYSICHTCLNCLVELFGEASDLGPSGQTTISVGKGPHERICKQVENLTWLLQILIDRQMGEEFVDLWASQNTLSTMHERFSPMVRYELSRISATIFIAMGSGKLHCTSTSRLGIFEAWFRPLLVDFGWLRRCPKGLNMATLEDGIGQALLTLTLKHQQVLFMEWFETFSGQGRECPNLMRAFQVFSLIIQPNGQLYHMLPQTPQQPQQPQHTMEQHMGQPDQSGPGQMLHASNVVKLEPQQLQALRSLGAVKMEHQSSDSQTHTCSCSSNNNICCS

SEQ ID NO: 111118 - protein, 85 aa, Oryza sativa
  Clone ID: PAT_MRT4530_15125C.1.pep
LKKKKMLSVFLWCNATCVTIVNLSAKRSCIFLLKKKKKKNVICIFMVHCNLCNHCQLVCQKRLHFSVEKKKKTRRSSVFLWGNAT

SEQ ID NO: 111119 - protein, 59 aa, Oryza sativa
  Clone ID: PAT_MRT4530_15126C.1.pep
HLDVVSEFCTARNGAGYLCKDAIVHDPLRVFPELSLSFTHSPFRVTTIHPQQCAHIKVR

SEQ ID NO: 111120 - protein, 83 aa, Oryza sativa
  unsure (1)..(83): unsure at all Xaa locations
  Clone ID: PAT_MRT4530_15127C.1.pep
MDHQWLAGVYFFEEELMAVMGGISGAYVNRVQMMFMDRPXHRESLYSPLDACRKVIYRXLADGRGSXPLFRPSDALCLRMHCC

SEQ ID NO: 111121 - protein, 236 aa, Oryza sativa
  Clone ID: PAT_MRT4530_15128C.1.pep
CRVIFCKSIDKRIIEVQIQKQALLLEAKDITSGGRRRRRRNPEEEELPALSCNRAQESISSGGSNNSIIKDGLIHKEEFHLALFRNKKTNLFVDRVFDLFDQKGNGVIEFDEFVRSLSVFHPDAPEEQKAGFAFKLYDLRQTGFIERHELKEMVLALLDESDLNITSDAVEMIVDRTFDQADTKGDERIDQEEWNEFVKNNPYVLRNMTLPYLKDLTMVFPSFVIHSEVSEADMVA

SEQ ID NO: 111122 - protein, 118 aa, Oryza sativa
  unsure (1)..(118): unsure at all Xaa locations
  Clone ID: PAT_MRT4530_15129C.1.pep
MVNEPMRALDTGAAXQRVDDLVPMIARGAKGDADQAEHLHMLDIPPATEYMNGLKREMIAAALDLSLGIEGPTDVEEDCPAVKVPGLVGVNPEGDLGARVEAGVRPGGGPYRLDNLHF

SEQ ID NO: 111123 - protein, 247 aa, Oryza sativa
  unsure (1)..(247): unsure at all Xaa locations
  Clone ID: PAT_MRT4530_1512C.1.pep
PASSDSDADDEDDAEECDGEEEGRXEEVEAVADKAAGEAVEXRADTPGYTPTPSPGNNETGVESNSSPLRRKDLEGAKALVAFSSGAAAKGGPIKKVAKTKGLVDVARVFSDNESSDGTPTSPTGRSLDLSAAPIPPIGAAGVDGSTAAGASASAXRIVTAAAKVFGNPPHQPVASPLMEAKGKRAVAETSALEYSLSVPRFAPGDFETRADLLPFVEGVSNLVLPASAPSMFTELNEFDEGCSPGC

SEQ ID NO: 111124 - protein, 137 aa, Oryza sativa
  Clone ID: PAT_MRT4530_15130C.1.pep
MVGSANPWLTPQKLARENKILKSDSIDAIALTREKNRMGIYLEIRKPGQIDLSPQQRVGAGRIGGGALQRPQSANARDEAAFLRHHALHITGTDGQICRSGAAAVGVGAELQAAGLICADGGGRMLERPRAEFLQPG

SEQ ID NO: 111125 - protein, 41 aa, Oryza sativa
  Clone ID: PAT_MRT4530_15131C.1.pep
LELCQTGPTFTHSHIVMSGSTLFKILANLITLGSQFHGCFL

SEQ ID NO: 111126 - protein, 120 aa, Oryza sativa
  Clone ID: PAT_MRT4530_15132C.1.pep
GLFFPPFFFGKSGERLTKGGRGPDSATPTDEIAVAPSPMGASSVPPSPTRRLLALTMALAAAVVSAVFAARAPASVTPIFRTLYHSSDSLLSDLKDLAARNPDKLVYRYHNSKVQRVFHR

SEQ ID NO: 111127 - protein, 80 aa, Oryza sativa
  Clone ID: PAT_MRT4530_15133C.1.pep
LFISDAMMSPTMFGVLTVCSSSFDFAARARHLYMFHLISLCLDVRVGVATTICCWVRHMWMRYMEGPAIYMSPTRRRWMV

SEQ ID NO: 111128 - protein, 160 aa, Oryza sativa
  Clone ID: PAT_MRT4530_15134C.1.pep
CGSVWEARVEVHTRVPSELDYSFPTRHRRDLPEIAMQDAAREAFLRLSSIHRAELASTEFAHHPFREEGNSVCTVQDTPCCYSPIMTRLSRWAEAVDDFYEEALLEIDDQQRRVGVVSRLRCIIIWGYMLRMRGRPLMVTAQYGNSAVRDGFLKYQESIG

SEQ ID NO: 111129 - protein, 60 aa, Oryza sativa
  Clone ID: PAT_MRT4530_15135C.1.pep
HFLPCLLFMIIAAQIVICRPGVILVAIPNCGFFSLSVHVDDPALFLIFFFSSPKNFLTPP

SEQ ID NO: 111130 - protein, 374 aa, Oryza sativa
  unsure (1)..(374): unsure at all Xaa locations
  Clone ID: PAT_MRT4530_15136C.1.pep
MVRGSHPLTPAGVGPPAPVKARLLFPGVIGAQKSSPIKCPRISPATPGRTHKGGPHGSLVEEFIPRHLPRQVGGAFVIFEVLLSAGVTSVAPPMWGKAQPPQESRATPGRGLVPPHLHRXTERYHGSVNPSESLQIHTTILEVAWGDDRVKANFFPMALQGQARGSLMNLPPASRLALVPPAGYGARPGSTNRPFKLQQLALVPMASYGARXAQLWMGIAGSRVFXLSHSCESSRRCRRERYWKEATERKEQTECVAXGHRLVGTSPPSVAVGFGPAGWLQRPAWLATPRMIGQKIGPTCQLTSRLASTLTTWERFWSGLTPGATIGDMGPGACSVLNRSVTGRMTDGTXSAPVRCSCVRQRATXHVSSNNDGE

SEQ ID NO: 111131 - protein, 138 aa, Oryza sativa
  Clone ID: PAT_MRT4530_15137C.1.pep
RCMHAYVAWISRAAPTPAPPLQHRVAGARRGVRPKQSRDGVVTPYVSPSAVVTFVQINHRCGLLYLAFNCVLACTVPSCIRGATFRPHTEPRSTKNWETRHRSSLSDIPAVMILHEGNLPHAPPLPHHVQIHVEYLCD

SEQ ID NO: 111132 - protein, 200 aa, Oryza sativa
  unsure (1)..(200): unsure at all Xaa locations
  Clone ID: PAT_MRT4530_15138C.1.pep
SLWSQNSTSEPSRAGTRLGGFGACQRACRGTGASAAPGLGRREATSRSLALEESEXAPLPRPVPPCCGRRRLARSATAAVVVVGSGEPAAAKLVTPSVSSSVPSWGEEDGDVEEQPPRCGRRRQIWRARRRQARHAVGELVRRQARHAVGEIVRAVVGEEDGGVDLTAAPRHRQIHRCRHRFVWFYPTWRLETTVACGYH

SEQ ID NO: 111133 - protein, 90 aa, Oryza sativa
  Clone ID: PAT_MRT4530_15139C.1.pep
AHLARILRETHSNDPVYEASPCESSRWRAGGGGAMDGQQEEQHAGRRQLEPRKDGNIPPQIFFYGQKYPSTILLPLNVMVIEIDLNPMIK

SEQ ID NO: 111134 - protein, 740 aa, Oryza sativa
  Clone ID: PAT_MRT4530_1513C.1.pep
MTSQTKMLLMLSLLLHLLIPSSSSATYTNHTGALPPAVPCLPDQASALLQLKRSFTITDDSTAAFRSWNAGKDCCRWEGVSCGDADGRVIWLDLGDCGLESNSLDPVLFKLTSLEYLNLGGNDFNESEIPSAGFERLSQVPVQSIGQLHSLVSLDISFSSDLIELFDHGYLINPWQMDLPNLTALVANLSSLRSLNVIDLQYNYLTGPIPEYFANLSSLSVLQLGYNKLEGWVSPSIFQNKKLVTIDLHRNPDLSGTLPNISADSSLESLLVGRTNFSGRIPSSISNIKSLKKLDLGASGFSGKLPSSIVRLDLSFNMFEGTIPLPQNSRFVLDYSNNRFSSIPTNISTQLGYTAYFKASRNNLSGEIPSSFCSNNIQVLDLSYNFFSGSIPSCLFEDANALKVLNLKQNQLHGELAHNINESCTLEALDFNDNRIEGNLPRSLVSCRKLEVLDIQNNQINDSFPCWMRVIPRLQVLILKSNKFFGQVTPTVAEESTCEFPSLRILDLASNNFSGTLSEAWFMRLKSMMIESTNETLVMEFEGDQQVYQVNIVLTYKGSAIAISKILRTFVFIDVSNNAFHGSIPESIGELVLLHALNMSHNSLTGPVPSPLGHLNQMEALDLSSNELSGVIPQELASLDFLGTLNLSYNMLEGKIPESPHFSLFSNSSFLGNDALCGPPLSKGCNNMTLLNVIPSQKKSVDVMLFLFSGIGFGLGFAIAIVIAWGFPIRRRSPARQRAL

SEQ ID NO: 111135 - protein, 182 aa, Oryza sativa
  Clone ID: PAT_MRT4530_15140C.1.pep
MGPKRGIDLMDFALIEFDVRIKTGEQEKDDLQLIDGATLLWTPGLWNQPYSIKIPGDYGAVDITVAHLNNAVEATVEVVISEVQSGFNLLLGCLTSDLNKEMRLFDGAIVESRFLKRSVVAVNWKSSIDLKFKVGASPSSFDQHCVSFKPKIHGHDTQEIKTDFALISVKVTWSTLLPTGLD

SEQ ID NO: 111136 - protein, 145 aa, Oryza sativa
  Clone ID: PAT_MRT4530_15141C.1.pep
MAGEMVETAGDVGRREREWGGIQNESRPLRACARAGKAEEWGGDVGARHGRSGARRTAGNGGSGVGGFGGRGGCWRHYLGGFDGIGRVQPIGKSADGTVYVRPVASHDVDTGLEDNRANRNASSRSGAMVTPGMEVAAPVANAGR

SEQ ID NO: 111137 - protein, 160 aa, Oryza sativa
  Clone ID: PAT_MRT4530_15142C.1.pep
MGPTPSLFLLLFPSRLPFTPCPPSVIVVILPVPLTQHRRHHPLRSPAQHTAFPVLPPLELRVKKGQAAAPLSPPRTSSPLVAGFTPLVELITVAVSVVVAITIAIPYRCTDQPLSSSPLSPPPSSPHERMVLPSLSPREELKDGHGRRRRGERGGRRMRK

SEQ ID NO: 111138 - protein, 57 aa, Oryza sativa
  Clone ID: PAT_MRT4530_15143C.1.pep
MARSFRFLLAGSGEADAFGWVFKASALMYSYRYNRGPSTCSPLPMTLICDGLTVRPD

SEQ ID NO: 111139 - protein, 57 aa, Oryza sativa
  Clone ID: PAT_MRT4530_15144C.1.pep
MDGFHDHESIVTQGAESCSAMLRGSQRCKRNLISYEHSSVPSSNNWILDSLQVQNKM

SEQ ID NO: 111140 - protein, 95 aa, Oryza sativa
  unsure (1)..(95): unsure at all Xaa locations
  Clone ID: PAT_MRT4530_15146C.1.pep
RCTHLKQQCVLLPFICXSIESFHMDCPKLFLSQKKSFKPGRCKYITSINIHYFFTFHSCCHFSGRTLKYVGAYXRHYCSIHXFWNAILGIKKIEI

SEQ ID NO: 111141 - protein, 66 aa, Oryza sativa
  Clone ID: PAT_MRT4530_15147C.1.pep
VLQYSRFTDKATRPLPYIHLLIPSSIIHVIIINNIPLIFSTHKGHSTDPPAFPVNPPLVPIPAARG

SEQ ID NO: 111142 - protein, 129 aa, Oryza sativa
  Clone ID: PAT_MRT4530_15148C.1.pep
GGDAEETVERSDSVLLPGITLLELPLLRPALSCHRGFRLSLPEGFTSPSPANSGLRPSPRRRGQPSSGLAEGSEDHIPRCTQNPTHFPPFNKIHCHAIDACLDLASLDETKRKSCRLVQLIVILICGYL

SEQ ID NO: 111143 - protein, 67 aa, Oryza sativa
  Clone ID: PAT_MRT4530_15149C.1.pep
MSIYCCGLSRAAGCSGGRRHISIYFCGGGGPRPACEVVALVQAQDDGEAQAQSAVEANDEAHAHYNL

SEQ ID NO: 111144 - protein, 183 aa, Oryza sativa
  Clone ID: PAT_MRT4530_1514C.1.pep
MEKCPNWKFVWENKAPMKVQFFAWLLTKDRFPIKRNLHKKTIVPAPTCELCNSADETALHLCFQCPFAVTFWSAMNIPSQPDGKHSSDVLPVPALSQPSSSSRLRIFSGTANPTLAQEVAFYLGMELGRVKIKRFTDGGSVRGCDMFLVQATCPPPNENLMELLIMIDGRPPRILRFGRQQQH

SEQ ID NO: 111145 - protein, 35 aa, Oryza sativa
  Clone ID: PAT_MRT4530_15150C.1.pep
MAVEASPRLDNIASSATVVDFFLVPSHNPRIQGSF

SEQ ID NO: 111146 - protein, 124 aa, Oryza sativa
  Clone ID: PAT_MRT4530_15151C.1.pep
MRVTSGKLSHVVPELSRCHTGLPPPHPESSLVQPSPLWPQACIELSRRSSTPSTLHRCSPLLGPQPRAAHHRCLPSAVSSLLSTINRPSSSSPPALKEDLGKEAIASDARELKCKYAATLDGRG

SEQ ID NO: 111147 - protein, 45 aa, Oryza sativa
  Clone ID: PAT_MRT4530_15152C.1.pep
NFGHVRSPQPSNARIPGVALASSLPRSYSPSQQVARCSLAKYRPH

SEQ ID NO: 111148 - protein, 47 aa, Oryza sativa
  Clone ID: PAT_MRT4530_15153C.1.pep
SIKNIWFSPPLLAPTNIKVWRDNPSVLIRVAQIISSPVSLLTISTSQ

SEQ ID NO: 111149 - protein, 48 aa, Oryza sativa
  unsure (1)..(48): unsure at all Xaa locations
  Clone ID: PAT_MRT4530_15154C.1.pep
VTIRYXQDGGILQHLRRAQMYKTHATEAFTLKTKLKHTRVFNTPRKTI

SEQ ID NO: 111150 - protein, 487 aa, Oryza sativa
  Clone ID: PAT_MRT4530_15155C.1.pep
MDHQRKPIFASGHAKRFAMKNTLFFEADLLSVRQRKITFSLVVEFSLKKKIISLKPVKYPHTSFAIEEAMMRCLTDWGLRGKLFTLTLDNASNNTAACEEMVKNQKNELLFEGRHFHVRCCAHILNLLVQDGMRLIRGAIHKIHELLKYIENSASRIQAFNSIANSSCLCSKFGLTVDVPNRWNTTFKMVLEALVYRAVLNSYANENGEVAPSDEEWLTAESICEFLKAFEEATRLVSADRKPTAHSFLHLVLCIRHALSDFDSQTTSILTQLASAMHMKFAKYWDEKLPNNFNLALVISTVLDPRRKRDYLEFFYAKVSPNMNEAETKVDSVIEWMKSYFRVYEGIARRRGVSCLSHSGQGEASGVGSPVLGKRKLDQEFAIFKSNRTRLHKSEIETYLEEVCEDDSKDFDVLAWWKRNAKRFPVLAIMTWDFLAIPLSIVPSESAFSCGGRILGDTRSSLTPDMLEALVCAKDWLFKPKKQDQST

SEQ ID NO: 111151 - protein, 687 aa, Oryza sativa
  Clone ID: PAT_MRT4530_15156C.1.pep
MDHQRKPIFASGHAKRFAMKNTLFFEADLLSVRQRKITFSLVVGLLNMSTHNSESSTGNSSSHELSLQPRKRAKVWEHFEQELVMVDGVPKAQCKYCRLMLTATRKSGTSHLINHVCDSCPLVEVEVRNRFIAIARKQPVENFVFYPRRSEELMIKFFIHDEIPFRKIEDPYFAEWMESMQPTFKVVGRQTIRDKIYTCYIRMKQELHDELQNIDSRVCLTSDMWTSNQNLRYMVVTAHYIDAEFSLKKKIISLKPVKYPHTSFAIEEAMMRCLTDWGLRGKLFTLTLDNASNNTAACEEMVKNQKNELLFEGRHFHVRCCAHILNLLVQDGMRLIRGAIHKIHELLKYIENSASRIQAFNSIANSSCLCSKFGLTVDVPNRWNTTFKMVLEALVYRAVLNSYANENGEVAPSDEEWLTAESICEFLKAFEEATRLVSADRKPTAHSFLHLVLCIRHALSDFDSQTTSILTQLASAMHMKFAKYWDEKLPNNFNLALVISTVLDPRRKRDYLEFFYAKVSPNMNEAETKVDSVIEWMKSYFRVYEGIARRRGVSCLSHSGQGEASGVGSPVLGKRKLDQEFAIFKSNRTRLHKSEIETYLEEVCEDDSKDFDVLAWWKRNAKRFPVLAIMTWDFLAIPLSIVPSESAFSCGGRILGDTRSSLTPDMLEALVCAKDWLFKPKKQDQST

SEQ ID NO: 111152 - protein, 52 aa, Oryza sativa
  Clone ID: PAT_MRT4530_15157C.1.pep
MSTTTKHVVIGTHRLGMKEVESEGSQRCLMMRKRNVLSGGNGVCKQSGWIEC

SEQ ID NO: 111153 - protein, 79 aa, Oryza sativa
  Clone ID: PAT_MRT4530_15158C.1.pep
MGFFRNGAGGDYGKSDDDTLTMVEGGGGGGEGGAVLGPMRGAMTDSGSSAAALGRGGSASPAPVLVDYYGDNVDSSGLW

SEQ ID NO: 111154 - protein, 71 aa, Oryza sativa
  Clone ID: PAT_MRT4530_15159C.1.pep
MAKSSSFGRYSSPCTLRLGRLWLDKLDDDSTKNDKRCSRAKHHDDDENRGLPGRSGSIPLRVKRDDHADYE

SEQ ID NO: 111155 - protein, 90 aa, Oryza sativa
  unsure (1)..(90): unsure at all Xaa locations
  Clone ID: PAT_MRT4530_1515C.1.pep
MAAFWLQANPILVGAAPSCHIATRRQLPYQPPPQSAPAGRPEKREREGEEGKMGNKREVMIWHLXMWDPRADSAVTSNKTGVKTTEGSKV

SEQ ID NO: 111156 - protein, 882 aa, Oryza sativa
  Clone ID: PAT_MRT4530_15160C.1.pep
STLSREAGRCTQNSGVVNVADDGVNYYGRLSDIVELSYRNYKVVLFRCDWYDVHHRAGMKNDEFRFSLVNFSRKIHTGEKLDDDPFVFSSQVEQVFYSEDPKTEGWHVVTRFRPRDLFDMGVEQPSDEAEQIMRKKAGALPFIYRRKQANIEKSFYRMVCQMQGINANRSKMSTLPDDFCQSPDILNSDRIDKIQAAAFLNLIRFGTQDGGSELEEENSESDDDAIAELPSAIKRPINIIFPNGEVRQILGNFNVKNMEQLKNGKVIVETDENGVPNDRSGSLLGSYLGKMAQNSTFAPLHIPKWDDDLFVEPQKCIVAHVETKFVYPSETKLLTRDWVLMKVSKGWRSYKHRLKDRYYNLDVRTLNEIPEDVPKGVNAIQWVGLLAIWGQDKHKKLCEKNSECAKQQRNPHTTGRKSHAMLFKEMGEAKKRGKVHEIDLWDEAHKKKDAHMKAVLDMAYHELAKRKTDSSGVLSPKDYDDVFRSVVGKKTKLRGYYDHKNWSHLKVSQGLDVIGQSEEQAMLKLKIKAMDDKLEDMSDDMNLMRTFIEQKYPGENWRNIVVARKNKEVDISEQVGNDIPHEFENILDKSYENVHPTPNNLQELHSISYTKAKDGRGKPSLPHEHMITKQSGIISSAKVSESSQMYIESTRAHDNGNKKQVCSLKCTNAKDRRANPSIPYERTNAKGYSFGQDSRNDITNGSVNNFEDSHTNRNAIQNNVQRLQSVSSTRPKESYSSQDLPYQNLTTKQSIIQSSVKRPRTSQSFVESILPHDKTKQVPQRKEAVLKHTSSKSGQREVYLFSLNAINKDKLVAKGNLVTANATHVVGRNMLGNEYYGVAIHTVTNIGDERLPRPPFENCNTLRDAIGYVIAWPRAYDINGGL

SEQ ID NO: 111157 - protein, 97 aa, Oryza sativa
  Clone ID: PAT_MRT4530_15161C.1.pep
IGKKEKQGRNKPFKGHPHPFHYKKTGHNLFTPKKTHSCRPYGNTSLYMNSKANTFCSAHPINFTTKAVKNMAGQSNAVWLSLGAEVKRLPEPPVCPN

SEQ ID NO: 111158 - protein, 306 aa, Oryza sativa
  Clone ID: PAT_MRT4530_15162C.1.pep
MRSGEGRERRLTNTFNSSREATGGVGRGAAASSLRAFSRRRPCARGGGGREEEEEEEEEEEATLGAPPGVLAGARARVGWGGEAAGDGRRWLRRGEERRGEERGDAWREGKSEEAVPQCLVALPQGESGPRWGGGHSFPKTSQRRLSPDATWPSPEGGSQARGKVAATPSQRLDGGDCPPMPRGPPPRGVRPEVTMYGGLSVRLQVPTYPHLWRPEQSRHAAFNAVCNALNRSVTGRMTDGTGVVRLCAARVSGNVQPDMSHQIMMGHPRVRRQDLTGLIIKMTCACFLSQETRHAFNAKIVILLR

SEQ ID NO: 111159 - protein, 80 aa, Oryza sativa
  Clone ID: PAT_MRT4530_15163C.1.pep
LWITTYPIPLVNLQGRIYQVIKAQHSHQGRGGATIQVELRDVDTGNKITERFRTDEALENLTIKAIHSSEVLLHYIHVSS

SEQ ID NO: 111160 - protein, 123 aa, Oryza sativa
  Clone ID: PAT_MRT4530_15164C.1.pep
TRASSSTRPPPPPPTATATSSPPPQTGSTPAAAARRPQLPPRSCRTTRSTSPASTPAATGSATPSSTPASTTRRRTRSRWWTAATKAVTALRFVLLLPIQRFVYAVVFSVSVCPPQSVWTKWL

SEQ ID NO: 111161 - protein, 131 aa, Oryza sativa
  unsure (1)..(131): unsure at all Xaa locations
  Clone ID: PAT_MRT4530_15165C.1.pep
RKSISEGGLDYLRNPNLVHAHSILGIWAVHVVLMGFVKGYRVGRGSLGEGLDKSATRKAFXPLGLDDDPDTXAELKVKELKNGHLAMYSMFGFFDQAIVTGKGPIENLFDHVADLVVNNDWAYSINFDPGK

SEQ ID NO: 111162 - protein, 360 aa, Oryza sativa
  Clone ID: PAT_MRT4530_15166C.1.pep
ERSDMEASKRATYVKKIHEKTKEAIEKRSKYYAAWANKNRKKKRKSKLMPRGDGPFRVLSKINDNAYKIELPEDYGVSSTFNVADLTPFFGLEDSESSRSTPFQEGEDDEDIPTVHATSSTKQPSSNTKDTIQGPLTRSRAKKLQVQVNSFLTDFNFSTSENVILPKCSTLVVLRNIQHEEDESGSVDSITGVQNGPVKQNGPTAVQNGPVQRTAHNSQFTEAMEVNEDSLESLSSQLSNATNTKYFGLHTNENQAVTVYWNRSGDHGLGLVQDVDDVIGLIECVFLEEGVEKSDRCSRVLLGGAKNRRPLNVLLPDELSCSSLGLQGTLSPVLSLLCSPFALLLLTLQSFSLLCLAFLL

SEQ ID NO: 111163 - protein, 273 aa, Oryza sativa
  Clone ID: PAT_MRT4530_15167C.1.pep
MQSLGKRFERPMIGAWCRGDSKVGDLPKKELKDANCYLATISLLLVRDMISDGYRLIQVGTTSGTNGYRPGYRHVSVDRMSCADVSSSHRSLILATVLLLLGPADSFVVEYRSSMGVICSENTLHDHVLAYLAHMHPTSNSDPSGISCRSNYSLRTDVAKLKLVKYIKAPIIFTDPSRIARFREGGHRWRFLEALVAVKCKYEQWRKSRLRNRPQPLFLAEPHLCPHPEPLLCHRPSPPFPTDEESRPSRASRRLRHWYSSPPFPTDEERRPS

SEQ ID NO: 111164 - protein, 86 aa, Oryza sativa
  unsure (1)..(86): unsure at all Xaa locations
  Clone ID: PAT_MRT4530_15168C.1.pep
STHKSLSQRRTHHHHCQTPTNIHIIRFLTRISLNHLPLTQDESQCHDSTKIRRAANDLTQKKKKDAIYMHNLRLQXSMISSQFHLA

SEQ ID NO: 111165 - protein, 46 aa, Oryza sativa
  Clone ID: PAT_MRT4530_15169C.1.pep
FRTDEVSIDLNFACRRIIQGPSFSSAAILSTPCRPARAWRDDVPPN

SEQ ID NO: 111166 - protein, 101 aa, Oryza sativa
  Clone ID: PAT_MRT4530_1516C.1.pep
MVTGEGGDDDDDGDLMSGLMHVEDEQGRRLDDDEVVDNIVSLVIAGYESTASAIMWATYHLAKSPSALAKLRAEPEHLPMMIDQASSLPLIMQTNKLSLPR

SEQ ID NO: 111167 - protein, 45 aa, Oryza sativa
  Clone ID: PAT_MRT4530_15170C.1.pep
SWLKKLYSDCFLISFFVGRKDIFRFYRHISTDSKGLHDYFISYRL

SEQ ID NO: 111168 - protein, 165 aa, Oryza sativa
  Clone ID: PAT_MRT4530_15171C.1.pep
MAIGWFLPRLQGCNALAGVGAGSTASSANGGERPKQNRIQRLQEVLESSFANVALTRKRNGMLERAVADERDVGGAARRVCTREEGRPRQLCFHIPRAKTTRPWQRPSISPRRARYSRSTVAAAGTGCASWPVVAPAARLAALAVLVRLSISHITCSPLPQPPET

SEQ ID NO: 111169 - protein, 353 aa, Oryza sativa
  Clone ID: PAT_MRT4530_15172C.1.pep
MACVGSKYGKGDARRGGFGDGDTRRPMTVCKNRRFSHLAIGRVFGHMRKCVLAACKNSFSSSADKPWIGQWLIHGNGKASFHVARPNIISRHENGKRLICASCDPLTDWGTLKDYGLCCETLEDRVFARGHCKNMTQSPLIGNGGNEPAVRGEDEVEDTLAVIVVARGWDDRCWSSGGEEQGIADGRDGGGAMKRIWDAEMTRPQSRGEEARQGEAGVVVDGEETISIQRTVSGGCGRGEHVMWEMLSRTSTARAARRAAGATTGQEAQPVPAAATVDREYLALRGLIEGLCHGLVVLALGMWKQSWRGRPSSRVQTRLAAPPTSRSSATARSNIPFRLLPPRPKGKRKERDI

SEQ ID NO: 111170 - protein, 51 aa, Oryza sativa
  Clone ID: PAT_MRT4530_15173C.1.pep
MEVALKYSSSRGGCRRGIVGQGATKVGWLLVYKFANNPLLKREHKFNASIW

SEQ ID NO: 111171 - protein, 590 aa, Oryza sativa
  unsure (1)..(590): unsure at all Xaa locations
  Clone ID: PAT_MRT4530_15174C.1.pep
PWLFPDLFLLHFRRHQLLRRRRHRHRRCRRRGARAAVREHRARSRRVLRRGQLRPHDSAFLKGMEEANKFLPTENKLIIDLEASSENNXQGSRGGQEVPAQRRQASVDVVVATASGGGGRGRKNPYDDEELELEGGRSSKQTAVQGDDVAARAMFDKVMMPSHENCTEMMEKLRIAMKEEAAKNEASAGGKGGNGKVKGGRRGGRDVVDLRTLLIHCAQAVATDDRRSATELLKQIKQHAKPTGDATQRLAHCFAEGLQARIAGTGSLVHQSLVAKRTSAVDILQAYQLYMAAICFKKVSFIFSNQTIYNASLGKKKIHIVDYGIQYGFQWPCFLRRISQREGGPPEVRMTGIDLPQPGFRPTERIEETGHRLSKYAQEFGVPFKYNAIAAVKMESVRKEDLNIDPDEVLIVNCQYQFKNLMDESVVIDSPRDIVLSNIRKMQPHVFIHAIVNGSFSAPFFVTRFREALFFYSALFDVLDATTPRESEQRLLIEQNIFGRAALNVIACEGIDRVERPETYKQWQVRNQRAGFKQLPLNPEIVQVVRNKVKDCYHKDFVIDIDHQWLLQGWKGRILYAISTWTPNDALSYF

SEQ ID NO: 111172 - protein, 738 aa, Oryza sativa
  Clone ID: PAT_MRT4530_15175C.1.pep
MGSSAADSFPACGDDAIRDVYGIGGGGEEDDPSLFLYLSDLAPVSPSAYLDLPPSPPPPTTTATTMVKEGEEAPEDLVLPFISRMLMEEDIDDKFFYDYPDNPALLQAQQPFLEILSDPSSNSRSSNSDDPRLSPTSSSDTSAAINSYDAAATATAVAAAAVPVPQYESIELDPAAFFAAANSDLMSSAFLKGMEEANKFLPTENKLIIDLEASSENNYLRGLEEAKRFLPSDDKLQVGFAAAAAPVVSVKKEAVDVVVATASGGGGRGRKNPYDDEELELEGGRSSKQTAVQGDDVAARAMFDKVMMPSHENCTEMMEKLRIAMKEEAAKNEASAGGKGGNGKVKGGRRGGRDVVDLRTLLIHCAQAVATDDRRSATELLKQIKQHAKPTGDATQRLAHCFAEGLQARIAGTGSLVHQSLVAKRTSAVDILQAYQLYMAAICFKKVSFIFSNQTIYNASLGKKKIHIVDYGIQYGFQWPCFLRRISQREGGPPEVRMTGIDLPQPGFRPTERIEETGHRLSKYAQEFGVPFKYNAIAAVKMESVRKEDLNIDPDEVLIVNCQYQFKNLMDESVVIDSPRDIVLSNIRKMQPHVFIHAIVNGSFSAPFFVTRFREALFFYSALFDVLDATTPRESEQRLLIEQNIFGRAALNVIACEGIDRVERPETYKQWQVRNQRAGFKQLPLNPEIVQVVRNKVKDCYHKDFVIDIDHQWLLQGWKGRILYAISTWTPNDALSYF

SEQ ID NO: 111173 - protein, 36 aa, Oryza sativa
  Clone ID: PAT_MRT4530_15176C.1.pep
QHSTAQHSTAQWCMGQAWSLAMVASGATEAQNIIAS

SEQ ID NO: 111174 - protein, 183 aa, Oryza sativa
  Clone ID: PAT_MRT4530_15177C.1.pep
MQNPGGHHASPASAAKSKSSTAAAASASGQGSSHHHHHHHSGGGGGGGGGADASATTLKRKRGVFQKDLQHMMYGFGDDPNARNCLGIGCNLCTLCCGTLEPLPETVALVEDIVVEYVTDLVHKAQNVASKRGKLLTEDFLYLIRKDVRKLHRATELLSMNEELKQARKAFDVNEETLATNNE

SEQ ID NO: 111175 - protein, 316 aa, Oryza sativa
  Clone ID: PAT_MRT4530_15178C.1.pep
MAALLRHAAAAAAAVVLLIAAAASTDGATSFYASDPNLGSARVVFQGGKERFLPGFMEKTGPKVGFWHGQIRRLIKDFGITTHGDIEFGFFPHVAPKTVEHIYKLVRLGCYNTNHFFRVDKGFVAQVASVVGGRTAPMNDEQQEEAEKSVVGEFSTVKHVRGILSMGRHSDPNSGGSSFSILLGDAPHLDGQYAVFGRLTKGDDTLRKLEQLPTRREGIFVMPIERISILSTYYYDVDLESCEAEKSILRRRLSESASEVERWERNNRVFNQQQKPWVEVAKVMAAEAELWHLVNAAVPELPLPSLVPRSQNLVGD

SEQ ID NO: 111176 - protein, 518 aa, Oryza sativa
  Clone ID: PAT_MRT4530_15179C.1.pep
METPTLTTLLKAAVATFPSRRALAVPGKVDLSHAALDALVDAAAARLAADAGVLPGHVVALAFPNTVELVIMFLAVIRARAVAAPLNPAYTQEEFEFYLSDSGARLLITNPEGNVAAQAAASKLGLAHTTASLKDAAGQVHLAGFPASAAAAAKDFANDPSDVALFLHTSGTTSRPKGVPLTQRNLAASVQNIRAVYRLTEADATVIVLPLFHVHGLLCGLLASLASGASVTLPAAGRFSASTFWADMRGAGATWYTAVPTIHQIIIDRHTSKPEAEYPALRFIRSCSASLAPAIMEKLEAAFGAPVVEAYAMTEASHLMTSNPLPEDGARKAGSVGRAVGQEMAILDEEGRRVEAGKSGEVCVRGANVTSGYKGNPEANEAAFRFGWFHTGDIGVVDEEGYLRLVGRIKELINRGGEKISPIEVDSVLLGHPAIAQAVAFGVPDAKYGEEINCAVIPREGVSLGEEEVLAYCRRNLAAFKVPKKVYIADELPKTATGKIQRRIVAQHFVVPVLPTKA

SEQ ID NO: 111177 - protein, 59 aa, Oryza sativa
  Clone ID: PAT_MRT4530_1517C.1.pep
MGLVANSYVQVSTVGVTDAGANGGGKVQSLLQDIKQVFDKMVSPTTAAQPPPKLWQSLS

SEQ ID NO: 111178 - protein, 77 aa, Oryza sativa
  Clone ID: PAT_MRT4530_15180C.1.pep
MASKPADDDGGKYGCSTEEGRREDGEPVLLDGNKLGHPPLALSSTPLGLHRSRTSHGTSPMLAPLGHLRLRLHPIGC

SEQ ID NO: 111179 - protein, 71 aa, Oryza sativa
  Clone ID: PAT_MRT4530_15181C.1.pep
SRSNQSSENRTILMGVHRVNYLIRFSVGVCGIHSCTLDEGTFYIRAMDAIFKDENVLNASKNRLCEVLFAC

SEQ ID NO: 111180 - protein, 85 aa, Oryza sativa
  Clone ID: PAT_MRT4530_15182C.1.pep
IRCSLSSVACSRAMTRVTSMTREQPLGDRILWKGAWGAARPGADGTAMMQFQCRTATGPDGVFGAGVTTFRLNMNYSSSLGLQWN

SEQ ID NO: 111181 - protein, 628 aa, Oryza sativa
  Clone ID: PAT_MRT4530_15183C.1.pep
MDKQLGFLEFTGTNPRNAEKWTTVSPPVSQPMACSSQLDVLAQDSMHNPLSRGIKRKWVDLSLGLGNSSSSSDSSKQSMGTCCTMSSAKDRDDGSSVDLDMNFQFNLYNEGTSKLDSYDCNGKKVLEKPVDLELSLNFGPCESAVTNVDFSAATKQQAVFLQSCNMSSVPTVDEGSTSARWKSGGKLLPYLYQSRNNTGHFSSKELPGSSNQSQDLAPLPKMIQTPQSPVTSTSGVVSFQQRCNSTKICSQPGCAKGARGSSGRCIAHGGGRRCQREGCKKGAEGKTIFCKAHGGGRRCEHLGCTKSAEGRTDFCIAHGGGRRCSRDGCRKAARGKSGLCIKHGGGKRCQKLNCTKSAEGQSGFCIAHGGGRRCKHDGCTKGAQGSTNFCKAHGGGKRCTHPNCSKGAEGSTALCKAHGGGKRCSAEGCPKSVHGGTEFCVAHGGGKRCVVPGCTKSARGRTDCCVRHGGGKRCQFTGCSKSAQGSTDFCKAHGGGKRCLWGQSGSGLGDGSGTCERFARGKKGLCVAHNALVEDSRVRGGQTVGTIALPGSTGADSDVSHGTLPGNSFNFGETFAANTKQALHHVQSPVPEGRVHGGNIAAMLANSMDYQKQLNFSTGASTSDRNWL

SEQ ID NO: 111182 - protein, 45 aa, Oryza sativa
  Clone ID: PAT_MRT4530_15184C.1.pep
CHLWQYFTLYKQLISEEPLGCRIAPFLLMRGGYSTHVPLPYPFSK

SEQ ID NO: 111183 - protein, 147 aa, Oryza sativa
  Clone ID: PAT_MRT4530_15185C.1.pep
MATVPEPLIWEIVKKNNCFLVKQFGNSNAKVQFTKEPNNLYNVHSYKHSGLANKKTVTIQPSGVKDAAVVLSTTKTKKQNAPAKLYHKSVMRKEFRKMAKAVKNQVSDNYYRPDLTKPALARLSSVYRSLQVSKSGAKKKNRQPTKL

SEQ ID NO: 111184 - protein, 67 aa, Oryza sativa
  Clone ID: PAT_MRT4530_15186C.1.pep
MVHLLLHSGIKTSRTNILESSCWSCDVRRQRKIQDSGSPILYARRDDGGSYGIAVEQLNLQIRILPA

SEQ ID NO: 111185 - protein, 755 aa, Oryza sativa
  Clone ID: PAT_MRT4530_15187C.1.pep
MLHHAEPEVVAGSARGLDNFNALQKASKELFYDDAKEYEDLDSCPTCKSSRYKTSRSQSEDARQWKEFDTKYHKFAEDPRNIKGKTGCVICVDGTVYRYLKGSKKLVYMRHRRFLRKKHPYRSKAEYFDGTVEEGDAPEPWKGDKVFRMTKNLKVVFGKYLSYWKDLDIRHSIDVMHLEKNVFDSTIGTILDIPTKSKDRLKSRKDLVDMQITIKLHPVDEVEPVHVKLVITKLCYFFNSISQKVIDPEELAGMSVDNFGLTIFDFDNVGHKEDPWVLADRVAQVFYVTDPSNLKKDIVISGKQSILGVDDVEDIEAYNQYENMILFTDFRNKILRVEESIGESPKPYMRNEGAKTLAPLGCPNFVRQRKTLAPPPPTAAASSTAYSADRLLRQPRPPPTAATSSSAYSADRLLRRPRPPPTAAASSAAYSADRRLLCRPPPPPPPTTAYSVDRRLLHTGYSADRLLRRPSSSSVDLCRIVAAMEKHNEAQPAGDKSNETELIGLQVIAEELSSSSSGEAGSDSYHSPSDPHPSPPRKNKGGGEDDEVDSDYIPPEPVGDVVFKDPKLQQVANKMKEIVTQQKDGIFVPDREVDQLSVALGTSEHGGRVRGVSSKASWKDGFKEDAASYKKRDRYKEELLIPVRRTGKTIQVATGRAMPGRRFHCQDIPDDYAKVEVRTDQRILRQGYCGHYVMPCVTWTKNRGILQKMHHLGINLKSKPISLKNKQMNQSLQSNPISLKSTQINQSLHIQCLSN

SEQ ID NO: 111186 - protein, 100 aa, Oryza sativa
  Clone ID: PAT_MRT4530_15188C.1.pep
NLLEDLNFNTSKIKAYDTPDDFYSALSKGSKNGGIAAFVHEVPCIKLFLAKHCKEYTMVGPFYKTAGLGYVSRVLFHVFACNITFPSFSYSSLLKHIYIL

SEQ ID NO: 111187 - protein, 555 aa, Oryza sativa
  Clone ID: PAT_MRT4530_15189C.1.pep
MKEIVTQQKDGIFVPDREVDQLSVALGTSEHGGRVRGVSSKASWKDGFKEDAASYKKRDRYKEELVASCRAATLQECIRFFNRNPELQQRVDRMQDAFPMPDVPSYPVDDIKEDTPCRLLIPVRRTGKTIQVATGRAMPGRRFHCQDIPDDYAKVEVRTVNEDHRMYEIDFPTPEDIVYLGDAVDQIILWHKKDIQLGSTDSPPRILRSLCHALQLAHPMPEQLEPEQPMLDKAELEREEEVVQEREKEVVQEREEEAVEEHKEKSAPKKKFVVKAFPGRKRDIKGKAKDVYDKRKAKGLKISLDKTLSFIPTVDVPELFENGKAFLPTWELEEGPWQLKRWHEWMNYVIAEQMRETVGFLDPCLISKPNHTFTLDEKRVPAHVAAMTPEERDAYLTERHQAKIRDVATYVAIALESMQGKECIYAPYAFDDHWITFLLYPKYNEVIVLDSLDKDIQSYQEILRIFDLAYKRYYQVGGQRRNDRDQIYIRNKWPLLKFPKSDRELDDKSIQNIQRDLCYFIHNECCHQLGRFFDKEGLLGLPENDILSNWSKHAI

SEQ ID NO: 111188 - protein, 71 aa, Oryza sativa
  Clone ID: PAT_MRT4530_1518C.1.pep
GSATRIIHLGHISRRGLHTLLKLLSNYMNFSHGKFSIPKDQPNASGMSLLIITPIPKANTIGPESYDVFPC

SEQ ID NO: 111189 - protein, 764 aa, Oryza sativa
  Clone ID: PAT_MRT4530_15190C.1.pep
MKLFSLAALFSHHHLYRFLWRGEVFELEWFDRSFVPKDEVFNDWNFMVVEEESVDDDGYDTANDVDDGHVTVDDADGSDGTAFDLEEMLRHAEPEVVAGSAREYEDLDSCPTCKSSRYKTSRSQSEGQDVVLDDLEESDPCKDSNKKKISQLVMWYLPVKDRLKRLFSNPRDAELMRWHHEKRKKDGMIRHPADARQWKEFDTKYHKFADDPRNIKGKTGCVICVDGTVYMYLKGSKKLVYMRHRRFLRKKHPYHSKAEYFDGTVEEGDAPEPWKGDKVFRMTKNLKVVFGKYLPYWKDLDIRHSIDVMHLEKNVFDSTIGIILDIPTKSKDGLKSCKDLVDMQIRKELHPVDEAGMSVDNFGLTIVDFDNVGHKDDPWAAQILCASEKPSASTADRRLLRRPPPPPTASSADRRRLHRRPPPTPLTASSADCRLLRRRLLRRPPPPPPPTAAYSADRLLRRPRPPPTAAYSTASSAAYSADRRLLIRRPPPHPRWKNKGGGEDDEVDSDYIPPEPVKNAPRRSKRKAQAAPTEREPTVEAASAVCPTASIFKDPKLQQVANKMKEIVTQQKDGIFVPDREVDQLSVALGTSEHGGSVRGVSSKASWKDGFKEDAASYKKRKTIQVATGRAMPGRRFHCQDIPDDYAKEEVRTDQRILRQGYCGHYVMPCVTWTKNRGILQKMHHLGINLKSKSISLKNKQMNQSLQSNPISLKSTQMNQSLHIQCLSNQSLSSQCLIKQSLKGKKRLYKKGKKRLYKRGKKRL

SEQ ID NO: 111190 - protein, 105 aa, Oryza sativa
  unsure (1)..(105): unsure at all Xaa locations
  Clone ID: PAT_MRT4530_15191C.1.pep
WRTAALPRGDDGKRRXPTASDGGVTPSSKXAAALGGEGKDDGVLTEDSAGMEGQRRTAARNDQXRRRTADGLRNHLAGMIERERRMEEGKDAGRRRRPWRCSPAH

SEQ ID NO: 111191 - protein, 144 aa, Oryza sativa
  unsure (1)..(144): unsure at all Xaa locations
  Clone ID: PAT_MRT4530_15192C.1.pep
FXXREGGGKTSTPLXXWGKXPKRGDXSPPLPCPKKKFPPSXPXLGGSYPRQKFVXKXPPGGGFXXXFPXPGEKXXVXFPLKTXPQNLXXGGSPXXFPXWAPRXXLSXGGGXKAPPKXFFPXAPNWXXPPFXXGRGPXGGSPXLP

SEQ ID NO: 111192 - protein, 361 aa, Oryza sativa
  unsure (1)..(361): unsure at all Xaa locations
  Clone ID: PAT_MRT4530_15193C.1.pep
MGLRDGFSNNKLLDDFGCEEIXPTRVRPPTESEPSSSRRATVSAASKSNTIPIPPRVRHREHLSTRVGCGRAHPIIKNVLDKCRVVAPNLPTKTDDLSHSTGYGWAIXEKGYEFRWLRDSYDWSSTGSVAVLVPTPNVREIPTHWFSTSQSXRSLVHLLLVVELXYTWFSTRGVAILPLPSIIVVELRLHLVLDQRCSDSPTTSTLGGRVKAXTWFSTSSVVILPLFPLXVVELRLLPGPXPAWSSYDYYLVPNQRYSDSPISFTPTKLILGTQYCQVFYPEIPYHXRHLELKPILLSLYAILARPPRNLRELRLGTPRADKALSDHAETNHHTLRLLDHSRTVGGSRQGIRNEEMVYPLR

SEQ ID NO: 111193 - protein, 1484 aa, Oryza sativa
  Clone ID: PAT_MRT4530_15194C.1.pep
MDRYAGSVQTEMRQNGGRLTLEQILRYGADIARGVAELHAAGIVCMSIKPSNILLDTNGHAVVSDYGLSAILKNLTSRRVSDDSNMVGLDATLLSPNYTAPEAWVPLKKSMNLFWDSANGILPESDAWSFGCTLVEMCTGAVPWAGLSAEEICKSVVKERKPPPQYSRVVGVGLPGELWKMIGDCLQFKPSRRPSFQDMLKTFLRHLLDIPRSPPASPENDFTNASMPNGTDVPPASVLDMVQDNPNALHHLVCEGDAAGVRNLLAEAASDGNGRLIRSLLEAQNADGYTALHLACRRGSAEIVEAIVAYQENVDLLDKNENPPIIFAMAAGSPQCVRALVRRSSDVNSRLREGLGPTLAHVCAHHGQPECMRELLMAGADPNAIDGEGESILHIAVAKRYTDCAIVLLENGGCRSMGIPNSVNKTPLHLCIKTWNADVVKRWVEVASEEEIAEAIDVPSPVGTALCMAAALKKEHEKEGRELVRVLLSAGADPTAQDDPHCRTALHTAAMINDAELVKIILEAGVDVNIRNAQNTTPLLVALNRGANSCVGLLLAAGANCNLQDDDGDNAFHIAADAAKMIRENLSWIVQMLQQPSPAVDVRNHRQVYDVSGVKLNLLQYNVMQSKRGWTLRDFLERLPREWISEELMETLEEKGVHLTPTIYEFADWVKFRRTVTEPAFGWQAHARFRSVLIMIVLKVYTDVLDVVKNDGILVVPKKENDARCKCCSSAYCKKANFKNLIIGATVLIFMSMLMRIPSINILTEDLWRMSHGSNNKFTHLSRFGWRGQSRDSIGTVLCVDDDGILRVGFPGASRGWRADPAEIVRVEEYKVGNWVRIRPSLTVAVHGMESITPGSVGIVYSIRPDSSLLLGLCYLSSPWLCEPEEVEHVDPFKCEAHVSSNFQIGDQVCVKRSVAEPRYAWGGETHHSVGKIIDIESDGLLIIDIPNRAVHWQADPSDMEKIEKFKVGDWVRVKAAVPSPKYGWEDVTRSSIGVVHSLEEDGDMGVAFCFRSKPFSCSVADVEKAQPFEVGEKIHVLPSISQPRLGWSNETAATIGAISRIDMDGTLNVKVSGRNSLWKVAPGDAERLSAFEVGDWVRLKSSIGSRPTYDWSVGKISIAVVHSIQDSGYLELAGCFRKGKWLTHNTEIDKVEPLKIGHHVRFRAGITEPRWGWRDAKPDSRGIIAGVHADGEVRVAFFGVPGLWKGDPADLEIEQVYEVGEWVRLRNNADDWKSLKPGSIGVVHGIGYEDDVWDGTIHVAFCGEQERWIGPSSQLEGVSKFVVGQRVRVKLCIHQPRFGWSNHNHSSIGTISSIDADGKLRIHTPAGARAWLIDPAEVEKVEEEEEVCVGDWVKVKDCVATPTYQWGDVNHNSIGVIHRAEDGELWVAFCFCERQWLCKRWEVEKVRPFRLGDRVRIRPGLVTPRWGWGEETYESKGEVVGVDANGKLRIKFRWRDGLWIGDPADIVLDDIPSLTEASNGFCS

SEQ ID NO: 111194 - protein, 108 aa, Oryza sativa
  Clone ID: PAT_MRT4530_15195C.1.pep
TPMPGWSFSQRSPIHLVPRPPSVPVRKRFNPSPLPSKSFPPPKGDSPFAFFLVCPDFEPKIGKPHCPVCQFPPFRANLAFSIISFKTLFSHCPHPFLWPKSRIQGPLV

SEQ ID NO: 111195 - protein, 208 aa, Oryza sativa
  unsure (1)..(208): unsure at all Xaa locations
  Clone ID: PAT_MRT4530_15196C.1.pep
PAPSLLIFFFPSRISNGSYKASLLEGPVLVWAGRLCLYYALLHIGLAGSPRNPFLAHEIGDDGAAGFDSGDDLXKWADKLRGGAPGENEAQDKRKLVSKWKPTTKGTLKRTYRVRSVEEGRRILKEIALVLSEDDHFVDASSHKGCQIRRESAHGESVCCYNVRALFDELPTPHLVLEITAFPAGPLTDNDYRKAERLEMVLRMSASI

SEQ ID NO: 111196 - protein, 101 aa, Oryza sativa
  Clone ID: PAT_MRT4530_15197C.1.pep
QPSSAATTASHSSSIDCDSTFSHESSSFMSTLVARSLRSVGANSKGLFGWAGNGRDRGPIPVDNPGVERIRSWSQHSVGASTLPLPPPGLVELFLSCSCAR

SEQ ID NO: 111197 - protein, 1229 aa, Oryza sativa
  unsure (1)..(1229): unsure at all Xaa locations
  Clone ID: PAT_MRT4530_15198C.1.pep
MSDVLSGLSLLASKSDLVDLRRSVAVVTSRLTSLEQHHGLSAPPNNSSAPRLGGTGILPNPSQLPSGADTATEHSSDSGNNGGGVPRYYKLEFPKFDSKEDPLNWLNHCEQFFHGQRTDAGDRVWLATYHLTGNAQEWYFHHEQHKGPPDWDTFKDLCYAQFGPPIRHNPLGELKRLTQTTTVAAYQCRFLALASRTAELLTENQQVQLLTAGLREDLAIDVEINRPDDLQEAMSLARAFERKALKQADGTQGRSQHLRLGGGGCSDSGVGIGGCWHPPPLGCATGGTHPIGRTSFRTAHATVPATPSGAGATATDNADSAPKQFHQLSLAELVDRRRQGLCYNCGEKFVRGHKCARLFYIEYDETAPDDDIPVADDDHSANEPHVFLNAISGIDGHTMNLPVIVGDERVVALVDSGSMHNSVQPQLVQHLQLPLSPVHSDLHVIVANGDRLEITLYSLAGSRPLLCAALANDDLLPRLLAEFDDLFAEPQGLPPACTIDHRIHLKTGSVPVAVRPYRYPQLQKDKLERQCATMLQQGIIWPSTSPFSSPVLLVCKSDATWQFCVDHWALNAVTVKDKLPIPIVDELLDELRGACFFSKLDLRFGYHQVRMHDADIHKTAFRMHQGHFESLVMPFGLTSAPAKFQALMNTVLAPFLRRFVLVFFYDILIYSSTWSEHLQHIRAVLHVVRDNKLVLKRSKCRFGERTVHYLGHVVSAEGVAMDEQKIQAVENWPPPRSAVHHWRAYLWGRTFTVWTNSYSLKFLLDQHLFTIPQHHWVSKLMGFDFTVEFRPGRVNVVADALSHRDQEDATASLSAISVPSFQVLTDLRQEVAMDTDLSALRDKIRDGTQGLAWAVCDGLITHKGRIFVPALSPLLPTLLATAHAGHRHGLRXRVVEGLPRIHGKLVILTVIDRFSKYAHFIPLGHPYTATSVAXRAFFGEVVRLHGIPSSIVSDRDPVFTSMFWKELFGLSGLKLNLSSAFHPQSDGQSESANRVVGMYLRCLTGDRPHQWLRWLPWAEFCFNTVFQSSLKMTPFQVVYGRPPPALRTYDRGSARVPAVEQALADRDEFLTEIRDRLVLAQDYAKLYYDDKHRDVAFGVGDWVWVRLLHHQAASLPGFSRGKLSPKFYGPFQVLDIIGEVAYRLRLPAGARLHDLFHVDVLKQYHSEPPASTPTLPATVNGRVLPRPAAVIRGRIARSEREVLIQWDGMAAADATRENEAAFRHHYPEF

SEQ ID NO: 111198 - protein, 71 aa, Oryza sativa
  Clone ID: PAT_MRT4530_15199C.1.pep
FRCAPCCRITAGPVWFLDDGGEDRSKGGAATPPRRCTLIFKLSATFCNLFHDGSVSCDSQHFCCMSNAMYT

SEQ ID NO: 111199 - protein, 144 aa, Oryza sativa
  Clone ID: PAT_MRT4530_151C.1.pep
IASHRPTAPRHPLHFPSPPPKHRRHAHHLFPPPSPTPAAHHRHHSCRRFAPPTSPASPPRGLARPPLRFPLSCRQPAASCRHPHPPHAAPPPPPHSLHPTAPRPWLRRGRASSERRSRHLPCRPPPSFPPPGASPWSSRRRRPR

SEQ ID NO: 111200 - protein, 97 aa, Oryza sativa
  unsure (1)..(97): unsure at all Xaa locations
  Clone ID: PAT_MRT4530_15200C.1.pep
MGSLVRCNRPGNRHNCHNRHRDPPVSDPGKCGGLLGRPRFDRTLVTPAPVGLTCGRPGLLADGGCGAFHTIRINYNRHTXPISGGAHFTFNTHSSKT

SEQ ID NO: 111201 - protein, 51 aa, Oryza sativa
  unsure (1)..(51): unsure at all Xaa locations
  Clone ID: PAT_MRT4530_15201C.1.pep
NEVNRVSAVLLHNEDSSTXRLLDTYVSSISNCLRRTLHIYVCLALCPLAGI

SEQ ID NO: 111202 - protein, 440 aa, Oryza sativa
  Clone ID: PAT_MRT4530_15202C.1.pep
MSCFSCFKPEKKMKSKGMEAREVTVVKKHGASLKNSESEKLPCVSSDHKQSSEAAANTEPHNGSPVTARTGKKFTFRELATATNNFRSDRLLGEGGFGRVYKGQLENGQLVAVKRLDLSGFQGNKEFLVEVMMLSLLNHPNLVSLVGYCSDGDQRLLVYEYMAHGSLADHLLENTPDQVPLSWHIRMKIAHGTAKGLEYLHEKANPPVIYRDLKSPNILLDNEYNPKLSDFGLAKLGPVGGKAHISTRVMGTYGYCAPEYIKTRQLTTKTDVYSFGVFLLELITGRRAVDSSRPECDQILVKWAKPMLKNPSRHHELVDPLLRGDYPRGDLNQAVAVAAMCLQEEASVRPYMSDTVVALGFLAEVPSGYKEKINTVPQNKQDKDPSFTGSTKQDQRSFDRQRAVTEAIEWGATRQKQKAQIQEKTSHLQGIVAPTETNRL

SEQ ID NO: 111203 - protein, 59 aa, Oryza sativa
  Clone ID: PAT_MRT4530_15203C.1.pep
DLTLRQAIYSGAFNQTAEGLHSPKKKCLYWPPMAMSISNGTLGFPIRPLKGTPPGPLSE

SEQ ID NO: 111204 - protein, 144 aa, Oryza sativa
  Clone ID: PAT_MRT4530_15204C.1.pep
CRNHGLTAPPPHRPLSSSTSRAPLPQPPDTLIGSTNHTAIAASPSRCSHPSAHRAEPRRSRPPQPSAHLTDPRRQARVAVSAPDLRLGARLRAPRSSSVGVAGLVAKPIPSATDRSTPPRLLPPSRRRTPPVIPLRHHCLLRRA

SEQ ID NO: 111205 - protein, 40 aa, Oryza sativa
  Clone ID: PAT_MRT4530_15205C.1.pep
RCYFPNTQAIIYVVDSSDTDRLVTAKEEFHAILEVWATCA

SEQ ID NO: 111206 - protein, 104 aa, Oryza sativa
  Clone ID: PAT_MRT4530_15206C.1.pep
MGKQIRKEFEAQAQRVNRKRCHGEKKKPWAPTSSVLQDLDGWDRDELNKNSPAPRPRIVNHWGFVGAPMVHAPVVESQDPAIPMLDPPCLEGERGSAPPEWHNN

SEQ ID NO: 111207 - protein, 45 aa, Oryza sativa
  Clone ID: PAT_MRT4530_15207C.1.pep
FSLTNMGHTACWLWHVPAQCPTDCLPACLPACTCAALLPCCAACA

SEQ ID NO: 111208 - protein, 63 aa, Oryza sativa
  Clone ID: PAT_MRT4530_15208C.1.pep
MGLTWALHALSSPPKTEPRGGVGGGEGGRGSGGEGGLGKHVSLASEALDFLSHHSRIWSRDPR

SEQ ID NO: 111209 - protein, 161 aa, Oryza sativa
  Clone ID: PAT_MRT4530_15209C.1.pep
MGGWAAEQASEAGCPTSGGGGSACAATGIPKMVYNCAGDETLDWGRGGAAMVGAGLAGVVVAAVVAVVIDTAIATALSESKPVYISVGCNLAGLSHPTFSREPVPLFISPRLSNKANLEYAVEAAADFLNKAVKPMMVGGPKFRVAKAKKAFAGIAESSGY

SEQ ID NO: 111210 - protein, 898 aa, Oryza sativa
  Clone ID: PAT_MRT4530_1520C.1.pep
MKKKKKKNNNGTEVSMTAGPTCQPIYVVILLPPLLQAPFACGDGGPTVAVRGDDNGAAVSLAEVGATTGQWWPCTATASQQWPRGGDDDGPAVAVRGDEDGAAMSPAEVGAATTGQWWLCAATTTGRRCRWQRRWGRRGAVGRRRGRRTARQRPGGDGGGAAAWGRRRWRAETPMQQVEGRNCLPAEVRIGLETLKRRRLERMRLTAQNNAGDGPPVPARSGGDALRTPANCGVRLHANNGTALPSRTTQNKDPFAKRRVDKFDMSSLEWIDKIEECPVYYPTKEEFEDPIGYIQKIAPVASKYGICKIVSPVSASVPAGVVLMKEQPGFKFMTRVQPLRLAKWAEDDTVTFFMSERKYTFRDYEKMANKVFAKKYSSASCLPAKYVEEEFWREIAFGKMDFVEYACDVDGSAFSSSPHDQLGKSNWNLKNFSRLSNSVLRLLQTPIPGVTDPMLYIGMLFSMFAWHVEDHYLYSINYHHCGAFKTWYGIPGDAAPGFEKVASQFVYNKDILVGEGEDAAFDVLLGKTTMFPPNVLLDHNVPVYKAVQKPGEFVITFPRSYHAGFSHEQELRSCPCKSNQVVYVREDIQELEALSRKFEKDICLDKEISGFDSYKQAEKNEPFFEITRNLRNTEVNLIEDAFSGATAADAAKSSPATSTLTSFAQHDVPVLAEAIVCANQADQLYSTTEQTISSPLVKGTDAVGANSSSMADANNGTGSCNASAVEYSGNSDSESEIFRVKRRSGVSVKPASDAKTSNLSDQQVLRRLKKVRPEIQQHNKRPEDYGHCSVPSGRMSMKNLNSSSSCGEEHWRMKRRQLETQQDESSYSAKQKSYSYPSTSYSFRGEFVEMSRDAAAEVRPKRLKIRLPSSSTNRVVEQGSSGQRFTRDDKSLGCWPAI

SEQ ID NO: 111211 - protein, 36 aa, Oryza sativa
  Clone ID: PAT_MRT4530_15210C.1.pep
GRGTQERSLLQLHLKRMNGTMIPNTRRCLSSPGFQD

SEQ ID NO: 111212 - protein, 1736 aa, Oryza sativa
  Clone ID: PAT_MRT4530_15211C.1.pep
MGRLFVSGGLGAPDFYPQTLSCAEETLTKEYVQSGYKDTVEGIEEAREIVLSQIPYLSKPDIATKCKEALKKRFRAINESRAQKRKAGQVYGVPLSGSLLTKPGMYPEQMHSNEDTRRKWIEALVQPNRRLWSLAEQVPRGFRRKLLFNYLIRYNVPLLRASWLVKVTYLNQVQTSSNNVSSAAPDSLRSQHWTKDVIEYLQLLLDELCSKNGFFGLPSSQEQSLPCLVAGDSPIKLKTGASPASADVEEPSLHFKWSYMIRIVQCHLMEQLLVPSLLIEWVFNQLQERDSTEVLELLLPIVLSLVDTITLSQTYIHMLVEILIQRLSDASPGSLSVKNNPKRSSITSALVELLQYLILAVPDTFVSLDCFPLPSVVAPDVYGKGALLKIAGGGKIASSRRQNASRHLSCGYAICSVQRRASDLSLVANPNLQVRGAANVVQALDKALVTGNLTAAYTSVFNYLSDTLMEETWIKEVSPCLRSSLMWMGAVELSLVCSVFFICEWATCTFRDCRTSQCQNVKFSGSKDFSQVYMAVSLLKDKMNEINNLSSSKSSSQLAMKDHLKSATLNHSSIKVTAMETASGFRDSTGSIDENNKKDIFSSPGPLHDIIVCWLDQHEISDASGFKSVDVFMTELIRSGIFYPQTYVRQLIVSGITIWNDSLFDLEKKTRHYKILKHLPGFCLFNILEEAKIAEDQVLYEIVSTYSSERRLVLSELSSGLATDANVEGRVPLSSCLQKQPDLLMDSTDDNHGRVAVQVEEVKLMISGREETKKTKKGQTDLVDSEEDVGHAKTGCKDSSRTKRQKLDKNVFPFQGSPLVQSDEEDFWWVRKEQKQELFTVETIHQSIEQTSGGKATVVQKTQNIAQLAAARIDGSQGASTSHVCDNNLSCPHHKPGTNSDILKDADHMSMLTLAEVGKSLKRLRLLERRSISIWLLKSIKQLIEGDEVKHSKANNSISASTVQHSGKIASGWRFGEDELLSVLYIMDTCCDLLSSVRLLIWLLSKIYIGRTTSGQVGRGVMHPKHKENQVFQVAEAFLFSSLLRYENILIAMDLLPEVLSVSMNRTVHKSGERQSTSVAFAYARYFLRKYRDVTSVARWERNFRSTSDKRLLAELDSGKSITGDSIISGISSDCIRQNGGANPDGDHSLVASAVSAIVDNAGHAIAKHLDISGGNNPGVTSINSLNLIQHILDIHINSLALLRETLGDRFSRIFEISLAVEASSAVAASFAPPKAHRSQQSSETHDESGNHANEVPSNPSKCFNVKAVKVSAAVSALVVGAIIYGVVSLERMMVVLRLKEGLDILQFLRISKASTNGVTHSIGNFKIDSSTEVLVHWFKILIGNCKTVYNGVIAEILGDSYVLAFSRLQRTLPLGIVLPPAYSIFAMVLWRPYLYDTSTSNHEDIQLYQSLLGAISDITRHQPFRDVCFRNMHLFYDLLAADVGDSEFAAIVELRSPDECLKALSPLRARVFLNALLDCEIPVTMRDDGTYALEPGCAEASTKNDVKFPERLIEILNVLQPAKFHWQWVELRLLLDEQSLIEKPKNVPYVKALRSLSPNAENFTLSEREKGLTEVILSRLLVRPDAAPLYSELIHLLGKLQESFVMGIKWFLQGQDVLLGNNSVRQQLVNLTQRKGFPMKTQFWKPWGWSKLVGYANANKSSKRKLEVTSIEEREVDGLIDSRKSSNRKSLNVGTSPEGHGSTQKYFTQEALAEFFLLCIYFCFCLFNFLFFFLP

SEQ ID NO: 111213 - protein, 43 aa, Oryza sativa
  Clone ID: PAT_MRT4530_15212C.1.pep
GVLAQAGTTIGTAHKLHVWTRCLTCQGTYRIHGDTSEPRTRTG

SEQ ID NO: 111214 - protein, 59 aa, Oryza sativa
  Clone ID: PAT_MRT4530_15213C.1.pep
IHELGTDCIRHVHTMHLLLKCVSPQGHEYPLIFLDEEGLRMTIVANGHESCLGYYIVVK

SEQ ID NO: 111215 - protein, 138 aa, Oryza sativa
  Clone ID: PAT_MRT4530_15214C.1.pep
MDAGLGRARREAVAVAGEGEEGSGGGEQRGREEEGGGGGEWATRARISHKREEARKKREGKKNNGLEKGDTSHCEPSFLRVSSVSEDTLGVSHIVDVLRSSAVAGDRRRPHCPHALLPYRFQGASEGGRPGNITTLRH

SEQ ID NO: 111216 - protein, 143 aa, Oryza sativa
  Clone ID: PAT_MRT4530_15215C.1.pep
MSWKDLPRDQWWKHLRKTATTSKKPPSKTIPGFTVEGCDLTEGKSTREFSVLTHATFILMAVISEPWVHVHAWVSLSAPLLMKCEFGQNRQKCMCDCKPSPYAVLLANSTGTVARSADNRVREGMAGETAVYSKQYSVLVSGE

SEQ ID NO: 111217 - protein, 64 aa, Oryza sativa
  Clone ID: PAT_MRT4530_15216C.1.pep
RKNHKKANAGVGDCVKGNLRIRKKFATSCFRNDHKTFCVEKLGAKFVDCLYGFRNLTGWPYKLG

SEQ ID NO: 111218 - protein, 234 aa, Oryza sativa
  Clone ID: PAT_MRT4530_15217C.1.pep
MKIVLLKGRARVDSNTSDVTSQQQSGTPMKNAAQSSSRQDPRLEGSGRIIKTILSNKEGRHVVTSQHDQEGHIITAEKRPPRIPNPRSVVKDQVVENAEKNHLDDKHSHLHGSGLISEKTERHARNRDRPDRGVWAPRRYDKSASGGTHSSSSEFSPMQQHSGENFCQQADGHRHANRRGPPRGLKEMEISASTSDGKPSKRASANMVLMRYSSKQILQVVEFWILQLDPVKYC

SEQ ID NO: 111219 - protein, 88 aa, Oryza sativa
  Clone ID: PAT_MRT4530_15218C.1.pep
ILISSEDGSPYLYPISTSSSITDWHLTAVSFSPTQGMCISETTVSVFQDFFIQLHLPYSVVRLEQTQVIATIFNYGIRGFEVCALFST

SEQ ID NO: 111220 - protein, 133 aa, Oryza sativa
  Clone ID: PAT_MRT4530_15219C.1.pep
SGLISEKTERHARNRDRPDRGVWAPRRYDKSASGGTHSSSSEFSPMQQHSGENFCQQADGHGERKIDPRGHGGIRGGPVENGHRHANRRGPPRGLKEMEISASTSDGKPSKRASANYGAHERQVWVQKSSSAT

SEQ ID NO: 111221 - protein, 400 aa, Oryza sativa
  Clone ID: PAT_MRT4530_1521C.1.pep
MALVDGTRHEKLVDLPPTLGLLCRKTSKPSTNTLAQNLEDGGMGFHRYYQRRITRTGFRAITTCRLPLTNSWDTQQTKVLTVKYYDLRTVNTLTKPSNLGFAITGTPLTEIDLHNLQLNAQAMNAWFNSLSQEEFDRVSNLATAYEIWNKLAEIHEGTSEYKDAKLHFLKIQYVTFSMLPHESVNDMYGRLNVIVNDLKGLGATYTDLEVAQKMLRSLQEKYETLVTMLINSDMSRMTPASLLGKINTNDMYKLKKKEMEEASPSKKCIALQAKVEDKGKSKVNEANDDLEEEIASLARSEKGHFASKCPSKDDDGDKSFKKKSGGNKLMKKLKKEGKKIEAFIGQWDSNEESSAVTSRNSQIEFQAECVLKPLSRTGQGTQTTKLTYRSTSYEPYRSVT

SEQ ID NO: 111222 - protein, 199 aa, Oryza sativa
  Clone ID: PAT_MRT4530_15220C.1.pep
MRRGGAAEEDAEAARFRGVRKRPWGRYAAEIRDPAKKARVWLGTYDSAEDAARAYDAAARALRGAKAKTNFPLSLPHAQPQLHHHHHHHLTYPAAAVVAARPATSSLSSTVESFGTRPRPVLPPRPPPPPPIPDGDCRSDCGSSASVVDDDCADAAASPSCRLPFQFDLNLPPGGGGGGGGGFGCAYDDEELRLTALRL

SEQ ID NO: 111223 - protein, 164 aa, Oryza sativa
  Clone ID: PAT_MRT4530_15221C.1.pep
MVVVPLGPATRTHSASGKRKPIAATPAGDPHLDHVGTTFGPLIINHEEPTPTNATALSNHVHVREGKERDTRRERKRKMPRAQIRCWFSSMQQLFSEAIAVDPQFVIVPLHGDAMLLAHCILSSQAQKLSSAIPSRIKDAYMHARICVVFGDDRFEDLEIIFVM

SEQ ID NO: 111224 - protein, 163 aa, Oryza sativa
  unsure (1)..(163): unsure at all Xaa locations
  Clone ID: PAT_MRT4530_15222C.1.pep
VKFPVVACASWCVANPNVDNAALQRALDWACNNGADCSAIQLGKACYEPNTLVAHASYAFNDYYQRKGQASGTCNASWCVAKAGVGHMVLXAALDYACSKGADCSTIQVGKTCYQPNTLVAHASYAFNDYYQRKGQANRTCYFESTALIVHKPSSSNFPLPIF

SEQ ID NO: 111225 - protein, 211 aa, Oryza sativa
  unsure (1)..(211): unsure at all Xaa locations
  Clone ID: PAT_MRT4530_15223C.1.pep
MTCDTTXXXXXGDYLRRRIAPIQRRARGAWEYTVFXDCMRTHQGVRWDWAPEDFKILVQPMLNINYVEAALITQGMLPLCSDPNRAFILTIMMAVGASEERAPKGHYGASRNRRGEQSTPREGRASVSRGRGPGSKRPTYARWKMKHGGTPSPSAFRGGGAERASRKAPYVCPPAXVPEGERKKKRSLKMEETEPSLGNPYSPSKWAITDP

SEQ ID NO: 111226 - protein, 117 aa, Oryza sativa
  Clone ID: PAT_MRT4530_15224C.1.pep
CHPRGCSPRHSPSTPWNARTWFQPRWRCRKRRSPADAWAGDLHDGVLERVLARLPPDTFFRLRAICCRWSAAAASPHLRPHPVSDSDRIAAVAAGPGAASPRPMLPALLVKRTWCWP

SEQ ID NO: 111227 - protein, 49 aa, Oryza sativa
  Clone ID: PAT_MRT4530_15225C.1.pep
MRVAGDASNLPGRRLSGSRGGSGTSRVQQITKFGKDNLKDLNDKGHKPR

SEQ ID NO: 111228 - protein, 83 aa, Oryza sativa
  Clone ID: PAT_MRT4530_15226C.1.pep
RCVRLPAIDAVADEDRLTYLVFMLHVFAGVLFLGVQGFLPPPWQSFFFFGRTLIHIQGPRLFRRLPGKHPVPSNFFLFGEFPL

SEQ ID NO: 111229 - protein, 103 aa, Oryza sativa
  Clone ID: PAT_MRT4530_15227C.1.pep
LNDCKRMVHHKLLVRFLRSITLSCFRNCIRISYELVFALVIIVELHFKLVDAAGPYSVINNMIKKSKVTSIMYCCLNFIYYRFTGTCGLRGSLGHLLKLVWMT

SEQ ID NO: 111230 - protein, 431 aa, Oryza sativa
  Clone ID: PAT_MRT4530_15228C.1.pep
VSRCSASWGSRGSGRRRLPWRFAGAWRRSLPARQWCRCLRCSTQLINCKTYLTRYLIVIDDVWSISAWEAILSRLPDNKCNSRIIVTTRIEHVARACRSASLEEEYYIHRVKPLQFEDAKKLFINAVFGPQQDCPEHLKDIMHKILTRCSGLPLAIFCIVRLLAGYRSPEGAVEMWTRVCNSTGSLMENNPTLNGMRHIITLSYNHLPHHLRACMMYLSLFPEDYVVDKRRLLYRWIAEGLVSEQRGLTPMEVAESYFAELVNRHMIQPSCTETLGTLMGCRVHDMMLDIIVCKALESNFVSFVGGQCRDPSYGSVRRLAIQSDDLGSSIENTNLRHVRSLTTFRPQGHRKLLDCLAEFTLLRVLDLQDCKDLQNKHMKHVCQLFLLRFLSLNGTDITKLPSQMNKLQHLQALWLISTLLVKVPESLVDLE

SEQ ID NO: 111231 - protein, 59 aa, Oryza sativa
  Clone ID: PAT_MRT4530_15229C.1.pep
SDHKSKMNFRSDDLNLIQSEHEITRDQMIRNLTRIEAIQNIYMTGSNSTQPDPTGPVTH

SEQ ID NO: 111232 - protein, 245 aa, Oryza sativa
  Clone ID: PAT_MRT4530_1522C.1.pep
MVNYRTGGSHWVLDSGCTQHMIGLCSPHLRSDNGSEFKNTNIEDYCDDLGIKHELSATYSPQQNGVVVRKNRTLIEMARTMLDEYSVSDSFWVEAINTACHATNRLYLHRLLKKTSYELIVGRKPNITYFQVFGCKCYIYRKGDSLTKFESRCDEGFFLGYASNSKVYRVYNKNKGIVEETADVQFDETNGSQEGHENLDDVGDEGLMRAMKNMSIGDVKPIEVEDKPSTSTQDEPSTSAMPSQA

SEQ ID NO: 111233 - protein, 547 aa, Oryza sativa
  Clone ID: PAT_MRT4530_15230C.1.pep
MFKALFLTVDEEEPLQLETGTDQEPKEQEPNPSLGTHKTPQNPTTTLPPFHPWPDSLRLAAAGGGQTMLLPLPPRRRLLLLIYPRRRPAAAAFSTLPTPPAAAAPISHRLRLLRSLQSVPADRLLSHPLPSTAHACLAAHLLARDRLYAHSRRVLSRLVALRRPHLAASLVDLLHRAALALGPRRSALASVVDTLLSVLADRGLLDDAVRAVARVRELRVPPNTRTCNHILLRLARDRSGRLVRRLFEQLPAPNVFTFNIVIDFLCKEGELAEARSLFSRMKEMGCLPDVVTFNSLIDGYGKCGELDEVEQLVEEMRRSGCKADVVTYNALINCFCKFGRMETAYGYFAAMKREGVMANVVTFSTFVDAFCKEGLVREAMKLFAQMRVRGAVLRMMEKAGVRANELLYTTLIHGHFMNKNSEKALGLLSEMKNKGLELDISLYGALIQGLCNVHKLDEAKSLLTKMDESGLEPNYIIYTTMMDACFKSGKVPEAIAMLQKILDSGFQPNAYTALVDGLCKNGCLNEAVQLFNEMVHKDSDTATDGKT

SEQ ID NO: 111234 - protein, 71 aa, Oryza sativa
  Clone ID: PAT_MRT4530_15231C.1.pep
SLRLPKRKRFLKTNFYSGLEGPLNQTQVDFSPPIPGQTKAGNNQALRQLNQTGCLLTTTEAEHQGEGGLLL

SEQ ID NO: 111235 - protein, 277 aa, Oryza sativa
  unsure (1)..(277): unsure at all Xaa locations
  Clone ID: PAT_MRT4530_15232C.1.pep
XSXPXXFPXXXXXAFSXXTRPXXPPXFSXXRXXDXPALVXXVXXXXIXXPXXFLSXXXXDTXDXPXXYTPRXALTDXTTKRXXSXYSXFRXXRLYXXGFSXXXHSLXXXHXXTXPTXXXXXSLXXXXXXAXXRXEXXXXIXLGXXXXLXSXTXXPXDXXXXXXXSXXRPTLFPSLSSLFRTGYXPXAXFAPLFXXSXXXKKKKNSXXXPLRSSXSXXRQVXSGSXLRRXXRXXATXXVAXGLXPXXXXXAXXGXXXXPSGXXQPFAXXKXXXVGAVE

SEQ ID NO: 111236 - protein, 74 aa, Oryza sativa
  Clone ID: PAT_MRT4530_15233C.1.pep
AGWPPQSPYRHITTVQPRAQHLPLQRCASLPFPWSVGPAHAAGVLVLVCLLCHPPHVVIIVPLIKKITLDGVLT

SEQ ID NO: 111237 - protein, 221 aa, Oryza sativa
  unsure (1)..(221): unsure at all Xaa locations
  Clone ID: PAT_MRT4530_15234C.1.pep
HSTRPSKCGTHIKITYQGPIFLHHTLSLPPINTTTXKTSPKPQMLYCIIAPTAAPTXQAAATTAIYASKSTSLPXKXQRVRDHAFNGIREVHKWVCRFITLHSLLFYKATLTALASSGGEVVSMLFSHLASLDVGYFLLHHLHTYHLFLHPVHYVLHALLTLHATSALRLEADVIASXLHVSIPRIRKLLLXPPRHRLFLEYICLLPMYVSLPNDFAPPML

SEQ ID NO: 111238 - protein, 57 aa, Oryza sativa
  Clone ID: PAT_MRT4530_15235C.1.pep
GRPSPTPSLSPPPPTGRRPGRAGRSRRSSSRIRRRPPPCRQRRRRRRRRTGRGCWSS

SEQ ID NO: 111239 - protein, 84 aa, Oryza sativa
  Clone ID: PAT_MRT4530_15236C.1.pep
HCKRCLYLWFAQVITRIQFEQSGHSVQMIVAELGSKALVGGQCPSSECVVSRMCGIQCASLAFPLQTGLSNLATSSAMFLVMLC

SEQ ID NO: 111240 - protein, 188 aa, Oryza sativa
  Clone ID: PAT_MRT4530_15237C.1.pep
MGMDWYAWLSAARLDQAVAYEYALVFSRNELEADDLAYFDHEFLHSMGVSVAKHRLEILKLARRSRRRAALSSRLVAAVDRVARYVRALVVVVVQGREDESSSALVLVPSQQLQPDVDKTPRRSRSKPKSTKEVAAAAAAPTTPKAMRSPVLAIGGRAASTVHAVKDGEKGGEDMVRWDRLFQDLKPN

SEQ ID NO: 111241 - protein, 281 aa, Oryza sativa
  Clone ID: PAT_MRT4530_15238C.1.pep
MDHKHHDGHSSIKHKLTQVTAPPLSRPPFDVNSQIGAHVPGWPFGKKLEGLNCFQRTGKASSKKDKTAALERERRRRYERFSLTKDTKRRGRREYQNLVCAAFVMYQLVMLRASRSNHPLLVGTNGLCWCEKQQYVLLLHLSASITVGFAKVVLMLADCGLDGDIARDYPIPTLFPNRSPPPTPLRSNLLFRCRCYQIWLLTSTVEVDEFDDTDKIVVDLFDEISRRLGSAYPGFVNYGGRRAGDDWKGRVTRVGCFNFEVRRRFLTALHLDGECIPHESS

SEQ ID NO: 111242 - protein, 68 aa, Oryza sativa
  Clone ID: PAT_MRT4530_15239C.1.pep
MASLLQEGICRVRGIPGRRCKTRRGSSAACSSRGAGHWRPEQAKPSTRDSSSRRLEGEGPDSGASSLP

SEQ ID NO: 111243 - protein, 114 aa, Oryza sativa
  unsure (1)..(114): unsure at all Xaa locations
  Clone ID: PAT_MRT4530_1523C.1.pep
MEEGEDGGQGRRPWRCSPAHGVERVPAAESDGRGVDGVAGTTANATASTTRLGTAARGERELGRXGGREGKWARGTRARGRRGRRGPGDVGAGRGGSGRRKGTGPTGLGKNFRV

SEQ ID NO: 111244 - protein, 416 aa, Oryza sativa
  Clone ID: PAT_MRT4530_15240C.1.pep
MALVLHCGSGNKNAFKALIAAEYTGVKVELTKNFEMGVSNKTPEFLKMNPLGKIPVLETPEGAVFESNAIARYVARLKDNSSLCGSSLIDYSHIEQWMDFSATEVDANIGRWLYPRLGFGPYVPVLEEFAITSLKRSLGALNTHLASNTYLVGHSVTLADIVMTCNLYYGFVRILIKSFTSEFPHVERYFWTMVNQPNFKKVIGDFKQAESVPPVQKKAAPPKESKAKEAKKEAPKEAPKPKVEASEEEEAPKPKPKNPLDLLPPSKMILDEWKRLYSNTKTNFREIAIKGFWDMYDPEGYSLWFCDYKYNDENTVSFVTMNKVGGFLQRMDLCRKYAFGKMLVIGSTPPFKVKGLWLFRGQDIPKFVMDEVYDMELYEWTKVDLSDEAQKERVNAMIEDQEPFEGEDLLDAKCFK

SEQ ID NO: 111245 - protein, 117 aa, Oryza sativa
  unsure (1)..(117): unsure at all Xaa locations
  Clone ID: PAT_MRT4530_15241C.1.pep
PPDFDVQLDTAQRLTFAIPSGKDVSMHRIITYTPNHVKPGSLVGWWLLPDVISQSTNFRHLSIRMYICLLDLRLNSLKVLVVDKLPQMSNETIDCFARKREKSKMSLCQXQLTGMPR

SEQ ID NO: 111246 - protein, 73 aa, Oryza sativa
  Clone ID: PAT_MRT4530_15242C.1.pep
MAKEQESPHREDEEEEEDEDEAFAVSAPPPPPPPPPPPPPRPPLHRPAGAPPPPSSSSCSHCSHSFPYWKKWR

SEQ ID NO: 111247 - protein, 684 aa, Oryza sativa
  Clone ID: PAT_MRT4530_15243C.1.pep
MDQQNLLPSNPTADEQNLLPNTLEDDDYPHYLLGSHEVEMPNGSVIGQQNTSLNLWDSAGSSSMGCVADHDSLFEAKREHFAPALSIRAPLIIGGRRHEGSSSLPSQSLNLDLNLNQADQFDSEDVDMIQSNGQPGINAFPLNRGLSIPEHVLRHTNSSSATGNPSQVASFSDGMTGQEVNLFGGHRSSCKRKNIDGSLAESSANGSSRNNQRNNIILEPSPSSHESTSGLTAPAPTNHVFSYSPVEQLNQNTNMSANAMLSDHYSLYGDHERERFLRNTRMRTSPNEYDQSSSNLLPEGSLRCSVYQPTQQQSLFIPVQPRASSSSTSSLSRPYVPAVTQFSQNLHRAPSSGNFGSRIGIFPSSADTTNQLSSQDPNRSSVRGNFPEPLLLGSSLFPSDSAELLSMPGGRSNQQNSSSTIRTAVNIGAQQIAGLNASQPTSSSRGSVDIVRRSLQAASVPQSRGSSITSQQQRGHSSTSHEIRSHQPGSSSRANQQHYVRAVPHSVDRQNSNYLDLQSFMQSIAASRDGIRTVSESANQLVHLRNVVEQIRQGRGGRFEDPNFERALFARRASLIDRHRDMRLDVDNMSYEELLALGERIGYVNTGLSEDKIRTGLKQWKYVSIPIEEPLTGVEPCCICQEEYAEGEDMGRLDCGHDFHTACIKQWLVIKNLCPICKKTGLGT

SEQ ID NO: 111248 - protein, 394 aa, Oryza sativa
  Clone ID: PAT_MRT4530_15244C.1.pep
MMELCRIRTFQKSLLRPLLLLQHAPCRTLQTLGRSPSPSVFRPPRRRPPLLLLLLRSSFASVSPGPAPGSGTGECPPPPPAPLPPDELASDDDAYYHEHILEATQEDQSRLVPVKAYFPCTSINLKSLQSQNSFNVIPPTSRATNYVVLRYYDVKGDPEGFKAGIIDESHCHYMVVFQYGSIVLFNVSDHEADGYLKIVEKHASGLLPEMRKDDYAVVEKPTLETWMQGGLDFIILRDLSIDGIRTIGSVLGQSIALDYYIRQVDGMVAEFTDINRGMEKTGTFTMERKKLFQLVGKANSNLADVILKLGLFERSDIAWKNANYAQIWEYLRDEYELTQRFGNLDFKLKFVEHNIRFLQEILQNRKSDFLEWLIIILISVEILISVYNIVQEQM

SEQ ID NO: 111249 - protein, 198 aa, Oryza sativa
  Clone ID: PAT_MRT4530_15245C.1.pep
HGPSPPPFPAAAGALTEAKVVTNLTAEKNITVFVPNNSAFAKIGSVLANASESDVADILAYHVVNGTVGYSSDLKNGTLTASDGTKLNIAIYNGTVFVNEAKVIVPDVLIANGVVHVIDGVLNPDKPSATANPTASTQEAAFSGASSVSDVPFTSGVPEGTAQATGLSPSTSTEGATQATAAIALGALFGGAALIMNA

SEQ ID NO: 111250 - protein, 232 aa, Oryza sativa
  unsure (1)..(232): unsure at all Xaa locations
  Clone ID: PAT_MRT4530_15246C.1.pep
FISPSLYRISFLLSYLYCLLRSVLFYFPTLLRSYIYNGYFTHSILLFCLIASIFCFSCLVFSCYLFHTPLSLVLFSLSIFHHSLSFLLSSCCSYLCLSLFLFILLQFTFIXLLPYNSYILSVYFTFRVVISLLLLCSHDHIIIYCFFFSHRSSWICIFSXCSISIIYSLILAVYRFXSCYASPASVCVPSSLYXIHPCIYXVHYLSYLSVVYFCASSSYLLYVYDCYMSYHI

SEQ ID NO: 111251 - protein, 54 aa, Oryza sativa
  Clone ID: PAT_MRT4530_15247C.1.pep
SPAIQQKNHSVIACWYICEEETDGLPRAWFRIAQSEKYEMTLTHVYHVHRCDIF

SEQ ID NO: 111252 - protein, 180 aa, Oryza sativa
  unsure (1)..(180): unsure at all Xaa locations
  Clone ID: PAT_MRT4530_15248C.1.pep
PXRPXTQAGLTTETHPHKLGNSXHEXGTNTPLTLTXPNLXPFTLCLEHPDPLEPTHHAKEPXRHHTATTXTPTYXQHTRFSHLTTVXHPNHGHTXTFFSLAIGTHXXSGERERTPLFGAPELHTGLNEHTTILXKLPTFVDXTSITHPTAAPRXGTTTHXGFQNNDFKEQRFFPPPTSPF

SEQ ID NO: 111253 - protein, 55 aa, Oryza sativa
  Clone ID: PAT_MRT4530_15249C.1.pep
FLLGCPSYNQGRFQGVFTWLGGAFYHFVMIPTKLSIKEESFLPYGSKNPKIWTPM

SEQ ID NO: 111254 - protein, 123 aa, Oryza sativa
  unsure (1)..(123): unsure at all Xaa locations
  Clone ID: PAT_MRT4530_1524C.1.pep
SGRIGSLTYRIGSVSPSSTWRPPDLRYKRDPPGRXKGSNLRANTTYTAYEARAYEEPSHRELMLVPTYPNTLYIRSTGITRRHRSSKKKLQPIQGTYKRTCKRAATGGRRDVGFGSLERKALP

SEQ ID NO: 111255 - protein, 70 aa, Oryza sativa
  Clone ID: PAT_MRT4530_15250C.1.pep
MEPWPDGALFPSSRRYHKIRACYVRGALYMLLVMVMGSACTYSCCYRSRLRQQYELQEKPCGDSCHACVH

SEQ ID NO: 111256 - protein, 339 aa, Oryza sativa
  Clone ID: PAT_MRT4530_15251C.1.pep
MAIPKALLFAILSCLCLCSAVLAAREQSDHAAMVARHERWMEQYGRVYKDATEKARRFEIFKANVAFIESFNAGNHKFWLGVNQFADLTNYEFRATKTNKGFIPSTVRVPTTFRYENVSIDTLPATVDWRTKGAVTPIKDQGQCGCCWAFSAVAAMEGIVKLSTGKLISLSEQELVDCDVHGEDQGCEGGLMDDAFKFIIKNGGLTTESKYPYTAADGKCNGGSNSAATIKGYEDVPANNEAALMKAVANQPVSVAVDGGDMTFQFYSGGVMTGSCGTDLDHGIVAIGYGKDGDGTQYWLLKNSWGTTWGENGFLRMEKDISDKRGMCGLAMEPSYPTA

SEQ ID NO: 111257 - protein, 228 aa, Oryza sativa
  Clone ID: PAT_MRT4530_15252C.1.pep
MTHMFPYDGASSSSTSLSSQKSETDDDRMIAMVLSEEYAKLDGAMAKRLSNLTSIPHVPRINTYFPTYSDATMDHHRLLDRLNVYGLYEVRVSGDGNCQFRALSDQLYRSPDYHKHVRKEIVKQLKACNSLYEGYVPMKYKHYCKKMKKSGEWGDHVTLQAAADKFAAKICLLTSFRDTCFVEIVPQYQAPQREIWLSFWSEVHYNSLYDARDLPSKYKPRKKHWLLF

SEQ ID NO: 111258 - protein, 71 aa, Oryza sativa
  Clone ID: PAT_MRT4530_15253C.1.pep
VDSRGSPHWSSPRLSVVSPLLPPAPRPPCTGFATTANYFGHLAGWVAAAATAAAVFRPLPPRQVAVVAWTG

SEQ ID NO: 111259 - protein, 110 aa, Oryza sativa
  Clone ID: PAT_MRT4530_15254C.1.pep
TTGKQQLAQFAQGPCLPPCMASCIAIFHPSCLLAESQHQITCLPCSASILATWCHSGTEASMPLVSLHATLLACRSCHCACDLQPWLVELTPCQRYASIVLGYTDPWCHG

SEQ ID NO: 111260 - protein, 350 aa, Oryza sativa
  Clone ID: PAT_MRT4530_15255C.1.pep
MASRSISSCTTETAKGIHRFEIFSYSMMNTEAEDDSIRSGVFNGYIGVYLELISKNGEPWALVDVNLINQLQPGQPRQLFTKTDVPTPFRSSSFQESTLGSLKCMKRSDIESTPGFIVNDCIVIECNVTVIYEPKVSKTRALCDAETSSALREIEVPPMEISSDFAKMLKDGVGADVTFRVGEDTFRAHRAVLAARSPVFHAQLCGPMKEKKETQMQEITIQDMQPSVFEAFLYFIYTDCVPRMDDLGNGEKMHLMMHLLKAGDRYGLERLRIMCERFLATNLDTEHVSAILGLADLLDLKKLKEACMEFMVPSERMDAVAASQGYQQLKRAFPSLAFEVWERRSRVRRN

SEQ ID NO: 111261 - protein, 117 aa, Oryza sativa
  unsure (1)..(117): unsure at all Xaa locations
  Clone ID: PAT_MRT4530_15256C.1.pep
PPAPPASRPPSRPPENPVGPPRRRPHPPGPPRGPAHPSPEPXNHTKPRRRRNAHPRAPAPPVRGGTGQPTRPKAPGPPPNHPGPRSANTRPSAPTPSPAHSTVARGPGRTMVPGNPK

SEQ ID NO: 111262 - protein, 370 aa, Oryza sativa
  Clone ID: PAT_MRT4530_15257C.1.pep
MASRSISSCTTETAKGIHRFEIFSYSMMNTEAEDDSIRSGVFNVGGFDWALLYYPDGIDDDSKGYIGVYLELISKNGEPWALVDVNLINQLQPGQPRQLFTKTDVPTPFRSSSFQESTLGSLKCMKRSDIESTPGFIVNDCIVIECNVTVIYEPKVSKTRALCDAETSSALREIEVPPMEISSDFAKMLKDGVGADVTFRVGEDTFRAHRAVLAARSPVFHAQLCGPMKEKKETQMQEITIQDMQPSVFEAFLYFIYTDCVPRMDDLGNGEKMHLMMHLLKAGDRYGLERLRIMCERFLATNLDTEHVSAILGLADLLDLKKLKEACMEFMVPSERMDAVAASQGYQQLKRAFPSLAFEVWERRSRVRRN

SEQ ID NO: 111263 - protein, 288 aa, Oryza sativa
  Clone ID: PAT_MRT4530_15258C.1.pep
MGLTCFAPPCDPDGGNGEWRRWLKRQLISSHACRPSQLLSFPCSRFIVTMADALPGVPTTHRCHRQIHAQGRGGSGIHVEGEIPAHQSHARGRGRARWICPSHRCHRQIRHALPTAAATSIVPPPSRQRMPPDPCTRDSRWKNPCERGKSMTDPLFPADPAGSPRCHWNRRYPNRSSSASPEPCVGEGRWRDPRGRGRARRIYPPLIVVVVIIPPRRHQVHLWIHAEGRGGGVIHAGGKEPAKSAPSLVAAGGSSGLFLPPLSHWSSPLPVVDTCHLGCKRAYHHLPK

SEQ ID NO: 111264 - protein, 72 aa, Oryza sativa
  Clone ID: PAT_MRT4530_15259C.1.pep
PPPPPPPPPPPPPPPPPPPPPPPPPLWPIMHTGCPLFYKNFEGLSPKKLGGAPFPKKNFEKIPGGEGAQKKG

SEQ ID NO: 111265 - protein, 1500 aa, Oryza sativa
  Clone ID: PAT_MRT4530_1525C.1.pep
MSDEVNHVEKAPMFNGTNHSTWKIKMSTHLKAIDHRNLQLNAHAMNALFNSLSQEEFDRVSNLETAYEIWNKLAEIHEGTSEYKDVKLHFLKIQYETFSMLPHESVNDMYGRLNVIVNDLKGLGANYTNLEVAQKMLRALPEKYETLVTMLINSDMSRMTPASLLGKINTNDMYKLKKKEMEEASPSKKCIALQVEVEDKGKGKVNEANEDLEEEIALLARRFNDLLERRKERDKSSKKKSGGYKLMKKLKKEGKKIEAFIREWDSNEESSASSGSEEEGGDDASSKKKKMAVVAIKEAPSLFAPLCLMAKGSSKVTSLSDSESDDECDDVSYDELVSMFEELHAYSEKEIEELHASLEVLYEELKTSHERLTISHEKLKEAHDNLLSTTQHGALIDVGISCDLLDDSATCHIAHVASFSISTSCDDLVDVPSSSSSSCVSICDASLVVENNELKEQVAKLNKSLERCFKGKNTLDKILSEQRCILNKEGLGFIPKKGKKPSHRATHFVKSNGRLMMVALLLDMWVPLYSVVNYRTGGSHWVLDSGCTQHMTGDRAMFTTFEGGNEQEKVTFGDNSKEKVIGLGKIAISNDLSIDNVSLVKSLNFNLLSVAQICDLGLSCAFFPQEVIVSSLLDKSCVFKGFRYGNLYLVDFNSSEANLKTCLVAKTSLGWLWHRRLAYVGMNQLSKLSKRDLVVGLKDVKFEKDKLCSACQAGKQVASSHPTKSIMSTSRPLELLHMDLFGPTTYKSIGGNSHCLVIVDDYSRYTWVFFLHDKSIVAELFKKFAKRAQNEFNCTLVKIRSANGSKFKNTNIEDYCDDLGIKHELSATYSPQQNGVVERKNRTLIEMARTMLDEYGYASNSKAYRVYNKNKGIVEETADVQFDETNGSQEGHKNLDDVGDEGLMRAMKNMSIGDVKPIEVEDKPSTSTQDEPSTSATPSQAQVEVEEEKRQDPPMPPRIHIALSKDHPIDQVLGDISKGVQTRSRVASICKHYSFVSCLEPKHVDEAFCDPDWMNAMHEELNNFARNKVWTLVERPRDHNVIGTKWVFRNKQDENGLVVRNKARILKIGKVDTTLFTKIIGDDFFVCQIYVDDIIFGLLMREFEMSMIGELSFFLGLQIKQLKDGTFVSQTKYIKDLLKRFGLEDAKPIKTPMATNGHFDLDEGVMPPRTRHGRRVPTPDPVSEPKESSGDEYAQSDEEVEAHVEGASEKASGDDRDINETSEFEGLQDLFKTVGIDRIVTLKQDYNEDLIRQFYATEWVARDYSEMKWMSDTLQCSISRRQFRRLLNIRLDFGDDLHEEHTHNPLSIDYLSQFYEDGVRYTHGKVAGLRTIRSVVNRIGCQFDIVSLMMQEIAISKGTFTQGIYYAPYIMRLIQDKLGAVGQNLKKHKQYKPHLQLGAPRAPRAVPSSHPGASSSSAPPPPPGYDPNAFFHPQYAYFGMQPNEYFNPVLGDINTLSESIQRLSTGHETLHDDIRGLRTDVGDLNASMGRLHTRVGTLDS

SEQ ID NO: 111266 - protein, 171 aa, Oryza sativa
  Clone ID: PAT_MRT4530_15260C.1.pep
MGGAATERSGAAASGEWSDGGCGAAAAAAGHGAGGAATDSAWPAAGDGARGGRRRARRATARAAARETRGVDGDVGPREEAAEQVELLVLTTTTTTTRSSGAAMALAELRRGEGVGDMADKGSACAREIWPPPPQAPRAPSPAAGHALSVAAREEASSSGRPAGDEAAHAG

SEQ ID NO: 111267 - protein, 492 aa, Oryza sativa
  Clone ID: PAT_MRT4530_15261C.1.pep
TRPIERDVELEFTQEELNAAPMLDDDSEPPKPVEYLVSHGQSQQEQCDTICNLNVISSSTGLGGLHLVLFRIEGGHKLPPTTLSPGDMVCVRTCNSRGEGATSCMQGFVYNLGEDGCSITLALESRHGDPTFSRLFGKSVRIDRIQGLADALTYERNLEALIILQRNGLQKSNASIGVVATLFGDNKDVMKMEQNHLTDWGESSAPDPRISERYALDASQLKALSLGLNKKRPVLIIQGPPGTGNTVLLTELIVRAVQQGENVLVTAPSNAAVDNMVERLSNTGLNIVRVGNPARISPSVASKSLAEIVNRRLEQFAKELERKRSDLRKDLSYCIEDDSLAAGIRQLLKQLGRDLEKKEKEMIREVLSEAQVVLSTNTGAADPLIRRTCCFDLVIIDEAGQAIEPSCWIPILQGKRCILAGDHCQLAPVILSRKVLDGGLGKSLLERASSLHNGLLTTRLTVQHRMNDSIASWASKEMYHGLLKTSHSGASQ

SEQ ID NO: 111268 - protein, 405 aa, Oryza sativa
  Clone ID: PAT_MRT4530_15262C.1.pep
MGYMRAWFSAGVYFSVVALVGISVMLLWDSIGAVYFSGRSFSTWLQNLLASSFGISIMDIAAIIASTVFSIAFHEFGHAVAAASEGIQIEYVAVFVAALFPGALIALNCDQLQNLPLFSMLRIYCAGIWHNVMLCGVCVIMALLLPVVLYPLFVTGGLMITGVPEASPLSGYLSAHNFILSVDGLNITRADEWMKMLTQDNVVQISSRDLLEGSEGYRATGSRKGYCVPNSWMDASKNLWQINDKLSCPDDLVAFQRMSEKGIGKKEVEDKYCLIAKDVVKLKKCGNGWRGAEDGRSNFACLEGTFVYAGDLLSAAHSIKLSSYRPRWPLLLFIADVPRILQDGLSCLFRVSAALAVVNCLPVYFLDGEAILETMLSYFSWFTRRQQRNILKRTNRHCRHIFLIN

SEQ ID NO: 111269 - protein, 597 aa, Oryza sativa
  unsure (1)..(597): unsure at all Xaa locations
  Clone ID: PAT_MRT4530_15263C.1.pep
MDTGMRVALHRQVSSGSLKESGELRRQSSLESPRTGRAATRFLFGRQSSMDPNRRRGRSQSPVGLAEDLTVPDNLDATMQLLFLACHGDAYXGKSSEESGHTIRYDGMRPSLKNKLRRYQGHPDVVRVLLTWKANIDARDRWGSTAVADAKCYGHTEVYNLLKARGAKIPRNRRTPMMVSNPGDVPEYELNPSELQFKKGDEVVKGVYQVAKWNGTKVHVKILDRECYCDQEVINSFRHELTVLEKVRHPNVVQFVGAVTQNIPMMIISEYLPNGDLSSCIPRKGKLHGQKVLKYGLEIARGMTYLHQCKPDPIIHCDLKPKNIFLDSGGQLKIAGFGLTRLSKISPGRVKLADHESMVDSFSHYTAPELYRNEIFDASVDAFSFGFILYEMVEGTHTVHGKSSEESGHTIRYDGMRPSLKNKLRGYPPDFKALIEECWDTQGNDTCGLSCMNAFLCTYHCEANASLSVKKKPELALTRLEEDDTTYRQICAGAAAVRAMEEGRGGDPPSSSSSAAAAAGVAIGYPFLEPQQGARLRRRRTISPFKKYFSRGFAIGMEIAFIVFGTIVHFPVWARIFLIISLSILPFSAFSITFQEY

SEQ ID NO: 111270 - protein, 292 aa, Oryza sativa
  unsure (1)..(292): unsure at all Xaa locations
  Clone ID: PAT_MRT4530_15264C.1.pep
MDTGMRVALHRQVSSGSLKESGELRRQSSLESPRTGRAATRFLFGRQSSMDPNRRRGRSQSPVGLAEDLTVPDNLDATMQLLFLACHGXDAAGVEALLRGGVDVNSINLDGRTALHIASCEGHPDVVRVLLTWKANIDARDRWGSTAVADAKCYGHTEVYNLLKARGAKIPRNRRTPMMVSNPGDVPEYELNPSELQFKKGDXXWSRGVYQVAKWNGTKVHVKILDRECYCDQEVINSFRHELXTVLEKVRHPNVVQFVGAVTQNIPMMIISEYLPNGELSSCISRKGKLHG

SEQ ID NO: 111271 - protein, 129 aa, Oryza sativa
  Clone ID: PAT_MRT4530_15265C.1.pep
MGCCCYCLGTADDSCFAKPCRRHPHGPGLTGLCPALYWPPKGEADLAAAIQHAVGAGVTHLDTCDMYDPHTNELMVRKALQDAVRDKEEVTTKLPDYIANRKVEIRCYPGYLPSAGESRLRLLGTDSIN

SEQ ID NO: 111272 - protein, 143 aa, Oryza sativa
  unsure (1)..(143): unsure at all Xaa locations
  Clone ID: PAT_MRT4530_15266C.1.pep
RFGLTRLSKISPGRVKLADHESMVDSFSHYTALELYRNEIFDASVDAFSFGFILYEMVEGTHXTVHGKSSEESGHTIRYDGMRPSLKNKLRGYPPDFKALIEECWDTQGIARPTFSEIIIRLDKIYAQCMKQGTWKDSLKIWK

SEQ ID NO: 111273 - protein, 688 aa, Oryza sativa
  Clone ID: PAT_MRT4530_15267C.1.pep
MAELFASMSVKWALDKLSSLLPASLQVATAPSTTSEGLEDLRMLERTMRRIHATLHDAEEHWIIREESAKVRLTELKELAYDAEDVVDEYEYEANRVSTEVFERSLNTCNGKRKHRRLPTGGTPVCLGRPFLPACKYLFSSSDHMVNDEHYRIKPGVVPVPKYFDTKNITQKIISSLTKESSSLSELADLQEVLGKKLQGKSFLLVLDDVWTERRDTWELLCMPLFASSVCRIMVTTRNEAVAKLVQTMPFYYLDCLSSDDSWLLFQQAAFSVDQQDDTPADLDKIGKNIIVRNEFFRLEADDGCIEIPPNVRYLSIHCISREMSVASHSLRAIIVLNRASGYIENPEALLLGCEKLRALVFYEKEFFLSKALEGFMGSAKLLRHLHCECLLDNRYDISYYRLELHGIHSLINLHTLPQLYIGRNICNMGELKSLNKIKELTVRGLADLDRKEDAKEAWLHNKKHLQSLHLDFSRAIDLDDSPDYSENTRYESSKYPSWLGEPSFSNLTTIKFLFCKSERLPTLGELPSLQFLHVREMMFLQHIRQEFCSHGHGFKGFPALKKLKFVQMPEWSEWSGVDDGAFPRLHRLSIRCADNILSLPVAPFLSLVSFQVTDCPNITAIPASPSLRQLHICRSLEPQGLPLLRKIKFSSDNLQYCHGLSGFTSLKELNITECPKLLQHSCIFWMM

SEQ ID NO: 111274 - protein, 100 aa, Oryza sativa
  Clone ID: PAT_MRT4530_15268C.1.pep
PPRRERRKLSRRRCPGGGPCLLTVGPPPPPPPCLPPTFPFPPPPPPPNHRPRFTSAASRSSPLPRSSSPPLLLLPSPRRRPQHVHHTAARDRNRRFQWRV

SEQ ID NO: 111275 - protein, 1274 aa, Oryza sativa
  Clone ID: PAT_MRT4530_15269C.1.pep
MAAPSAAAAWVDWAAEYTKAAQAESRPPAEWAARVASVVAAAGDAPWSPGLAEMLARALLYGGGGAAWKYAEAALAAGLASPALLLAILSTRVIPHRFTRPTAYRLYLELLRRHGFNFAFQMKAANFKKIMQLIDDNLGLSKIFGFSTCEPGVFVVEFTLCMLWQLVDAALDDEGLLELIPDKKAHWPTRSDDVSAFDGTFSEQRIDKIDKLQKMNNVITIELIGHLLHDKVITHILSLARENIENKHWLRRKFHPIVTSNPLSSPNGRCLGASYSAQWIPIDMYLEDCLDGSIAATNSIETLSGLIKALQAVNRATWHDAFLALWIASLRLVQREREPIEGPVPHLDTRVCMLLSITTLAIVDIIEESDSEMNSNWKEKRTSDDLRKELMLSLQTLGDYESLLVPPPCIISVANQAASKAAMFVSRTNISSGYMENVNDRTTNYSGNMWHLIVESCISRNLLETSVYYWPGYINGHVNSITHALPSQLAAWSSFMKRAPLTQSLVNVLVATPAPSLAEVQKLYEVAVDGSDEDKVSAATILCGATLLRGWNFQEHTVRLVVKLLSSSDPIDFSGGESQLVKHGPMLNVIVTGISPVDYVPIFSFHGLIPELAAALMAICEVFGSLSPSVSWSPRTGEEISAHTVFSNAFILLLRLWKFNHPPLEYCVMGDGAPVGSQLTPEYLLLLRNSQVVSIRSSAKNRNTQKQLPVTSNPSSEHPIFMDSFPKLKLWYRQHQACLASTLSGFAHGTPVHKNVDSLLNLMFRKANKESTSIGSLSGSSSISNSSGPGVDDSHLWPQLPAWEILEAVPFVVDAALTACSHGRLFPRELATGLKDLTDFLPASLATIVSYFSAEVTRGVWKPAFMNGTDWPSPAANLSMVEEHIKKIVAATGVDVPRLVTGGSTLGTLPLPLAAFVSLTITYKLDKASERFLNLAGPALENLAASCPWPSMPIVAALWTQKVKRWSDFLVFSASRTVFHHNNDAVFQLLRSCFTATLGMSSTTSVCSCGGIASLLGHGFGSHCSGGLSPVAPGILYLRIFRCIKDCSILAEDILRLLMLSVKDIAETTVSRHRSDKVRKTKYVMRHGQVSLSSAMTQVKVAASLGATLVWLSGGTALVQSLFQEMLPSWFLSVQDLGRGGAASGGTVYKLGGHALAYLAVYAGMFAWRIDPTPVSRRRERVMWSHFEFLASALDGKISLGCDLSLWRAYVSGFLGLVVECTPCWAHEVDLRVLRRLSAGLRQWKEDELAVALLRRAGPEAMAAAAELIIGGDW

SEQ ID NO: 111276 - protein, 130 aa, Oryza sativa
  Clone ID: PAT_MRT4530_1526C.1.pep
MEEVRRASSLCLGRSPPLGPTWAEVPDEVTGFAITGTPLTEIDHRNLQLNAQAMNALFNSLSQKEFDRLAEIHEVTSEYKDAKLHFLKIQYETFPMLPHKSVNDMYGRLNVIVNDLKGLGANYMSHPKNR

SEQ ID NO: 111277 - protein, 578 aa, Oryza sativa
  Clone ID: PAT_MRT4530_15270C.1.pep
MGNNCVGPSAAGQNGFFANVALWRPRPADAAPPALPPPSSAPSDQAPEPVTIPPSEHSSHHSSRSTDPSTPTSAAEQPANKAAPKVKRVQSAGLLADSVLKRDVNTARLKDLYTIGKKLGQGQFGTTYLCVEKATGREFACKSIAKRKLLTQEDVEDVRREIQIMHHLAGHANVVSIVGAYEDAVAVQLVMELCAGGELFDRIIQRGHYSEKAAAQLARVIVGVIEACHSLGVMHRDLKPENFLFIHQKEDSPLKAIDFGLSIFFKPGETFTDVVGSPYYVAPEVLMKHYGREVDVWSAGVIIYILLSGVPPFWDESEQGIFEQVLKGDLDFSSEPWPNISESAKDLVRKMLIRDPKKRLTAHEALCHPWVCVDGVAPDKPLDSAVLSRLKQFSAMNKLKKMALRVIAESLSEEEIAGLKEMFKMLDTDNSGHITLEELKTGLQRVGANLMDSEIDALMEAADIDNSGTIDYGEFIAATLHINKVEKEDKLFAAFSYFDKDGSGYITQDELQKACEEFGIGDTRIEDIIGDIDQDNDGRIDYNEFVEMMQKGNNAMGKMGQHSTGNFGLGEALKLRCC

SEQ ID NO: 111278 - protein, 52 aa, Oryza sativa
  Clone ID: PAT_MRT4530_15271C.1.pep
KKFFFLGERIFFKKIFWRFYFVYVYGKQISKRNTESNSYKLREILRRLYKMH

SEQ ID NO: 111279 - protein, 468 aa, Oryza sativa
  Clone ID: PAT_MRT4530_15272C.1.pep
MMDATGPPPPPTAVGSDVDGGTGSGGARTTTFFGLSTSALVAAGAAALVLVVVLVAAGTARLCARRRRGAKHLSMSRVEHAPSSGSLRQASSSSAPKEKDHAEAGAGTGTGTSSSDVASSSAAASYLESPVRRKPERISCAAAMDMGWGRWYDLEELEAATGGFSEENVVGEGGYGTVYRGVLAGGEVVAVKNLLDHKGQAEKEFKVEVEAIGKVRHKHLVGLVGYCAEGPKRMLVYEFVENGNLEQWLHGDVGPVSPLTWDIRMKIAVGTAKGIAYLHEGLEPKVVHRDIKSSNILLDKKWNPKVSDFGMAKVLGSGSSYVTTRVMGTFGYVAPEYASTGMLNESSDIYSFGVLLMELISGKRPVDYSKSVGEVNLVEWFKGMVGSRRVEQLVDPRIEDPPGARALNRVLLVCLRCIDSDAHKRPKMGQIVHMLEGDEFPFRTLRWLLAESKVFSDSPAFDPDYEKL

SEQ ID NO: 111280 - protein, 140 aa, Oryza sativa
  Clone ID: PAT_MRT4530_15273C.1.pep
MAEEGQRGGYSRLAGDEEVATASGGGGGDYDERKLRLLGYEPQLKRNLSLLSNFAVSFSIVSVLTGITTLFGTGLQFGGPATMVYGWPIAGAMTLVVGLAMAEICSAYPTSGGLYFWSARLCSHRRWGPFASWLTGCSTS

SEQ ID NO: 111281 - protein, 1737 aa, Oryza sativa
  Clone ID: PAT_MRT4530_15274C.1.pep
MAPSPSLSPDTHPRHRRFRSSPEHLVGVFQASLASPTLETFPIPVPRHNPPLSAQTPSPKSPFSTHPDPPETIQISGIDSSTAASICLSPRLDSRFVTLRPQDPSKSSTLQDLPATAPLGALRLYSEVLAAPAPIPLAASSKSQQELSPPKIRSLAGRLNFPAAQPCSSVTERLNPVNLTDPDVGSQGAAPKDLRILKSGRKVQMPAQILSAVQHPRGSLDVSGSEWQEVKANRWRRSPAHSPDSTNQFQLQLSRARFLKHMEGKCFRCLRSDHRVIECREPLRCWFCMGIGHCASSCLKRKSFKSTATSQPLPQTSVESFPPLAPIRFPPKLLPRSALSSPSSMDDLSARPSQEPVVISATGEIERLRQKFSARSIVAWQVGHQGSNVDPNVFADDVHSAFRIRRSDIQITKFHPEDFFITCSSQNDRDAILRQPRLATKSGRVYLFCPWEEGLHGVPARFRYRARVCIEGIPMHARTEETAAKIIGRKCSINYVEEYSRRQNYNRTFDIWIWTDAPKFIPRSSTFSITNADEEGLPTDISLLDLEPHHNPPPDEPKEGWTYDILVHIDTLEDLHSKVARAYDWQYGAETDEGSLIPKEVQMMKTKTESSAPRGSVGAVPFGAVSVDGRKVVAVSVEEINKFTTKTRADASMFERPPLAAAAPTVLARQGQVAVLELLEKHLDPMLHEATIQHSLYSPDTSSPRIASPVFIPSSTQLGSGAADGVLGAAKNLQEFAASLSTPIQPAILPTPDVSSRRPCRNKVTLHSPQRHSERLARKRRFGTKIEHFAQEILAKNFGFLNDQTRFDENIEKLYVQHFKKPISPASMKIITTLVEKGGCEGIHLKTAKKKAAVVPICLLVFIMSQHNVHLFNWNVRGLNAQAKQDVVKAFVHKVGASIVCLQETKLATVTDRNILSILGQNFVQSYAFLPASGTRGGIILACNANLFSLSEAVQGQFSLSATITMFEEGLQWSITVVYSPQLEADKIAFLAEIEAMSSFMKPAWLLIGDFNLIYKVSDKNNDRLNRRMMQRFKGLIDKIEVKELHLPGRRFTWAGAGQNPTQTKIDRAFVIPDWDIMFSNASLQPLSSSTSDHAALFLIGNEMRGKPPNSRFEAFWLKIPGFLEVVEDSWNRPLLAANPLAILYIKLKRLARDLKRWNRQNVGDIKLQLAVANEVVFQLDVAQETRPLSDDECVLRSNLKARILGLAVLNKIQIRQRSRLTWLKEGDVNSKFFHIKENSRRRKNFIQTLQTQNGIAVSAQEKADTLFRFFSDRLGTPSQRQSCLNWATLNFPSFDLDDQEDDITEEELKHPVFSVPSEKAPGPDGYIGAFFKHAWEIIKEDLLLAAKSFMALNTNQLKKLNTAYICLLPKKRRSGWTKLLANRLAPRLNELVSQNQSAFVRKRAIHDNFLFVQNLVHILHRNHKEALFLKVHITKAFDTVGWPYLLEVLQRKVDFLPLIEKIGSRLPGWKGRYFTSEGRRILVQSVLSAMPTFHLSALQAPKWVIKRIDRFHRSFLWKGEDPSKTNPGSSLVNWSTVCKPKFLGGLGILELEKFPRALRLRWLWFKWKEENKPWIGMDIPCDNCDMRLFQAATTISLGNGEKTAFWQDKWLQSSCPKDIAPMCFNLAKRKQRSVKTELTNNSWLLSFRNITSIEEINEVVQLGENSHGSKPPAPQPPAPPLALQLDLQFVWRSPLKTPTIFSMGVLSSGKFGARYVNGKISKEPNLQMTLQLGGST

SEQ ID NO: 111282 - protein, 1804 aa, Oryza sativa
  Clone ID: PAT_MRT4530_15275C.1.pep
MAPSPSLSPDTHPRHRRFRSSPEHLVGVFQASLASPTLETFPIPVPRHNPPLSAQTPSPKSPFSTHPDPPETIQISGIDSSTAASICLSPRLDSRFVTLRPQDPSKSSTLQDLPATAPLGALRLYSEVLAAPAPIPLAASSKSQQELSPPKIRSLAGRLNFPAAQPCSSVTERLNPVNLTDPDVGSQGAAPKDLRILKSGRKVQMPAQILSAVQHPRGSLDVSGSEWQEVKANRWRRSPAHSPDSTNQFQLQLSRARFLKHMEGKCFRCLRSDHRVIECREPLRCWFCMGIGHCASSCLKRKSFKSTATSQPLPQTSVESFPPLAPIRFPPKLLPRSALSSPSSMDDLSARPSQEPVVISATGEIERLRQKFSARSIVAWQVGHQGSNVDPNVFADDVHSAFRIRRSDIQITKFHPEDFFITCSSQNDRDAILRQPRLATKSGRVYLFCPWEEGLHGVPARFRYRARVCIEGIPMHARTEETAAKIIGRKCSINYVEEYSRRQNYNRTFDIWIWTDAPKFIPRSSTFSITNADEEGLPTDISLLDLEPHHNPPPDEPKEGWTYDILVHIDTLEDLHSKVARAYDWQYGAETDEGSLIPKEVQMMKTKTESSAPRGSVGAVPFGAVSVDGRKVVAVSVEEINKFTTKTRADASMFERPPLAAAAPTVLARQVQYDRPRLSRRGTRSPRIQSSPQVPSPCKSAIPRRSGSPDEGANALATLFSPSSSLVVQPEPVIFSQGQVAVLELLEKHLDPMLHEATIQHSLYSPDTSSPRIASPVFIPSSTQLGSGAADGVLGAAKNLQEFAASLSTPIQPAILPTPDVSSRRPCRNKVTLHSPQRHSERLARKRRFGTKIEHFAQEILAKNFGFLNDQTRFDENIEKLYVQHFKKPISPASMKIITTLVEKGGCEGIHLKTAKKKAAVVPICLLVFIMSQHNVHLFNWNVRGLNAQAKQDVVKAFVHKVGASIVCLQETKLATVTDRNILSILGQNFVQSYAFLPASGTRGGIILACNANLFSLSEAVQGQFSLSATITMFEEGLQWSITVVYSPQLEADKIAFLAEIEAMSSFMKPAWLLIGDFNLIYKVSDKNNDRLNRRMMQRFKGLIDKIEVKELHLPGRRFTWAGAGQNPTQTKIDRAFVIPDWDIMFSNASLQPLSSSTSDHAALFLIGNEMRGKPPNSRFEAFWLKIPGFLEVVEDSWNRPLLAANPLAILYIKLKRLARDLKRWNRQNVGDIKLQLAVANEVVFQLDVAQETRPLSDDECVLRSNLKARILGLAVLNKIQIRQRSRLTWLKEGDVNSKFFHIKENSRRRKNFIQTLQTQNGIAVSAQEKADTLFRFFSDRLGTPSQRQSCLNWATLNFPSFDLDDQEDDITEEELKHPVFSVPSEKAPGPDGYIGAFFKHAWEIIKEDLLLAAKSFMALNTNQLKKLNTAYICLLPKKRRSGWTKLLANRLAPRLNELVSQNQSAFVRKRAIHDNFLFVQNLVHILHRNHKEALFLKVHITKAFDTVGWPYLLEVLQRKVDFLPLIEKIGSRLPGWKGRYFTSEGRRILVQSVLSAMPTFHLSALQAPKWVIKRIDRFHRSFLWKGEDPSKTNPGSSLVNWSTVCKPKFLGGLGILELEKFPRALRLRWLWFKWKEENKPWIGMDIPCDNCDMRLFQAATTISLGNGEKTAFWQDKWLQSSCPKDIAPMCFNLAKRKQRSVKTELTNNSWLLSFRNITSIEEINEVVQLGENSHGSKPPAPQPPAPPLALQLDLQFVWRSPLKTPTIFSMGVLSSGKFGARYVNGKISKEPNLQMTLQLGGST

SEQ ID NO: 111283 - protein, 401 aa, Oryza sativa
  Clone ID: PAT_MRT4530_15276C.1.pep
MAFLLRPRDMNSTVPPLCSSSSSAATARLLAPCSHFDRARAAAQSAVGHVAEVAAYRLIFLDSHHSFYDGLYVGGVADARIRPALRTLKQNLSLLLSMLVDRAQPVAVREVMKASFQPAKLNDYLKPYAWKFQGEENLDDIYSDALKKIPDLALHSSGAQGLILANTLDCLLPTNANVIQGEECMYSQQNTDNYGIKYGNQLPFLLNQVAETHLVDQIIERHTYSLQYTKLIATVAWQVLTELSINPQFLSSGLRLVHASEEIHEVILVVEWNTFSAVLSRFSMAGLLEFNPRRDNHMVVMTGIYAWLIMLCNAWLSDAPTQIGMVAVLEHQVLQEELQTSFDPGGFLHRLGDKPNFKKKGLSGSRLGYTWAARQPVAKKPKQAQAETIQGQQQLTGEEGK

SEQ ID NO: 111284 - protein, 127 aa, Oryza sativa
  Clone ID: PAT_MRT4530_15277C.1.pep
MKREDLFVKLDVTNTIEHGLDDIVDRLPPVRDNDRDGDIVYDENGLAGNTRGMTTSTRSPQLSWNTTQSFKRATLSPFNATAAMGLGTCREIAPVNGHTLLKKMKTTLAPSDVEEDDLDSAQDENEG

SEQ ID NO: 111285 - protein, 132 aa, Oryza sativa
  unsure (1)..(132): unsure at all Xaa locations
  Clone ID: PAT_MRT4530_15278C.1.pep
PRAASPADGAHPRPRAASALPPTAPPLPPWSPASAAAPPRFPSSPPWLPSCVSPVSAAXSPNHRRTRPGEPDGPATAGTPHPRPPPRGDSQPLXSSTALPSPPRSPASVAVPSRRANHRRRVLHSFSAVSER

SEQ ID NO: 111286 - protein, 105 aa, Oryza sativa
  Clone ID: PAT_MRT4530_15279C.1.pep
MKWIVQGVNWSVSERTQTGCTNTWMMWVPHDKGWVPASGGLPAAERRHMWGCLSRRDGVLTRRLIGPIERHSGAEGKERPDAMGVAPRALSELKGDRSRDDGMGD

SEQ ID NO: 111287 - protein, 479 aa, Oryza sativa
  Clone ID: PAT_MRT4530_1527C.1.pep
MLPHESVNDMYGRLNVIVNGLKGFGANYTDLEVAQKMLRALPEKYETLVTMLINSDMSRMTPASLLGKINTNDMYKLKKKEMEEASPSKKCIALQAEVEDKGKGKVNEVNEDLEEEISLLARRFNDLLGRRKERESGSNSNRRRNRRPNKTLSNLRCFECGEKGHFASKCPSKDDDGDKSSKKKSGGYKLMKKLKKEGKKIEAFIGEWDSNEESSASSGSEEEGGDDASSKKKKMAVVAIKEAPSLFSPLCLMAKGSSKVTSLSDSESDDDCDDVSYDELVSMFEELYAYSEKEIVKFKALKKDHASFEALEFEMSELSFFLGLQIKQLKDGTFVSQTKYIKDVLNRFGLEDAKPIKTPMATNGHLDLDEGVMPPRTRHGRRAPTPDPVSEPEESSGDEYAQSDEEVEANVEGASEEASGDDDSGSGEDEDEGSDDMHIDLSIQFVVNMRNLSQYTILRHHDQFFSPRDTPDPRFHTAF

SEQ ID NO: 111288 - protein, 164 aa, Oryza sativa
  Clone ID: PAT_MRT4530_15280C.1.pep
MEIKMKGIFKGLKIISQIFALQKQQEMEIGCPTDVRHVSHIGVGTSDSCPSWMSEFRGLEELSAGSMGSFAQSRKTSWASQGKGPNVDFDKPPRATLPTEVCTDKSGQEAASCCHDIPRGPKNPRRKKAARASSASSFLSRSRSSSFVTACGDFSELRGGLRVA

SEQ ID NO: 111289 - protein, 60 aa, Oryza sativa
  Clone ID: PAT_MRT4530_15281C.1.pep
MWCKNLNFPQEAQEGQVLRAEPKSMGLNAAAPSGMMAHDEFLPKPNTIARTQNGLSSSQL

SEQ ID NO: 111290 - protein, 270 aa, Oryza sativa
  unsure (1)..(270): unsure at all Xaa locations
  Clone ID: PAT_MRT4530_15282C.1.pep
LSLPTRFYLAPPTPSPSVSRPLPPPPVRRSPPPPIMAHFRHPTVRSRLPYPLFSSSAISTLXPPLKSFSHKPVPRLPPXSSPRTLPPPPPLVSSRVXPPPRPLLSLSTRLPSRLLRRSRYTVPASVPFPLITAGFPQTNPPPPPAPPPLPGFLFPLPGAPLARPPSPRLLGRPEEPVSRRYAFSSTSAAATTPPPPTSPXPPSPFPRGARPPPXTPPLPPPPPPLASARSLSAAALLRPPPAPPLCLVRCHIGPKGERKEREDRLTSGSH

SEQ ID NO: 111291 - protein, 99 aa, Oryza sativa
  Clone ID: PAT_MRT4530_15283C.1.pep
SSVPPFPNTGRDHNGQHFFCQYAKGHAKYKFFLWFAFQQRCWMADLLQKNGNDSHSVWPFCAQELETANHILTLNCVFTRQIWLRVLSLFGWAALSPPH

SEQ ID NO: 111292 - protein, 47 aa, Oryza sativa
  Clone ID: PAT_MRT4530_15284C.1.pep
PLPVLSLCSPLRYHSRFFLNPSPVFWITYVLVRGSTVLDLRFFPPCV

SEQ ID NO: 111293 - protein, 570 aa, Oryza sativa
  unsure (1)..(570): unsure at all Xaa locations
  Clone ID: PAT_MRT4530_15285C.1.pep
MGKTNALRGRISSFQQTRDESIPEAWERLQEYMAACPHHGMDDWLILQNFYNGLTPMSHDHLDAAARGAFFSKTVQGAVDLIEKMLDLLMKRLDDHDKKPQGTVKVLDSHVTCEVCGNTGHSGNDCLDTREAMYMGNNNGYCPQREYHEDGSTNLENTNRHNKLYLLLKIDTDAAQPERGNNNGNFSNQPSLKDLVFAQAKTIDALSKNLATNDKILENINVKLDGFASAFQNQLRFNKMLETQLAQFASLVPANETGTNGIAKEVPSSDSADKEVQLEKIVPQEYCDTWLLSFHQRSRKPSVDEQFARFAEVIQKIHINVPLLDAMQVPTYARYLKDMLNNKRLLPTMEVVKLTEQCSSVILHKLPEKKKDPGCPTITCSIGAQQFDQAFCDLGASISVMPKDVPDKLNFTVLTPTLMCLQLADLSVHYPTGIAEDVPVKIRDFFIPVDFVVLDMDMGKETPLILGRPFLSTAGANIDVGMGSIRFDINGKXKKFEFHPRTGXNPQNIQMVEVEPPKMDSLVRFMQNFLEKETTMPRNRYWRTPVKPPIPAKKLEQSAPRKPPSARKRN

SEQ ID NO: 111294 - protein, 55 aa, Oryza sativa
  Clone ID: PAT_MRT4530_15286C.1.pep
ASKKNRAHKGVGRLSWFDAGAGVRKHGLKGPSCSGWFAKKGLKPLHHEGHVRPEI

SEQ ID NO: 111295 - protein, 42 aa, Oryza sativa
  Clone ID: PAT_MRT4530_15287C.1.pep
EMNVKKSLFKRSFKFNSIQFIRYIYDVALTLNYELFTGTPHQ

SEQ ID NO: 111296 - protein, 102 aa, Oryza sativa
  Clone ID: PAT_MRT4530_15288C.1.pep
MPCSSPPLLQHLSSHPLPPQPRKEKAKFATEHSKIVVFAAWHGVTTGIRRSWPGVAQVQAGTVTRIWKRPDEDAGSVVRHGAVARCGTATGMQWSRLTVRRR

SEQ ID NO: 111297 - protein, 285 aa, Oryza sativa
  Clone ID: PAT_MRT4530_15289C.1.pep
QQERLIFCRGDVFYEQRISRKIACSRAGLLEEGLRCFDRMRLEHKLTPNAQHYGCMVDLMARAGRLDDARALIGSMPTGPTDTAWRSLLNACRIHGNLELAERALQELERLGATNAGDYIILSDMHARAHNRDAAAARRTEAVDRGLAQAPGYSAVEVHGATHRFVSQDRSHPRADDIYEMLHQMEWQLRFEGYTPDTSELALDAGEEEKRRVVAAHSQKLAMAFGLLSTPEGAPVRVVTNLRMSKECHAYSALISEIFGREIVVRDRNRFHRFKRGACSCRNYW

SEQ ID NO: 111298 - protein, 1148 aa, Oryza sativa
  Clone ID: PAT_MRT4530_1528C.1.pep
MKKLKKEGKKIEAFIGEWDSNEESSASSGSEEEGGEDASSKKKKMAVVAMKDAPSLFAPLCLMAKGSSKVTSLSDSDSDDDCDDVSYDELVSMFEELHAYNKKEIVKFKALKKDHPSLEVLYEELKTSHERLTISHEKLKEAHDNLLSTTQHGALIDVGISCDLLDNSATCHIAHVASSSISTSCDDFVDMLSSSSSSCISICDASLVVENNELKEQVAKLNKSLERCFKGKNTLDKILSEQRCILNKEGLGFIPKKGRLMMVALLLDMWVPLYSVVNYRTGVSHWVLDSGCTQHMTGDRAMFTTFEVGGKEQEKVTFGDNSKGKVIGLGKIAVSNDLSIDNVSLVKSLNFNLLSVAQICDLRLSCAFFPQEVIVSSLLDKSCVFKGYASNSKAYRVYNKNKGIVEETADVQFDETNGSQEGRENLDDVGDEGLMRSMKNMSIGDVKPIEVEDMSSTSTQDEPSTSAMPSQAQVEVEEEKAQDPPMPPRIHTAVSKDHPIDQVLGDINEALCDLDWINAMHEELNNFARNKDFKIGKVDTTLFTKIIGDDFFVCQIYVDDIIFGSTSEVFCKEFGDMMYREFEMPMIGELSFFPRLQIKQLKDGTFMSQTKYINDLLKRFGLEDAKPIKTPMATNGHLDLDEGVMPPRTRHGRRAPTPDPVSEPEELSGDEYTQSDEEVEANVEGASEEASGDDVSGSGEDEDEGSDDMHIDPSIQFVVNMRNPSQYTILRHHGQFLRPRDTPDPRFHTAFQKYVYEQVYAGKAFAKHKWIFWRDINETLEFEGLQDLFKTVGVDRILTLKQDYNEYLIRRFYATVWVAGDYSEMKWMSETLQCSISRRQFRRLLNIRLDFGDDLHEEHTHNPLSIDYLSQFYEDGVRYTHGKVAGLRTIPSVVNRIVRATILPRLGNNDDISGVAWHVIDEIIQGRQFDIVSLMMQETAISKGTFTQGIYYAPYVMRLIQDKLGAAGQNLKKLKQYKPRLQLGAPRAPRAAPSSHPGASSSSAPPPPPGYDPNAFFHPQLLPSRRLVEELPGDLSKKIVEEARRRFVSGLEFTTFGVKEELPYSPEPSSGYFVAVVVDGEMVLNANNMAEEAYRKTKRAARPQPRYCPYLLAPMSVTVDGKRVLHIRRLRWKFRGTEKIDLGGGDGV

SEQ ID NO: 111299 - protein, 395 aa, Oryza sativa
  Clone ID: PAT_MRT4530_15290C.1.pep
MANHRGRRNFAGGPFDARAVNEPSSSELACLGGKGTACKNARLPSPPFCTWPPHSEKTPSQRAAKGPPAKCPSLGGRPSGVHGVCYGMNGDNLPSQSEVVQLYKSNGIGAMRIYSPDQKALDALRGSGIAVIIDVGGIGAVANLANNPSAAADWVRDNVQAYWPNVIIRYIAVGNELGPGDMGTILPAMQNVYDALVSAGLSNSIKVSTAVRMDAITDSFPPSHGVFRPDLQQFMVPIAQFLANTMSPLLANVYPYFAYRDNPRDIPLNYATFQPGTTVRDNDSGLTYTNLFSAMVDAVYAALEKAGEPGVRVVVSESGWPSAGGFAANVENARNHNQGVIDNVKNGTPKRPGQLETYVFAMFNENQKPGDETERHFGLFYPDKTPVYPITFPPN

SEQ ID NO: 111300 - protein, 67 aa, Oryza sativa
  Clone ID: PAT_MRT4530_15291C.1.pep
MMKKKKKKKKKKKKKKKKKKKKKKKKKKKKKKKKKKKKKKKKKKKKGVGGGGGQILLPLLSTLKLFL

SEQ ID NO: 111301 - protein, 318 aa, Oryza sativa
  Clone ID: PAT_MRT4530_15292C.1.pep
MGGAHGVCYGVVGNNLPSRSEVVQLYKSKGISAMRIYYPDQEALAALRGSGIAVIVDVGDKGAVANLANNPSAAADWVRNNVQAYWPSVFIRYIAVGNELGPGDMGTILPAMQNLYNALVSAGLSNSIKVSTAVKMDVITNSFPPSHGVFRPDLQRFIVPIAQFLANTMSPLLVNVYPYFAYRDNPRDIPLNYATFQPGTTVRDNDSGLTYTNLFSAMVDAVYAALEKAGAPGVRVVVSESGWPSAGGFAANVENARNHNQGVIDNVKNGTPKRPGQLETYVFAMFNENQKPGDETERHFGLFNPDKTPVYPITFPPN

SEQ ID NO: 111302 - protein, 431 aa, Oryza sativa
  Clone ID: PAT_MRT4530_15293C.1.pep
MANHRGRRNFAGGPFDARAVNEPSSSELACLEREKEFYIPQGHKIALTEDCKGAAYRMTGRPRCPFAGGKGTACKNARLPSPPFCTWPPHSEKTPSQRAAKGPPAKCPSLGGRPAGVHGVCYGMNGDNLPSQSEVVQLYKSNGIGAMRIYSPDQKALDALRGSGIAVIIDVGGIGAVANLANNPSAAADWVRDNVQAYWPNVIIRYIAVGNELGPGDMGTILPAMQNVYDALVSAGLSNSIKVSTAVRMDAITDSFPPSHGVFRPDLQQFMVPIAQFLANTMSPLLANVYPYFAYRDNPRDIPLNYATFQPGTTVRDNDSGLTYTNLFSAMVDAVYAALEKAGEPGVRVVVSESGWPSAGGFAANVENARNHNQGVIDNVKNGTPKRPGQLETYVFAMFNENQKPGDETERHFGLFYPDKTPVYPITFPPN

SEQ ID NO: 111303 - protein, 170 aa, Oryza sativa
  Clone ID: PAT_MRT4530_15294C.1.pep
PAGKPGPLAALRASPPLVSPPLRRRRRSISRLLPAEMPFKRFVEIGRVALVNYGKDYGRLVVIVDVVDQNRALVDAPDMVRCQINFKRLSLTDIKIDIKRVPKKTTLIKAMEEADVKNKWENSSWGKKLIVQKRRASLNDFDRFKVMLAKIKRGGAIRQELAKLKKEAAA

SEQ ID NO: 111304 - protein, 370 aa, Oryza sativa
  Clone ID: PAT_MRT4530_15295C.1.pep
MTKQSVVVPEVAVPMPPNSAPLLPYPPPRAAPGVAVRKKYLQAQLDLGAGLPLINGWVESMRASSPTHAKAAAALAAAGAVDDERAAWMVRHPSALSKFEQIVAASKGKKIVMFLDYDGTLSPIVDDPDSAFMSDTMRRAVRSVAKHFPTAIVSGRCRDKVFEFVKLAELYYAGSHGMDIKGPAKASRHNKAKAKGVLFQPASEFLPMIEQVHDSLIERTKCIPGAKVENNKFCVSVHFRCVDEKSWSTLADIVKAELKDYPKLKLTQGRMVFEIRPTIKWDKGKALEFLLESLGFADCTNVLPVYIGDDRTDEDAFKVLRKRGQGIGILVSKYPKDTNASYSLQEPAEVMEFLLRLVEWERLSRARPKW

SEQ ID NO: 111305 - protein, 632 aa, Oryza sativa
  Clone ID: PAT_MRT4530_15296C.1.pep
MGAVNGVCYGVLGDNLPPRSEVVQLLKSQGIGAMRIYYPDKEALDALRGSGIAIIVDVGDSGAVANLASNPSAAGDWVRDNVEAYWPSVIIRYITVGNELPAGDMGLILPAMQNVHKALVSAGLSSSIKVSTAIKMDVVANTFPPSHGVFRPDVQQFMAPIARFLANTVSPLLVNVYPYVSYRENPRDISLNYATFQPGTTVRDSDSGLTYTNLFNAMVDAVYAALEKAGTPNVRIAVSETGWPSAGGFAATAENAMNHNQGVIDNVKNGTPKRPGPLETYVFAMFNENQQTGDETRRHFGLFNPDKTPAYPITPYPRPAVQSIGVCYGMVGNDLPSRSEVVQMYVSLGINRMRIYNPDREALDALRNSGIDLILDAGGFDTVSYLAASSSNAASWVHDNISPYYPAVNIKYIAVGNEVVGGTTESILPAMRNVNSALAAAGIGGIKVSTAVKSDVIANSYPPSAGVFAYPYMNGIAQYLASTGAPLLANVYPYFAYAGNPREISLNYATFQPGTTVRDDGNGLTYTNLFDAMVDCIYAALEKADAGNVRVVVSESGWPSAEGIGASMDNARAYNQGLIDHVGRGTPKRPGQMEAYIFAMFNENQKTGAATERHFGLFYPNKSPVYQIAFSN

SEQ ID NO: 111306 - protein, 445 aa, Oryza sativa
  Clone ID: PAT_MRT4530_15297C.1.pep
MAEYEITDPRCYRRTPTTARRTTSGSSALCHQDLPAKAARRRKPAAADGRPGCVIRTTVEATRVRFGRTVAGAIVQQDGASLFGAVPPPTWRGDAEEDSAREAGAIPLDDGASHSGAPKKTISRSCVFAGVHGVCYGMNGDNLPSQSEVVQLYKSNGIGAMRIYSPDQQALDALRGSGVAVIIDVGGSSAVANLANNPSAAADWVRDNVQAYWPNVIIRYIAVGNELGPGDMGTILPAMQNVYDALVSAGLSNSIKVSTAVRMDVITASSPPSHGVFRPDLQQFMVPIAQFLANTMSPLLANVYPYFAYRDNPRDIPLNYATFQPGTTVRDNDSGLTYTNLFNAMVDAVYAALEKAGAPGVRVVVSESGWPSAGGFAANVENARNHNQGVIDNVKNGTPKRPGQLETYVFAMFNENQKPGDETERHFGLFYPDKTPVYPITFPPN

SEQ ID NO: 111307 - protein, 66 aa, Oryza sativa
  Clone ID: PAT_MRT4530_15298C.1.pep
ESNQCIQRSRVGDMLYVNAVPGLEHEPRGYHRPGCSASKRAQRRCHRRTSWPKRPRTRGSSREFRT

SEQ ID NO: 111308 - protein, 37 aa, Oryza sativa
  Clone ID: PAT_MRT4530_15299C.1.pep
TIAPRSSLHVANHLTSYRLKTTVHFAPTGHCTLACPL

SEQ ID NO: 111309 - protein, 83 aa, Oryza sativa
  Clone ID: PAT_MRT4530_1529C.1.pep
VHQQDNAAILIILPEEMKFYTPLNKSKTHELEPDGLQTRSSCKLPQPLLELNCSQERKEKTNLCSPSVRLNNNPDHQSPDKQK

SEQ ID NO: 111310 - protein, 93 aa, Oryza sativa
  Clone ID: PAT_MRT4530_152C.1.pep
PLKKLWTWQEGWPGKRNSSLEYPRNYHICHLIGCSKVGLPRIDPPIDVLQWLGKMPKFATISAGLVRMHQLRHLHSATICTSVRSVMYPSIHL

SEQ ID NO: 111311 - protein, 109 aa, Oryza sativa
  Clone ID: PAT_MRT4530_15300C.1.pep
MALDATGGWTAGAASGRQRVRPVGGNGNGGYLRHSVAGGGPPWTGVRGGGGRRADLAPPDVKSGGCSMGGWIRRHLTTGAAAVAGGSTGSRPREWQRRQEDPPPPTSAS

SEQ ID NO: 111312 - protein, 57 aa, Oryza sativa
  Clone ID: PAT_MRT4530_15301C.1.pep
LVIKFRTQNMSDIDNRWNVRLRESTLIFFPELFILTFARISQSIVKSEHTDLDHTEV

SEQ ID NO: 111313 - protein, 65 aa, Oryza sativa
  Clone ID: PAT_MRT4530_15302C.1.pep
FFFFFFFFFFFFFERTYAEWNITKVTFRCSVSHNKRATICQGIFTKAAYILTEMTTTDLVKVQMT

SEQ ID NO: 111314 - protein, 74 aa, Oryza sativa
  Clone ID: PAT_MRT4530_15303C.1.pep
MRWRPTGKWVPPVTQRADCHGHELREAEQTYSETKLIGDEAHSPPIGEMVRAVTLARSRRSMSRQANQDYRFYS

SEQ ID NO: 111315 - protein, 154 aa, Oryza sativa
  Clone ID: PAT_MRT4530_15304C.1.pep
MAPTSTTTPERKKRTVAEALQDNTWIDNIRYNLTTVLVAEFFKVFELLWTSVTRLGIPQQWPQNWPLTAILEDWWVQTVQATAKEKRKGVKSILILLSWEIWKERNSRVFGNLETPPHRIIDKVTDEIWLWCAGGAKGIQCLTANNYGSANDSV

SEQ ID NO: 111316 - protein, 54 aa, Oryza sativa
  Clone ID: PAT_MRT4530_15305C.1.pep
TYEADSGPSRQQLKKPDMRKILMDLLSQILGNGSPMCFDEQRLIDKLREFLKDK

SEQ ID NO: 111317 - protein, 45 aa, Oryza sativa
  Clone ID: PAT_MRT4530_15306C.1.pep
KKKSFLPLFFLISLLFRTHPDLYFSFTGCPPKRTNLGFFSPFYIF

SEQ ID NO: 111318 - protein, 69 aa, Oryza sativa
  unsure (1)..(69): unsure at all Xaa locations
  Clone ID: PAT_MRT4530_15307C.1.pep
DQXTLSEARSESNGIPQASAAAXSSSGEXILASFSXSSXAAYRREASTMXEEXAXXTXEGXLLSXXPPV

SEQ ID NO: 111319 - protein, 57 aa, Oryza sativa
  Clone ID: PAT_MRT4530_15308C.1.pep
CICSPCMCVLGVESRGPSSETQYNATVSLLSCGAIYDGTHDVAPEIRDRVLLCVPAF

SEQ ID NO: 111320 - protein, 127 aa, Oryza sativa
  unsure (1)..(127): unsure at all Xaa locations
  Clone ID: PAT_MRT4530_15309C.1.pep
MSSGVAWVWMTEDAVASDELRRDRPRRAPGITDTGNELQRXQHRRPPSTAPLLTLTSSSICVAGRCTLRQRPNSVASPLQSPPSSPAVDPAASPGLHPIYLLLQGSKETRRGAKSLLTWSWLAMECG

SEQ ID NO: 111321 - protein, 124 aa, Oryza sativa
  Clone ID: PAT_MRT4530_1530C.1.pep
AVELGSPQRGVGNRRVSQSYELPYLKYCGCRLCYHRHALDLRTAYEIWNKLAEIHEVTSEYKDAKLHFLKIQYETFPMLPHKSVNDMYGRLNVIVNDLKGLGANPKPAATRRHPCLRLSSSVAP

SEQ ID NO: 111322 - protein, 74 aa, Oryza sativa
  Clone ID: PAT_MRT4530_15310C.1.pep
WHGKSPSSLLNYWLNLNHLAQPKTRFSVNLWVGVKTVRKLSEFRAYFRKRNLLVGIVRKQKRIWKYFLENRIEY

SEQ ID NO: 111323 - protein, 151 aa, Oryza sativa
  unsure (1)..(151): unsure at all Xaa locations
  Clone ID: PAT_MRT4530_15311C.1.pep
MSSGVAWVWMTEDAVASDELRRDRPRRAPGITDTGNELQRGARTAEDVAAATSPAWGATAEDAADSDVVVGLLPAAPAPPXPSTGPLLTLTSSSICVAGRCTLRQRPNSVASPLQSPPSSPAVDPAASPGLHPIYLXFRGAKRQDGVQRAC

SEQ ID NO: 111324 - protein, 44 aa, Oryza sativa
  Clone ID: PAT_MRT4530_15312C.1.pep
GKIDKLFLVWLFSLCFLICSSKIMIYKKIMLFAFKQTPRSLYDT

SEQ ID NO: 111325 - protein, 58 aa, Oryza sativa
  Clone ID: PAT_MRT4530_15313C.1.pep
MEAREPTSSSSPSLLQLHEALEESEEKAEPRVVEVLEDKRLTGGVAGMEEDGDPLVDE

SEQ ID NO: 111326 - protein, 132 aa, Oryza sativa
  unsure (1)..(132): unsure at all Xaa locations
  Clone ID: PAT_MRT4530_15314C.1.pep
TARECNRRHGRGNTNNSSSSGTNGLTPNTTGDGWEPGRNHILHSTSSSLXRRRNYIYLYRARASQTHFPSFXQTTVYVGYLVYALREHRYRGTTKVGRQGIRVVQPTGISATTGSSRSFTYLREFPRLTKIR

SEQ ID NO: 111327 - protein, 136 aa, Oryza sativa
  unsure (1)..(136): unsure at all Xaa locations
  Clone ID: PAT_MRT4530_15315C.1.pep
VAAQTAREYNRRHGRGXNTNNNSSGTNGLTPNTTGDGWEPGRNPNSSLHFTISSGRRNYIYXYRARASQTHFPSFRQTTVYVGYLVYALREHEYRGTTRVERQGIRVVRPTEISATTGSSRSFTNLRENPRSTKIR

SEQ ID NO: 111328 - protein, 113 aa, Oryza sativa
  Clone ID: PAT_MRT4530_15316C.1.pep
FHASRPPWLHPRYADPNRRMLRAPQRAPPNPPQPRPRHAGLPRQRTPAPQRAPPPPSPPPPHPPLPALRVTAALSPAAAPAEEEGDEVCGRWRGVGRGMVLVLGAPTRPPTRP

SEQ ID NO: 111329 - protein, 139 aa, Oryza sativa
  Clone ID: PAT_MRT4530_15317C.1.pep
MNAKVQNINAPTARECNRRHGRGNTNNSSSSGTNGLTPNTTGDGWEPGRNPNLHFTSRRGNYIYLYRARASQTHFPNFRQSTVYVGYLVYALREYKYRSTTRVERQGIRVVQPTGISATTGSSRSFTNLRENPRSTKIR

SEQ ID NO: 111330 - protein, 189 aa, Oryza sativa
  Clone ID: PAT_MRT4530_15318C.1.pep
RPSLARGARSATTERAHNPPQATDRQQASSEPTAAEGPRARPALHRPHAGGLARAAPAGAGASYIPASRCGRVPPPPPEGAHRTGGRGARVAHTTRLPGGPLTRRRTDGPVRGPQTTRRPSPATRVSARRKDPLRATRRGSALSGAGPARGALPCSATAEHQPALNTRARRMGDKSACPTYIQRHAICR

SEQ ID NO: 111331 - protein, 687 aa, Oryza sativa
  Clone ID: PAT_MRT4530_15319C.1.pep
MDDSGNMSVAKNNFKDVAEEIIGVAMKAVLNEVCDEVLGKADGEQVKDMGEIDREATNDVLGEGKEQEEIMMAANVKEVMLTPKRASSRLASMEDEHSLEKAGKRKAWKNLEPKERSGGILLGINEEVLDISSVDEGDFYVKFHVKNKDDGFQWILVAIYGAAQEDYKEAFLVELVNSCNKEVLPILLGGDFNIIRNPTEKNNDNYSEKWPFLFNAVIDSLDLRELELTGRKFTWANSSSKPTFEKLDRILMSTEWEQKYPLSTARALSRELSDHTPLLLDTGVNSLKQPLFKFEPGRLLSLDRLLRDGFYDMVADVWKKEDAKQIQQYRPICLLNVSFKIFTKIKRANERGSFHGVIPHLVDNGLSILQYAYDTIIFMEHDLEEAKNLKLVLSTFERLAGLKINFHKIELFCFGRAKEVEREYVTLFACGSEHKKYRLAKWSILCKPKECGGLGIQNLDLQNKCMLSKWLYKLWNEEGVWQNLLRRKYLSKKTLTHVEKKPGDSHFWSGLMMVKNILLSCGSLKVHNGTQIRFWEDKWNGNTPFAACCPALYNLVINKNESVAVVMSKRLLKVSFRRAIVGHNLKAWLEVVSKVISIKLTEQNDTFLWEIQKNGHFSVNSMYKAIMYREVVPKRDMIWKLIIPLKIKIFLWYLKNGVILTKDNLAKRKWKGDFQGDFLGKTMVFAT

SEQ ID NO: 111332 - protein, 491 aa, Oryza sativa
  Clone ID: PAT_MRT4530_1531C.1.pep
MKNMSIGDVKPIEVENKPSTSTQDELSTSAMPRKAQVEVEEEKAQDPPMLTRIHTALSKDHPIYEVLGDISKGVQTRSRVASICEHYLFVSCLKPKHVDEALGDPDWVNAMHEKLNNFARNKVWTLVERPRDHNVIGTKWVFRNKQERTDVKSAFLNGEIAELVFVEQSPGFEDPKNPNHVYKISKALYGLKQAPRACYERLRDFLLSKNFKIGKVDTTLFTKIIGDDFFGCQIYVDDIIFGSTNEVFCKESGDMMSREFEMSMIGELSFFLELQIKQLKDGTFMSQTKYIKDLLKRFGLEDAKPIKTPMATNGHLDLDEEEGGKPQKGTKFKLVGYSDSDYAGCKVDRKSTSGSCQILGRSIVSWSSKKQNSVALSTADVEYVSMGSCCAQLLWMKQTLLDYGISFTKTPLLCDNDSAIKIANNPVQYSRTKHIDIRHHFLRDHVAKSDIVISHIRTEDQLADIFTKPLDETHFCKLRNELNVIDFSNVA

SEQ ID NO: 111333 - protein, 130 aa, Oryza sativa
  unsure (1)..(130): unsure at all Xaa locations
  Clone ID: PAT_MRT4530_15320C.1.pep
ECNRRRRRGNTNNSSSSGTNGLTPNTTGDGWEPGRNPNLHLTSSXTSRQRNYIYLYRAKASHTHFPNSRQSTVYVGYXLVYALREHGYRSTTRVERQGITVVQPTGISATNGSSGSFTNLRENPRSTKIR

SEQ ID NO: 111334 - protein, 379 aa, Oryza sativa
  Clone ID: PAT_MRT4530_15321C.1.pep
ASVSLSPSSTTASHLSSQISISLSSLSDRSPSPPPPPPPPLPSPIPGPLLPVLPSHPLRSISLSSSPPLLRSISLLLPLRLLPFPTHPRPSPPPPPFPRSPLLPLLPSHPAGGRLGRARAHYLLQFTPPPPPRRHGLHQAAASPSTSPLTATHPGAPSPCRSLPVPERHLPIGCRRHPFSLPILPVGHCISPLLPAGRRSSCHPPYRQSHISSLPVTPSTPPAAARLGALAASPSPPAATAARRPFSPSATACLPTTHWPTIITTMAVLLSILSSSFLLLLAASSSSTATACPSSSLLPLSLPSSPSPSPATQDHRRHCPRPPRPPETAIVAAARDRHRRRRPGPPLPPLSPDPPPSTELHRRAVDPALPWTRRWIRRP

SEQ ID NO: 111335 - protein, 80 aa, Oryza sativa
  unsure (1)..(80): unsure at all Xaa locations
  Clone ID: PAT_MRT4530_15322C.1.pep
MDNKAVFFEAXFMEAMEAISGAQLSESKXRFKDRQXQQDAQYSPLYSRRTSLNPQLTALKRFQTMFQRTCTFSLPMQCCQ

SEQ ID NO: 111336 - protein, 885 aa, Oryza sativa
  Clone ID: PAT_MRT4530_15323C.1.pep
MVIYRLSTRDPFLLNLGIDLGGSCSKISESVLNLRKIEEERLSESLKGSSTFNCNKLNNEGYGSEEEEELNNLVLGHLCGGLVEEVMDGENGHLSCDFNNLPIKGIGKKIESRSKRKKVEIFFWHWTRPKGRSGGILLGINEEVLDISSVDKGDFYVKFHVKNKDDGFQWILVAIYGAAQEDYKEAFLVELVNSCNKEALPILLGGDFNIIRNPTEKNNDNYSENWPFLFNAVIDSLDLRELELTGRKFTWANSSSKPTFEKIDRILMSTKWEQKYPLSTARALSRELSDHMPLLLDTGVNSLKQPLFKFELRWLLRDGFYDMVADVWKKEVRGVTRLEKWQNRLRRLRQFLRGWAKDTSGAYKKEKASLLAKADELDKKAEVMANRIALVAQKVIRPSQTAFLPGRNIMEGVVILHETIHEMHKKKNDGVIFKLDFEKAYDKVDWRFLQQTLRMKGFSPLWCRWIDKIVRGGSVAIKVNDEAGNFFQTKKGLRQGDPLSPILFNLVADMLAILIKRANERGSFHGVIPHLVDNGLSILQYADDTIIFMEHDLEEAKNLKLVLSTFERLAGLKINFHKSELFCFGRAKEVEREYVTLFGCGSGILEKLDYYRSRFFWQCEEHKKKYRLAKWSILCKPKQCGGLGIQNLELQNKCMLSKWLYNLWNEEGVWQNLLRRKYLSKKTLTHVEKKPGDSHFWSGLMMVKNISLSCGSLKVHNGTQVRFWEDKWNGNTPFAARYPALYNLVINKYESVAVVMSKRPLKVSFRRAIVGHNLKAWLEVVSKVISIKLTEQNGTFLWETQKNGRFSVNSMYKAIMYREVVPKKDMIWKLRIPLKIKIFLWYLKNGVILTKDNLAKRKWKGNVKCCFCDSNESIQHLFLDCILAR

SEQ ID NO: 111337 - protein, 138 aa, Oryza sativa
  unsure (1)..(138): unsure at all Xaa locations
  Clone ID: PAT_MRT4530_15324C.1.pep
LQLRTARECNRRRGRXNTNNSSSSGTNGLTPNTTGEGWEPGRNPILHFTSSSLRGGGTIXYIYLYRARASQTHFPSFRQTTVYVGYLVYALREHGYRGTTKVELQGIRVVQPTGISATTRSSRSFTNLREIPRSTKIR

SEQ ID NO: 111338 - protein, 359 aa, Oryza sativa
  unsure (1)..(359): unsure at all Xaa locations
  Clone ID: PAT_MRT4530_15325C.1.pep
MPGIRNDSHNLATESFGLQQSDNNKIVRGGSVAIKVNDEAGNFFQGDPLSPILFNLVADMLAILIKRANERGSFHGVILHLVDNGLSILQYADDTIILMEHDLEDAKNLKLVLNTFESLAMFMLSFFEVPKGILEKLDYYRSRFFWQCEEHKKKYRLAKWSILCKPKECGGLGIQNLELQNKCMLSKWLYKLWNEERVWQNLLRRKYLSKKTLTHVEKKPGDSHFWSGLMMVKNIFLSCGSLKVHNGTQEGYCGSYLKAWLEVVSKVISIKLTEQNGTFLWEIQKNGRFSVNSMYKAIMYREVVPKKDMIWKLRIPLKIKIFLWYLKNGVIXTKDNLAKRKWKGDFQGDFLGKTMVFAT

SEQ ID NO: 111339 - protein, 136 aa, Oryza sativa
  unsure (1)..(136): unsure at all Xaa locations
  Clone ID: PAT_MRT4530_15326C.1.pep
LQLRTDRECNRRHGRGNTNSSSSGTNGLTPNTTGDGWEPGRNPNLHFTSSSXSGRRNYIYLYRAKASQTHFPSFRQTTVYVGYLVYALREHGYRCTTRVERQXEIRVCRSVGLARKPRSSRSFMNLREXPRSTKIR

SEQ ID NO: 111340 - protein, 415 aa, Oryza sativa
  Clone ID: PAT_MRT4530_15327C.1.pep
MTAQNRAKGIKNRGRGHVVEGSCQMKAQDMVSRSSCSKNKVFGSLPVDSIPEIDPSYRLFLEHLREDGNGYVLDAPRGDHGSPVFLRYAQDHASNGYANAKSGTNITKSSLRRSHCNQNSEGPGVTSDKAGSANAGHCFSLGTSFAMETSEIDESYATFLRLLKIKNGLMVIEPEPGVTIVYGQAEETPVGYDELRIATSTNGRDSLMTAFENMGEENAMNTDGDGLGKINNSASEREMDGLALENMGGQDLVCIDEHGLPPCTELSDLNVCGDEQGEPLALSCGIPSTFDEKLNDVLSKPYDLNEYKELLRKATDRKLVSRQRHLRNASKPYATRAVGLSFLDHYPDLAIQIDSADSDERKLCLLRKFFFWLENLCHEGAYMPWIDKPLACNPIDADDYETDDPTAIEIIQDGD

SEQ ID NO: 111341 - protein, 376 aa, Oryza sativa
  Clone ID: PAT_MRT4530_15328C.1.pep
MESRKEDIPQVSSEENEMLTKEFSEQEVKHAIFQIEHNKALGPDGFPAEFFQVFWEVIKDDLMAMFNDFYKEELPLHSLNFSTITLLPKQKDAKQIQQYRPTCRTANERRSFHGVIPHLVDNGLSILQYADDTIIFMEHDLEEAKNLKLVLNTFERLAGLKINFHKSELFCFGRAKEVEREYVTLFGCGSGRYPFRYLWIPMHHKKLSNKDWLTIEERIQKKLSTWKGKHLSVPKGILEKLDYYRSCFFWQCEEHKKKYRWAKWSILYKPKECGGLGIQNLELQNKCMLSKWLYKLWNEEGVWQNLLRRKYLSKKTLTHVEKKPGDSHFWSGLMMVKNIFLSCGSLKVHNGTQVILGGLFGQDNGLCYLRRKMVKK

SEQ ID NO: 111342 - protein, 197 aa, Oryza sativa
  unsure (1)..(197): unsure at all Xaa locations
  Clone ID: PAT_MRT4530_15329C.1.pep
ALLHVVEVLHGHGAGVHGHHDHGVHAAGGARPFPAVGLHVPPAQRRRRGGALLRLRVERTGAQTAXECNRRHGRGXNTNNSSSSGTNGLTPNTTGDGWEPGQNPXNLHFTSSSTSGRRNYIYLYRARASQTHFPIFRQSTVYVGYLVYALREHGYRSTTRVERQGIRVVQPIGISATTGSSRSFMNLRENPRSAKIR

SEQ ID NO: 111343 - protein, 103 aa, Oryza sativa
  Clone ID: PAT_MRT4530_1532C.1.pep
MTPTSGTRGTYGPPLLANIAYDLFFDGPEDKEKGPRTVNDLKLINAGKILENNKTLSECKSPICDFSGLTTMHVVVRAPTSDKQSNKIVAKKPKDFRCGCSIM

SEQ ID NO: 111344 - protein, 742 aa, Oryza sativa
  unsure (1)..(742): unsure at all Xaa locations
  Clone ID: PAT_MRT4530_15330C.1.pep
MRGGAMSDQERDDIPMLLRNVELPTFPPRSTSMCIPVRDDEYEEDTFVPHTGPLFVQPPTQTAAAGIPFTNTPDMPPRPPQGKQVNKPHAIMPEEIGGNRWSYSGNVPKNEHLMMSGPLGQCDDPDCVNCPPACKNKRHFHRGSSTLDSKFHNFLCEHGGGWKKEIERFLSRIPVMNPHAKVVQQWNQFFVISCLVAIFIDPLFFFLLSVQKDNKCIVLNWHFATALAVVRSVTDAIYFLHMLLQFRLAYVAPESRVVGAGDLVDEPKKIAVRYLRGYFLLDFFVVLPLPQVMILLVIPKYVGLSTANYAKNLLRITVLLQYVPRIIRFVPLLGGQSDSSANGFIFESAWANFVINLLMFVLAGHVVGSCWYLFGLQRVNQCLRNACSASKIPSCDGFIDCGRGINIGKQNQLSRQQWFNDSASTACFDTGDNGFHYGIYEQAVLLTTEDNAVKRYIYSLFWGFQQISTLAGNLVPSYFAWEVLFTMAIIGLGLLLFALLIGNMQNFLQALGRRRLEMQLRRRDVEQWMSHRRLPEDLRRRVRRAERFTWAATQGVNEEELLSNLPEDIQRDIRRHFFRFLNKVRLFTLMDWPILDAICDKLRQNLYISGSDILYQGGPVEKMVFIVRGKLESISADGSKAPLHEGDVCGEELLTWYLEHSSANRDGGRMRFHGMRLVAIRTVMHSVVSVAEYLSSMICMTMFTNAGALLLQLHPTGLGHPSREPXAATRIQVAWRYRNRRL

SEQ ID NO: 111345 - protein, 518 aa, Oryza sativa
  Clone ID: PAT_MRT4530_15331C.1.pep
MDAKQIQQYRPICLLNVSFKIFTKTLRMKGFSPLWCRWIDKIVRGGSVAIKVNDEAGNFFQTKKGLRQGDPLSPILFNLVADMLAILIKRANERGSYHGVIPHLVDNGLSILQYADDTIIFMEHDLEEAKNLKLVLSTFERLSGLKINFHKSELFCFGRAKEVEREYVTLFGCGSGRYPFRYLGIPMHHKKLSNKDWLTIEERTQKKLSSWKGKHLSVGGRLVLINSVLSSLAMFMLSFFEVPKGILEKLDYYRSRFFWQCEEHKKKYRLAKWSILCKPKECGGLGIQNLELQNKCLLSKWLYKLWNEEGVWQNLLRRKYLSKKTLTHVEKKPGDSHFWSGLMMVKNIFLSCGSLKVHNGTQVRFWEDKWNGITPFATRYPALYNLVINKNVSVAVVMSKRPLKVSFRRVIVGHNLKAWLEVVSKVISIKLTEQNDTFLWETQKNGRFLVNSMYKAIMYREVVPKKDMTWKLRIPLKIKIFLWYLKSGVILTKDNLAKRKWKGDFQGDFLGKTMVFAT

SEQ ID NO: 111346 - protein, 146 aa, Oryza sativa
  unsure (1)..(146): unsure at all Xaa locations
  Clone ID: PAT_MRT4530_15332C.1.pep
LVLLAGEEDVAAQTAREYNRRHRRGNTNSSSSSSGTNGLTPNTTGDGWEPGRNPNLHFTLSSXSGRRNYIYIYRARASQTHFPSFRQATVYVGYLVYALREHEYRGTTRVERQGIRVVRPTEISVTTGSSRSFTNLRENPRSTKVR

SEQ ID NO: 111347 - protein, 100 aa, Oryza sativa
  unsure (1)..(100): unsure at all Xaa locations
  Clone ID: PAT_MRT4530_15333C.1.pep
MTVVVVGMVRIALQPSLGSDPRRPAKTXIQRRXGRFGRTSWSGRTRGRPILAQNRQVASXTSPLRRLVNFGPIHCVNSEFLAYSXISLVFDIVRLIYRLS

SEQ ID NO: 111348 - protein, 260 aa, Oryza sativa
  Clone ID: PAT_MRT4530_15334C.1.pep
MMCLCVYGETRVPVGIGNFRSLQELDLGMGTIESYENFGMDFGMEVGKLTELRMLNIKGIDEGKWKALIQSVFMLPRIQKLEISFFSLGKMITWDGWDHWEPSRQLQQLSINGICLPRLPVWMNSICIPHLSCMDLKVSTIEASDLDVIARLPALCEVVLQFIWTDIESWTMMLRTNLNYRPYALFRSFVLVARTATAAAAPEPSHADGVEDSGGGGCKRLRRRWLPSLPPRIGPTIAATTMAPEAFAEVVDDGGSDGGG

SEQ ID NO: 111349 - protein, 114 aa, Oryza sativa
  Clone ID: PAT_MRT4530_15335C.1.pep
MASLARASRAAPRRAHATPGPRSAGRMGAGIARSPPTIRRDGEAARANALPLLTGMGNSGAMPLCPLKQAYKSRKTSTNITRTVLKETFVLLGINQDHSGRHLQLKAPYHVKLD

SEQ ID NO: 111350 - protein, 889 aa, Oryza sativa
  Clone ID: PAT_MRT4530_15336C.1.pep
MISPAGHMRRMLGDCQVLSSMAAMAGAASSADALFASPLIPNPALAGFMSSSAAMPFHHFSNAAATLIPKEEGLMGGLHVAKDEGMDLEMDMELSGGSGSAHLDGLLSFADVDDDHKPQHSGHDQPPDAAQPSGAAGGNAKKKRYHRHTAHQIQQMEALFKECPHPDDKQRLKLSQELGLKPRQVKFWFQNRRTQMKAQQDRADNVILRAENENLKSDNFRLQAAIRNVVCPNCGHAAVLADMSYEEQQLRIENARLKDELDRLACIATRYGGGGGRQPVLSTSALSCISAPPPVLMPPLDLDMNVYSRHFAEQAPVMGCGDLIPPPVVPQHDGAAAYMGAMMAPVQEQDKQLVVDLAATAADQLARMCRAGEPLWVRQRGAEVMAVEEHARMFSWPVDGAKQGDGGAVARAEGTRDNAVVIMNSINLVDAFLDANKWMELFPSIVCKARTIQIINHGAASGHLGSGTLLLMQAEVQFLSPLVAAREVVFFRYCVHNADEGSWAIVDFPAEGFEEGLLQASVVRCRRRPSGCIIQDMPNGYSRVVWVEHMEMVGEEKPLQPVFRDYVASGAAFGATRWLSILQRQCERLASELARNIADLGVIRTPEARTNMMKLSQRMITTFCANISASGTQSWTALSDSTQDTIRVTTRKNTEPGQPSGVILTAVSTSWLPFTHQQVFELLADEQQRCQLEILSNGGSLHEVAHIANGSHPRNCISLLRINAASNSSQNVELLLQESSTHPDGGSLVVFATVDVDAIQVTMSGEDPSYIPLLPLGFAIFPATSPSPAAAPTISSSTTTTTGNGNGETSSTPPRNSSSNNNNADELLPPNGCLLTVGMQVLASAVPSAKLNLSSVTAINSHVCNAIHQITAALKSSAGGAGGEPASDQ

SEQ ID NO: 111351 - protein, 63 aa, Oryza sativa
  Clone ID: PAT_MRT4530_15337C.1.pep
MATPMQTSKYFGLLDADTHQRCRYDKTGCINQTTVFEGSWIPKPSAKATPIDRSFIDEAMMHP

SEQ ID NO: 111352 - protein, 107 aa, Oryza sativa
  Clone ID: PAT_MRT4530_15338C.1.pep
KEPKPTLGQLRGKKILPNFGPPKPPKFPPFYSPKNPVKNMPKNCPPIIAPWGPPQRHLGKNGEQLGGLKGGQTIPKNSPLFPNSFGKPGVTKRFLPPPWGKARKKPP

SEQ ID NO: 111353 - protein, 445 aa, Oryza sativa
  Clone ID: PAT_MRT4530_15339C.1.pep
MPGAVIVHHHTRYKTYPGEVTGFVFFCCLIASVGGCIFGYDIGLTAGLTSTESFLAMFFPVIFEQQQERVITNQYCKFDSQVLTLVGSSLFLFAMVAGIFASPMSRAFGRKWTLFVAAVAYLIGAILGAISFNFIVLLTGRLLLGVGVGVCIHASPLYISEMAPAQQRGMLNILFQLMITVGILSASLTTYWTSKIAGGWGWRVGLAFGTVPAAVIALGSLAIPDTPVSLIARGEGEAARATLAKIRGVDDVRAEFEDLTTASEESKAVAHPWRELFFGGRYKPQLAFAILVGTFIGLQFGVSGTGAMSEQYAMCIVLFVCVYVAGFAWSWGPMGWLIPSEVYPLAVRSAAQSVTVAVNMFFTAFISQIFLTLLCHLRFGLFYFFGAWVLLMTVFIATLLPETKCVPLEEVAHVWRKHWFWRKFIVDSPDRGGAEMRKRIALEMS

SEQ ID NO: 111354 - protein, 457 aa, Oryza sativa
  Clone ID: PAT_MRT4530_1533C.1.pep
MDRLSALPDGLLHAVMSFLPARQMAQTCVLSKRWVHLWRSVPSLNLDIREFRNLSKEEDDDDDETWGKMKDFIANLLMFHHAPTLDTFTVCTGAVVQAAVGNRSRRNHRRNDVDYPAVADNRSRDVGRWIRGGIKYCPRVLDVAVAPSGSGCRPPPDLGSGSCFRRLERLRLSCFALDSGFARQVRDSCPVLRCLELHRCHIEFSHIESSTLNKLVIEGCIGCSLSLAISAPRLASLCLDLSYGAYKNGVSLNTISLVEASVTLNVFQISPEGEAMLLCGLFNVTNLELEAIHAKLGGVLGAKLSAVGSAKGGGRERRKFYGCCNVNEKVILHEKFDKFSSFNNLRTLSLDDCFQGMGDLKEKFKALGRLLEKCPNLEKLTLQHCWFLSGSTQRAEMETRTSGLCLQSQDQVTFHCQKLKLIEIKHDSELCCDHQLFQLMWGFWKDLKKATIILTKI

SEQ ID NO: 111355 - protein, 502 aa, Oryza sativa
  Clone ID: PAT_MRT4530_15340C.1.pep
MPGAVIVHHHTRYKTYPGEVTGFVFFCCLIASVGGCIFGYDIGLTAGLTSTESFLAMFFPVIFEQQQERVITNQYCKFDSQVLTLFGSSLFLSAMVAGIFASPMSRAFGRKWTLFVAAVAYLIGAILGAISFNFIVLLTGRLLLGVGVGVCIHASPLYISEMAPAQQRGMLNILFQLMITVGILSASLTTYWTSKIAGGWGWRVGLAFGTVPAAVIALGSLAIPDTPVSLIARGEGEAARATLAKIRGVDDVRAEFEDLTTASEESKAVAHPWRELFFGGRYKPQLAFAVLIPFFQQLTGINVIMFYAPVLFKTVGFRQDASLVSSVITGLVNVFSTFVAVMTADKILVGTFIGLQFGVSGTGAMSEQYAMCIVLFVCVYVAGFAWSWGPMGWLIPSEVYPLAVRSAAQSVTVAVNMFFTAFISQIFLTLLCHLRFGLFYFFGAWVLLMTVFIATLLPETKCVPLEEVAHVWRKHWFWRKFIVDSPDRGGAEMRKRIALEMS

SEQ ID NO: 111356 - protein, 104 aa, Oryza sativa
  Clone ID: PAT_MRT4530_15341C.1.pep
SNRTEFYLFFVCLECCPTVLVKKKKKKKKKKKKKKKKKKKKKKKKKKKKKKKKKKKKKKKKKKKKKKKKKKGGARFWGPRFLPPGCRLFSFFLGPPISNYWPGF

SEQ ID NO: 111357 - protein, 242 aa, Oryza sativa
  Clone ID: PAT_MRT4530_15342C.1.pep
AMVAPRARRMRWRDRFPRVAMETGGGPLPGATRVEVDAEVGAEGIDRRESAAVGAELSGRGGWRGGNSAGPASVVARLSPGTGRRSKDVEVNQPGDVRQRLRWISSGGGHPIFFLVVITRLRLPLVVGNTWGEATPTSRLESSHRRVPIDHRTTSTHRGVTLGSLRRAAPLLVGVDPPPPVVSATSAGDRRGAMAVGSGARAVGDGGGGGVGGGLPLVARHRVVTAAASPTGLLSTRRLGCQ

SEQ ID NO: 111358 - protein, 98 aa, Oryza sativa
  Clone ID: PAT_MRT4530_15343C.1.pep
MAIRSMTVATTTRSLDGDMTVDEFKEWLRRFDVDRDGRISRDELRRAMRAIRARFTGWRSRQGISYADADGDGYIDDGEVDGLIEYAQKSLGLRIVAY

SEQ ID NO: 111359 - protein, 147 aa, Oryza sativa
  Clone ID: PAT_MRT4530_15344C.1.pep
MVVKKKQPHHTFTTTTAARAKTRTSDLRNDAERAAAAWPGAKTWFSPEEKRFLSHSAATTIQKPSTRGHRSGASPLVSHHEGARTPTRSSSIHAIGLDGERVREKNGSPLPHTSLLDVAIFYRQRRHRTLLEKRFFMAFGKYFSWRL

SEQ ID NO: 111360 - protein, 58 aa, Oryza sativa
  Clone ID: PAT_MRT4530_15345C.1.pep
RAEIIADLILEHPSKHLPKEMYMFISDFIYLISIPIQRKRSAQTKENLTFLKIEKIIH

SEQ ID NO: 111361 - protein, 109 aa, Oryza sativa
  Clone ID: PAT_MRT4530_15346C.1.pep
KPLLMFHKCASPSYMSSCLSNVIVQICTSNVMIFRNHDLKGLQRVFVCYFILVYLNSSFRILCVSGRSRHQLTFCSRMILILNSTFAGLKLCHEIGLETYNTYGNGILI

SEQ ID NO: 111362 - protein, 172 aa, Oryza sativa
  Clone ID: PAT_MRT4530_15347C.1.pep
MSLDKTNLVPSAISNLDELIFEEEDHVVDNYVLIIHAAKFYNYSITREQLDDYSITREQLMEFDKDYGMKQCVHDNVDKENADDSVNSFELKSVATVMTQSGAYRGRQEGSSAISDLDEFIFEEEDYPVNDYVLVIYTANRGLKRKKQVVPRRDENPSHAPITTTVSSGHPL

SEQ ID NO: 111363 - protein, 141 aa, Oryza sativa
  unsure (1)..(141): unsure at all Xaa locations
  Clone ID: PAT_MRT4530_15348C.1.pep
FFIPESPRWLAKMKMMDDFESXSLQVLKGFETDITAEVNDIKRAVASANKRTTVRFKELNQKKYRTPLLIGTGLLVLQNLSGINRILFYASRIFRDAGFTNSDLATCALRAIQVLATGVTTWLLDRAGRQMLLIISTAGMT

SEQ ID NO: 111364 - protein, 118 aa, Oryza sativa
  Clone ID: PAT_MRT4530_15349C.1.pep
SIMELLGEFGQIIRHRNSGINQPSNPIICHDCGEHTAKKFSARKNAPKILPKLGKILRALLLHSLTNQIYPTRSSLKACFKSLKTTINSPHLSRLREIGKDYVPKVQLLKQVIKVNPG

SEQ ID NO: 111365 - protein, 885 aa, Oryza sativa
  Clone ID: PAT_MRT4530_1534C.1.pep
MELGSPQQGVGNQRVSEPRLCYLTGTPLTEIDHSNLLLNAQVMNALFNSLSQEEFDRVSNLKIAYEIWNKLAEIHEGTSEYKDAKLHFLKIQYETFSMLPHESVNDMYGRLNVIVNDLKGLGATYTDLEVAQKMLSALPEKYETLIAMLINSDMSRMTPASLLGKINTNDMYKLKKKEMEEASPSKKCIALQAEVEDKWKSKVNEANDDLEEEIALLAKRFNDLLGRRKERGRGSNSNRRRNIIPNKTLSNLRCFECGEKGHFASKCPSKANDGDKSSKKKSGGYKLMKKLKKEGKKIEAFIGQWDSNEESSTSSGSEEEGDDDASSKKKNMAVVAIKEAPSLFAPLCLMAKGSSKVTSLSDSESDDDCDDVSYGELVSMFEELHAYSEKEIVKFKALKKDHASLEVLYEELKTSHERLTISHEKLKEAHDNLLSTTQHGAHIDAGISCDLLDDSAICHNNELKEQVAKLNKSLEICFKGKNTLDKILSEQRAAATCSTPPSSPAELHPRRAAASVVAAGRRHRRKVRRGVEKPGRSLPAVAGHRSPVATADRSRAANRPRRRPSSFVVWFEGEYRWVRLVVLYVFMSSKVAADHPISGEVAILVNYRTGGSHWVLDSGCTQHMTGDRAMFTTFEEGGKEQEKVTFGDNSKGKASSPSSPPGPPLGPTRAAPSRPCRARARACAVCRALTAPRVGPTARSSSSSSPEARRSGLLVGVQYLPLLLCFAGTPSPVPASILVVADVPSAAPFILAGSSSRGAASVVGFAAARSTSSPSPCSCRRLPSSSPRRPQSSSSSSSSRRPHRRGVRPSVEPFSSVVRVRQVGRCSPVVVFVLGSASSSLVPAASRLRPRIAAEAVPSPFVSVVPVCLRRARSSLSFPRLVAWW

SEQ ID NO: 111366 - protein, 68 aa, Oryza sativa
  unsure (1)..(68): unsure at all Xaa locations
  Clone ID: PAT_MRT4530_15350C.1.pep
CPAVRGXRARLSVXXXHWSSFPSTSRVETNPREEVAKSEEAWKREGDVERERGGRLGRDVGMVGEEXG

SEQ ID NO: 111367 - protein, 60 aa, Oryza sativa
  Clone ID: PAT_MRT4530_15351C.1.pep
RCPNLALQVILYYTCVSRSNYDISDYNIRYNCLREAKQNSKSRIQGNPDTVERNDAISSG

SEQ ID NO: 111368 - protein, 131 aa, Oryza sativa
  unsure (1)..(131): unsure at all Xaa locations
  Clone ID: PAT_MRT4530_15352C.1.pep
ICSCALDGGAPPSRQLHEDPRHLTPASPADGEEAGRSRLDREAATCRQPGCGHGATGRGFKDDSSCGCRIRCRATACCTTGGGHPPTRSMGASTSVGXAVHCGLLLCDSYHRXDQVCSEYAKTFYLRTQLM

SEQ ID NO: 111369 - protein, 80 aa, Oryza sativa
  unsure (1)..(80): unsure at all Xaa locations
  Clone ID: PAT_MRT4530_15353C.1.pep
TCIMRKGPNLLKLAWKEQXLSLGTSIRSKYKINYQFYRVLTNGKVQKLHPKDGVYPKNVNACRQAVGQNLRSIGKSASPI

SEQ ID NO: 111370 - protein, 72 aa, Oryza sativa
  Clone ID: PAT_MRT4530_15354C.1.pep
MEGSKCKVHPKTVEDALGVCSRTVEGTDTTTTTTEKLCSRMQENEKGTTKLDGEQQGERSGAQGRRMRMVFN

SEQ ID NO: 111371 - protein, 129 aa, Oryza sativa
  Clone ID: PAT_MRT4530_15355C.1.pep
KLKSGRAIKAERAEKQEKCSSQHIRRWNRTNSQSLSTNTYRSSRTGFLHELEPTNRPMNGPDAMQAKWARACVRVRTDFDYSSRRRRRRRRRRGRLHRSSMADGSHDRAGVGVLLAEDGGEPVGVGGMR

SEQ ID NO: 111372 - protein, 1579 aa, Oryza sativa
  Clone ID: PAT_MRT4530_15356C.1.pep
MPRHHPTSFPFSPFLLSLSHTFLLSRQAASWPLSGGRGRRGEAGKEEAGLAANDEAAAAATQEQATAPRSEFGTKTCNCWGRPEAFDGEGLGRRPRQWCDVEELRVSSGVGGRRVGSEGGGGWWWGFIGSGRALIHFPQKLINLMASSSNSGSAANPLQGHPVSEKLGKANHALWKAQISAAIRGARLLGHLTGATRKPDAEVSVIVDGKTEKRTNPAFEDWEASDQQVLGFLLSSLSRDVLMQVATCTTAAEAWKAIEEMYSTHTRARSISARFALSNAKKGTMTTPEFFAKMKALGDEMVMAGGRPLDDEELIQYIITGLGEGYSEVVSAVCARSEPLTIGDLYSQVLNYEARQALYRGAQEAVVNLANRGNQGGGGGGRGAARGRGRDNQGGGRGRGRTPGGVDKRPTCQVCFKRGHMATDCWYRYDEDYVPDAKHVAAATTNSYGVDTNWYIDTGATDHITGELDKLTVKEKYNGGEQIHTASGAGMDISHVGHTVVHTPSRNIHLKNVLYVPQTKKSLISVHRLVDDNSAFLELHRDHFFLKDRITRRTLLKGQSWRRLYPLPQSSLKQAYSVFKPSLDRWHSRLGHPSIPIVKQVVNKFNLPYLDLSNESVCNACQQAKSHQLPFPVSTSISQHPLELIFSDVWGPAPESVGRKKYYVSFIDDFSKFTWVYLLQYKSQVLETFQEFQAMVERLFDRKILAMQTDWGGEYQSLHSFFSKIGIVHHVSCPHTHQQNGSAERKHRHIVEVALSLLSHATMPLKFWDEAVLAAAYLINRVPSRVIHNISPLEKLHHQKPDYSSLRVFGCACWPNLRPYNNHKLQFRSKRCVFLGFSDMLKGFKCLEVSSGRVYISRDVVFDETIFPFSELHANAGACLRAEIDLLSTDLFGPARSKGNEELSNHMTNPLPHDVLDENESQENDATPSPSTEDPDGAVSHDDSASNSAPSDDCSSPGETAADSQSHDATGDSPSSAAAHSRSMPDTRHPATGGSVPVIDADVRLSTGEEEQQHQSDDATSEQQPEQEQDRPRTRLQSGLRKEKVYTDGTIRYKNSWFTESGEPTTDLEALKDRNWKIAMDSEYDALVKNKTWHLVPPQRGKNVIGCKWVYKIKRKADGTLDRYKARLVAKGFKQRYGIDYEDTFSPVVKAATIRIILSLAVSRGWSLRQLDVQNAFLHGYLEEEVYMQQPPGFEDPTKPHFVCKLDKALYGLKQAPRAWFSRLSKKLVNLGFSGSKADTSLFFLNKGGITMFVLVYVDDIIVASSSERATTALLHDLKEEFALKDLGELHYFLGIEVSKVHNGIVLTQEKYAADLLKKVGMLDCKPSNTPMSVSEKLSLHEGTPLGDVDATQYRSIVGALQYLTLTRPDIAFSVNKVCQYLHAPTTDHWIAVKRILRYLKQCTCLGLNIHKSGSTLVSGFSDADWAGSLDDRRSTGGFAVFLGSNLVSWSARKQATVSRSSTESEYKAIANATAEIMWVQTLLTELGIKSPQTAKIWCDNLGAKYLSANPVFHARTKHIEVDYYFVRERVSQKLLEIDFVSSNDQVADGFTKPLSVRLLENFKGNLNLSRSRLREGVS

SEQ ID NO: 111373 - protein, 80 aa, Oryza sativa
  unsure (1)..(80): unsure at all Xaa locations
  Clone ID: PAT_MRT4530_15357C.1.pep
TSRRRWRSPGGRPSRAASGSAASPPCPGAPPSAASPTPGAGTSRPPSPSPPPPAXSASPGCAPPPAASAAALHPRPYPSP

SEQ ID NO: 111374 - protein, 125 aa, Oryza sativa
  Clone ID: PAT_MRT4530_15358C.1.pep
MARGGGGGDDDDDGAGRRRQRCPARLPSPPLLPGVATPEEDGGGDRRPARPPLRQIQLEGRRWATSGSGALSFAGSGRRGGGSDKYYNRGFLKPNNVFGSPFNTLHSRISVDQTQCGRLGSLRFS

SEQ ID NO: 111375 - protein, 145 aa, Oryza sativa
  Clone ID: PAT_MRT4530_15359C.1.pep
LSMASCRGEHGRELPAPPARRSFDGLCHRLARGHARRHGGPAAPDGPPQAPRGAGPGPRRGARPGARPRRRRRRRRLLLQLLLQHDVHRHLHDQVLAQGIQKLTHLLLHLRLHLHLELHLGLLLDHLITQSIRLAINLDRSGDRT

SEQ ID NO: 111376 - protein, 447 aa, Oryza sativa
  unsure (1)..(447): unsure at all Xaa locations
  Clone ID: PAT_MRT4530_1535C.1.pep
IGRRKTQESNERYKLKRNNKDAFAIAENMPELRLLQISGNNLTNKGVHAILDGCPHLECFDLSECYNVRVDDQLRARCAKHCPDLRVIEEDEGEDYGITMQDLWEAEVETLEAEAKMEEGSYGDYYEDYSALSSPESNSQPFLVSLPSSDFVTDDTLICXALVCTMEAVPSPLPDTDSDRDWSELPVDALSAIFTKLGTVEILMGASFVCHSWLAASKSPELWRFVDMTRHKVIFSKRTGILCAMAKAAIDRSDGQIESFWAQKFVTGELLDYIVRRASTLKSIRLVACTFIQWQSLAMLAAKCPLLEEIECSYHKMPADFFKCVGRVRPNLKRLRMTNMKNLSSSGRQGXNVDAFAIAENMHELRLLQISGNNLTNKGVYAILDGCPHLECLDLSDCYKIHVDDQLRARCYEDYSALSSPESCVDSKDVYCDDPKVYTMYHDYYSL

SEQ ID NO: 111377 - protein, 570 aa, Oryza sativa
  Clone ID: PAT_MRT4530_15360C.1.pep
MDSEDDMLDANDSADDDFYSGGEAGLGGSDDGDADYDFADHDSDDSAELLSHRQQKNNGNSMGVLFGRVGSGDINSWDKDSLQEIGYGITVNELWIYPYPYHTETTAIIRKGSRSHEDEQNYSILSEADIQQRQEDDINRVSTVLSISKSEACVLLRNYNWSVSKVHDEWFADEEHVRKVVGFPEKLIEMPNDRECMLERFDNLTLRYFSLSTPDSVLCGITTYIVHIDRCPDPSCTAAVGQDMINSLADDEDREKYGRYLRRSYIEDNRKTKWCPAPGCEYAVEFVMGSGSYDVNCNCSYGFCWNCTEEAHRPVDCATVSKWILKNSAESENMNWLCLGPWSEHGERTGGFYACNRYEAARQEGAYDESERRREMAKNSLERYTHYYERWAANQSSRQKALGDLLSLQNDKLEKLSDIQSQPESQLKFIIEAWLQIVECRRVLKWTYAYGFYLPEHEHAKRQFFEYLQGEAESGLERLHQCAEKELQVYLEAESPSKDFNDFRTKLAGLTSVTRNYFENLVRALETGLNDVGPSTSHGTCSKSATSKSLGSKNLPETARLVTTSIDSIT

SEQ ID NO: 111378 - protein, 606 aa, Oryza sativa
  Clone ID: PAT_MRT4530_15361C.1.pep
MDSEDDMLDANDSADDDFYSGGEAGLGGSDDGDADYDFADHDSDDSAELLSHRQQKNNGNSMGVLFGRVGSGDINSWDKDSLQEIGYGITVNELWIYPYPYHTETTAIIRKGSRSHEDEQNYSILSEADIQQRQEDDINRVSTVLSISKSEACVLLRNYNWSVSKVHDEWFADEEHVRKVVGFPEKLIEMPNDRECMLERFDNLTLRYFSLSTPDSVLCGITTYIVHIDRCPDPSCTAAVGQDMINSLADDEDREKYGRYLRRSYIEDNRKTKWCPAPGCEYAVEFVMGSGSYDVNCNCSYGFCWNCTEEAHRPVDCATVSKWILKNSAESENMNWILANSKPCPKCKRPIEKNQGCMHITCTPPCKFEFCWLCLGPWSEHGERTGGFYACNRYEAARQEGAYDESERRREMAKNSLERYTHYYERWAANQSSRQKALGDLLSLQNDKLEKLSDIQSQPESQLKFIIEAWLQIVECRRVLKWTYAYGFYLPEHEHAKRQFFEYLQGEAESGLERLHQCAEKELQVYLEAESPSKDFNDFRTKLAGLTSVTRNYFENLVRALETGLNDVGPSTSHGTCSKSATSKSLGSKNLPETARLVTTSIDSIT

SEQ ID NO: 111379 - protein, 52 aa, Oryza sativa
  Clone ID: PAT_MRT4530_15362C.1.pep
EKQVQLQLGAHRRFRVENGAEKNKVTRGKFSQKAKLDLYNATWPNLWSGLKP

SEQ ID NO: 111380 - protein, 143 aa, Oryza sativa
  Clone ID: PAT_MRT4530_15364C.1.pep
MGKPAGIRAGRKLKTDRRENRWADKEYKKKHLGTAFKSNPFGGASHAKGIVLEKLGIESKQPNSAIRKCVRVQLIKNGKKITAFVPRDGCLNFVDENDEVLVAGFGRSGHAVGDIPGVRFKIVKVAGVSLLALFKEKKEKPKH

SEQ ID NO: 111381 - protein, 95 aa, Oryza sativa
  Clone ID: PAT_MRT4530_15365C.1.pep
FSGFSLLRSGWSQQAVYMDCSAPFLVVCMLVLQFVLFYIRWDPRSQLGVSLEKAGAVLDFPAEDGFVFVVLPGCLGPWSCGVVSVSAACFAFPFA

SEQ ID NO: 111382 - protein, 178 aa, Oryza sativa
  Clone ID: PAT_MRT4530_15366C.1.pep
MERGRREKEREPAGATAVAGEVERARRRDGGSGRKGEEAAGAVERAREAADDAEQDNVLLVTTFLIVVAVGGCRAERFLREGSAAGEPIRARLACASPPSLQLGVLGTTTRKGGERNQLPTTAEAGERGAGLLTLADQALAPSHSPASVPPAARAAPFAALARRRSAAVQSRRRARPD

SEQ ID NO: 111383 - protein, 147 aa, Oryza sativa
  Clone ID: PAT_MRT4530_15367C.1.pep
GLTNFHGLDLTTDKLRSLIRKWHTLIEAHLDVKTTDGYLVRLFAIGLTKRRPNQTSKTAYAQSSQIRLIRKKMTEVMEKEVSTVSLNEFVGKLTTETIGAEIEKATQGIFPLENVLIRKVKVIRSPKTDLGKLLEVHADAGKKVERK

SEQ ID NO: 111384 - protein, 126 aa, Oryza sativa
  Clone ID: PAT_MRT4530_15368C.1.pep
MADIGGGATAPMPAPSTHYPARDRELLAGSTGAVAGEEEPSADATVDVEVEREGAALAASLAWSTTSTYLASLSRRRRKRPPATSSDVAWTVEDVTVGDEFRPGTWMTKDTPVDDCHAQKFTNQNF

SEQ ID NO: 111385 - protein, 123 aa, Oryza sativa
  Clone ID: PAT_MRT4530_15369C.1.pep
MSSTKKPSGKTQRSAIADVVAREYTIHMHKRLHGVTFKKRAPKAIKEIKAFATKSMGTSDVRIDPQLNKKVWEQGIKGVDYRIRVRISRRRNDEEGAKEKLYSYVQAVNVKDPKGLPTVVVEE

SEQ ID NO: 111386 - protein, 426 aa, Oryza sativa
  unsure (1)..(426): unsure at all Xaa locations
  Clone ID: PAT_MRT4530_1536C.1.pep
SSISFRILTAHCSTERTVRARLDGFKSRLRAKDDELGRKNLEMEALANTLKEAKAENKRLQSEREKGKEARAEVDLLKAELEKEKAHSAVLIDYYNLTEPKMEALRQEVRKAEASATEESRRFSREMVKTTXSARTACQTLRLAITDMGAKVQGVPSEDASAFDFSEWTQQAGGSVSDCATAYGDCCARVSAAFTMGLLQQFGCEHIAEFPKYAKGDWEISAQDISPALRAXRKQFWQKDGRSAAKARLLEQLVKAEAADLCEEEGAAAGGGGSDAQDHPEGVRRKSCIRPPFGSWRSQTEKFVALKGLPKVRCPFRPTYREMEINGRSYKVFKVADWLRAHPGRTLEDYDLVHSRRLEDMARFWRNHQKTKRQETIFQRRYSLVCVSPPTPLKVVYDISSDDEPSSPDPSLGRDSDYGGEDVFLL

SEQ ID NO: 111387 - protein, 54 aa, Oryza sativa
  Clone ID: PAT_MRT4530_15370C.1.pep
CSPSTAPCESPSSMPAPWTTTSSLPSRPLALYHERPYHLVCRTSNLRFRLVSNI

SEQ ID NO: 111388 - protein, 111 aa, Oryza sativa
  Clone ID: PAT_MRT4530_15371C.1.pep
MGTATRWHSLQNDGLGTPVYLLRDVLPGREHHAHDRQTGIADLVPEQLVVHHLPWPVTHDSVTNEIELPDRTGPWRLRQALRGDEQLAGDARHKHVAVQDELPVCHAVLAS

SEQ ID NO: 111389 - protein, 92 aa, Oryza sativa
  Clone ID: PAT_MRT4530_15372C.1.pep
HASAHASAHAFAHASAHASAHASAHASDLLSVAYKNVIGARRASWRIVSSIEQKEEGRGAAGHAVVARSYRARVEADLSNFCAGILRLLDER

SEQ ID NO: 111390 - protein, 138 aa, Oryza sativa
  Clone ID: PAT_MRT4530_15373C.1.pep
IRPVPSPSSSRRRRRGVLPAPPSPSSAARWRSPSSSPDPLGSGAGRQRQRRAGPPPAQRRLHRRTPRRRPRGDGGRVGSGRQRRGVPRRRWRGGRRGGPRRRRCGVSHAHARRAVVVRRHPCGTAEPTALHSTPLATP

SEQ ID NO: 111391 - protein, 72 aa, Oryza sativa
  Clone ID: PAT_MRT4530_15374C.1.pep
RQRARLNRMLQDLFVGGLRSFLAITTTEATTTTVTTTATTTTESSTATLRAFTALFAITFLTVVLLDLRGGQ

SEQ ID NO: 111392 - protein, 131 aa, Oryza sativa
  unsure (1)..(131): unsure at all Xaa locations
  Clone ID: PAT_MRT4530_15375C.1.pep
FWSIAHNRGHGYSNSFXARGAQLYLQDTIHQHVTVXAGGVTMSSDCDKTLHITLSDQAHHTLGFTPXQQAASSPLSCLGESGXRQRPSQGPSRSITPTIAXMRQPEKSYTSSQAVTHSRLWQALYVFQCIP

SEQ ID NO: 111393 - protein, 82 aa, Oryza sativa
  unsure (1)..(82): unsure at all Xaa locations
  Clone ID: PAT_MRT4530_15376C.1.pep
NPXSXMACTLDSHVAKKKKAIETVKEEQKKNERMKMGLKLFLSMLVNIIXRDCYRRPITLSAPXRSXWKTGIAFSRAFXSDF

SEQ ID NO: 111394 - protein, 310 aa, Oryza sativa
  Clone ID: PAT_MRT4530_15377C.1.pep
MLIPWGGVGCCLSAAALYLLGRSSGRDAEVLRSVARAGSTKDLAAILDTASKVLPLVVAVSGRVGSDTPLICQQSGMRGVIVEETAEQHFLKHNDAGSWIQDSAVMLSVSKEVPWYLDDGTGRVFVVGARGAAGLVLTVASEVFEESGRTLVRGTLDYLQGLKMLGVKRTERVLPTGTSLTVVGEAIKDDVGTIRIQRPHKGPFYVSPKSIDQLIMNLGKWAKLYQLASMGFAAFGVFLLAKRALQHFLERKRRHELQKRVHAAAAQRQAREAEGGNGTSDVDSNNKKDQLVLDICVICLEQEYNAVFVP

SEQ ID NO: 111395 - protein, 52 aa, Oryza sativa
  unsure (1)..(52): unsure at all Xaa locations
  Clone ID: PAT_MRT4530_15378C.1.pep
PEGRPVAHGSAPLGPSALLPALCGRPLQPSPLSEVACVSPPCGGSXATPPPP

SEQ ID NO: 111396 - protein, 282 aa, Oryza sativa
  unsure (1)..(282): unsure at all Xaa locations
  Clone ID: PAT_MRT4530_15379C.1.pep
VEQPLEEPITKVSLXQVDLFVIPCGKEELCYNTSLICMPQLMNEHTIPSVLLCADFKHVVHXIANEVEECELLSSLKTLGYIMFDDFCVLDNLKXNLLAKSNLACRMNTIYHIFGENNTIXISLMHKVYICSVLXHRIFIEENSKXGRYIICNHVISSLSHFNLKNKLVLNALHEQQHMEKLRTVSFEEGEDDVFMPTIETXKAWRTSKNNSIRPRXTTVTSNGHQLCIRALFWAXMESSWSPLSNGSSRISKFHLSWPQLQNQCTVSPGTPAWGAPQTCGA

SEQ ID NO: 111397 - protein, 76 aa, Oryza sativa
  unsure (1)..(76): unsure at all Xaa locations
  Clone ID: PAT_MRT4530_1537C.1.pep
RRNVDAFAIAENMHELRFLQISGNXLTNKGVYAILDGCXHLECLDLSDCYKIHVDDQLRARCAKIKCLVAWTMASC

SEQ ID NO: 111398 - protein, 575 aa, Oryza sativa
  Clone ID: PAT_MRT4530_15380C.1.pep
MAATSAVTTTTGARWRSWAFANMGTLLAHFGSLSFFLGPLLAAYAPRRLLLTYFNLFLRRRARRLLNAVDPYITVDISECPAAARYYSRYDPVDARDTTYDEAKAYLSATCSSEARELHAEGAEEGDGLVISMRDGQDVADEFGGATMWWSSVAAEQQAAPPPPQGAAERRCLRLTFHMRHRRLVVDEYLPHVRREGREVLFSSRRRRLYTNNKMSEYASYSDEKAWSYVDFDHPTTFETLAMEPAKKKAIMDDLDAFRRSREFYRRTGKPWKRGYLLHGPPGTGKSTMVAAMANYLDYDIYDVELTVVGNNNNLRKLLIETTSKSIIVIEDIDCSLDITGDRAARRSRPPPSYRDGHDRRSSDVTLSGLLNFIDGLWSACGGERIVVFTTNHLDKLDPALIRRGRMDMHIEMSYCGFEAFKTLAKNYLDVDAHHLFDAVEELLRDVNLTPADVAECLMTARRSGSDDTSCLEICVDELKKRAEERAKEEAEAKAREEAEAKAMAEFEEKAKEKALAKAKAVVDAAAAAAAAAATTATAKPNATKEEEEEEEEEEEEEEEDSQEESSADTGQFTE

SEQ ID NO: 111399 - protein, 125 aa, Oryza sativa
  unsure (1)..(125): unsure at all Xaa locations
  Clone ID: PAT_MRT4530_15381C.1.pep
RPDDDNSSGGGGGGGXXGGSPTTTSKSSPTSQQISQATSGGQPQLQHRREVAGGGENPHIARGIKGFVEFPRAVRVRLPREERVDLVSNLECQRAQLRTLSRHRNPPAGVGLAAAAAAASHNLVL

SEQ ID NO: 111400 - protein, 321 aa, Oryza sativa
  unsure (1)..(321): unsure at all Xaa locations
  Clone ID: PAT_MRT4530_15382C.1.pep
MALARLGHAVTGRLRRPLHLLHPPPPPLTDHHASVAHSFALIHANTRARGFASSPYNAGGVIGYRGRSPVYTVKVLELLFQINHTRSMSTAAQAEPPSLSKAPTPSQTSSKVPLGARKVGMKVVMMSPGFVYEPYSIREPIPFWKRLHTPSGWRRTKEDVILEMKNAYAVSRLRKKTXYTKKEFYDQAFKIYKEVNTLMAHGDTSSLRKILTERMHSTIKNELKKRQSMWSSVHWELVEPAVCIRTLRARMIGLDNNDLDQAFIQLTLEFVTKQKFEAYNTKGEVVSGDKSKEVLVKDIWVFERSLFHPGAYWRVCGRITL

SEQ ID NO: 111401 - protein, 90 aa, Oryza sativa
  Clone ID: PAT_MRT4530_15383C.1.pep
MADEVGKASVRVSTSKRARHRLQEVSTRRLARDGSSLAATALSFRLIGSSGRGAPETRRRLADCLSGELLLERWLSRIPADGWGMHLVSL

SEQ ID NO: 111402 - protein, 149 aa, Oryza sativa
  unsure (1)..(149): unsure at all Xaa locations
  Clone ID: PAT_MRT4530_15384C.1.pep
NATHDLRIKSSLALGVDMHTXLDELFLTKILLXKYQTVFYASSMFDMICAKKXNEQYDVLNCSTCLLNKMKLKDALGHIEYMEXNIVKFDEVFSCSRCRKNKGVXNCENCANLTNEVYYLXVFLERFSDGKNKVDMILNQSKILVLLGQ

SEQ ID NO: 111403 - protein, 100 aa, Oryza sativa
  Clone ID: PAT_MRT4530_15385C.1.pep
MGIHSPWSGCRNAPVIEKPGRGKSRGLGLGSCVGQAAECGIKSIHPLQFQESGVTLPDGREGHDDVGNVENWMRGPYRPPLGRQADVADSGSTAPSANFS

SEQ ID NO: 111404 - protein, 212 aa, Oryza sativa
  Clone ID: PAT_MRT4530_15386C.1.pep
MDYMSRTTRVMPSRESAHTPPVAVYAKKMRVYAAKGRREPYVGNSRYDPPRTPFMLNYAIYGRKDPLLASYDDDNDDDEDEDEDDGSSGDLPPRKKQKKCKYIIAQRASQAQEAGNEAARRVQSHSYVNGLRTTNYAYMGKPYPSYAHGVVALLVMSGPKGLVSSSLFKIVEVVTAKLILCQMVHPEGSCPWTSGGHPYLTQGVGSPRPLGV

SEQ ID NO: 111405 - protein, 47 aa, Oryza sativa
  Clone ID: PAT_MRT4530_15387C.1.pep
MASGRVQQRNEGNPNRDHPAWHCESQRDYSKNRQSKPMNYRRSVCEV

SEQ ID NO: 111406 - protein, 39 aa, Oryza sativa
  Clone ID: PAT_MRT4530_15388C.1.pep
KLEKLTTSPPSLTYSMKDPTALFHRRQNSYSQLRISNQN

SEQ ID NO: 111407 - protein, 256 aa, Oryza sativa
  Clone ID: PAT_MRT4530_15389C.1.pep
MEGEDLGSWLGLGIGGGGYAYGGDDCRRSPSSPSPVQMLFSQHVKEEITRGYDHGRDEEQASGSKIMKGERGARLRVMRSIRNSGGDGSRSRVLSLGDDGGDGGSGGGGGGGTRKKLQLTKEQSTLLEDSFRVHNILSHAQKHELARQLKLKPRQVEVWFQNRRARTKLKQTEVDCEFLKRCCESLTEENKQLKHELMELRRLASPAAAAAGSQLYVQFPRAAAAAMVNVCPSCEKVTVMGGGGGETGKSSSSYSS

SEQ ID NO: 111408 - protein, 168 aa, Oryza sativa
  Clone ID: PAT_MRT4530_1538C.1.pep
RPVASLCGGGDSVIGGGDSPVTGDGREGAAELPLFHAHPTAARGGSGDGQNDGARRHCRRREPPLPDPHADEADAIAAVGRAPSPSRPTGRERGGGTAVAAVSAAPRRRCAKPTRREGGGRGSAAAADAVVAAVGTAPSPPNPAVAAPSRRERREMGREAAPVAGEAA

SEQ ID NO: 111409 - protein, 130 aa, Oryza sativa
  Clone ID: PAT_MRT4530_15390C.1.pep
MVQREIVEDVEKVERAKTEDRDCINRLLTSCGMPKGEFRDKLMWGCNVAAIFVASGAVGSLIAKIKIDGSVYEPFGPASRTGLTKQHYHASQTGVIALFGQAGLAGVTALFGHARIKLSIVLAKRFRFEK

SEQ ID NO: 111410 - protein, 113 aa, Oryza sativa
  Clone ID: PAT_MRT4530_15391C.1.pep
MAVVLDGGLLSPLHRRSLPTCTARSTLSAPRRRASRNPGEAQGEAATEHRPRLAPHCRHLEASVTEATVPAMGEGERKGKEGAPPLRPPCAAAATVSSCKPRHRWKERKGRGS

SEQ ID NO: 111411 - protein, 1225 aa, Oryza sativa
  Clone ID: PAT_MRT4530_15392C.1.pep
MGTPAYMDPEFFATGELTPQSDTYSFGVTIMRLLTGRAPLRLIRTVREALNDYDLQSVLDHSAGDWPLVHVEQLAHIALQCTELSKQRRPDLEHDVWEVIEPMKKEAHSPLSQSFRSICSAIETATPSYFLCPISQVLQVRKVTMRDPQMAADGFTYEADAIRDWLDKGHDRSPAAEANLRKQLEQTLAGEPSSPLHHYNLGVFLWDRAEAAAREEGEEEEEVRRLRAAAAERFLAAAKLDPNDGVPFRFLGHHYALAGDAQRAAKCYQRAATLNPDDAEAGEAVCDLLDLEGKESLEIALCKEAAGKSPRAFWAFRRLGYLQALGLAYHRLGMFTAAVKSYGRAVELDGSKVFALIESGNIQLMLGYFRKGVEQFRSALEMAPQNHSAYFGLASALLAWARQCVMTGAFGWAASLLKLALARCFPWGDGNIKGGMDDGTFRTTVLEWRNTCLLAANGAKFSYQRALHLTPWEANIHNDTAICLDLIYTIEENNSLDPITWELPEKMSLGGLILEPVNKDFWVTLGSVSSNQALKQHSFIRALHLDMSLSEAWAYLGKLPEFQIGLGTIAARSGELLSPQVLMAVRQAVQRAPHYPESHNINGLVSEVRSDFQSAIASYRQAKFALDMMRNSKTDCRCHIADISVNLARSLCKIYALSLWKLGRHDEALSVSRNLAENLSSMKQESATAALGFICTLTYNISGKDSAAAVIHKLPGQLNYSTQLKFIISALDALQPNKRFQLPQLSMPPRLTSYEVMSEVHSNIALGNAIGGESDKFLRVDGGLSYLKKVLHMYPDCSLVRNQLGSLLLSSEDWMASHKAVRVTSLSRGYTSNRGLRSPHQIQACAAVSCYATCTSYPKFSFPTCEDQYLSGYNAICRLQRWVHLEPWNQDARRLLVLTLFQKAREEKYPKHICTILKRLILQVLSSGSNSQDNKVVQYGNYLLLLVASEVSLQSGDHGNCIAQATEALGVTSSSVDSFFAHLQLCRAYVMQGNLLNSRSEYMKCLQNRTDTEIGWVILKQLASICSLEGTPDEIEIHLGGCVERKGSNASKWMSLFYLACAQCSVWNEDFASAEKAIAQACAEGDPDSCVLFLNGAICMDIAWRFAAPQFIARAASSLRKAQQKSLASLPIVSLLLAQAEGSLGSKAKWEKNLRLEWFSWPPELRPAELYFQMHLLATQSSAATSQQNQLVETMQTPEKWLLRAIHLNPSCSRYWTALMQLVYV

SEQ ID NO: 111412 - protein, 117 aa, Oryza sativa
  Clone ID: PAT_MRT4530_15393C.1.pep
MSAAWMLSRAVSQRLLRHRSRSFCSSLSSSSSGKVKRIERFDEFEEMVQREIVEDVEKVERAKTEDRDCINRLLTSCGMPKGEFRDKLMWGCNVAAIFVASGAVGSLIAKIKIDGSV

SEQ ID NO: 111413 - protein, 139 aa, Oryza sativa
  Clone ID: PAT_MRT4530_15394C.1.pep
MAPKAEKKPAEKKPVEEKAEKKPKAEKRVPGAKEGGGEKKGKKKAKKSVETYKIYIFKVLKQVHPDIGISSKAMSIMNSFINDIFEKLAQEAARLARYNKKPTITSREIQTSVRLVLPGELAKHAVSEGTKAVTKFTSS

SEQ ID NO: 111414 - protein, 322 aa, Oryza sativa
  Clone ID: PAT_MRT4530_15395C.1.pep
MAAAPGAGGQGGGGMDAVLLDDIIRRLLEVRTARPGKQVQLSESEIRQLCTVSREIFLSQPNLLELEAPIKICGDIHGQYSDLLRLFEYGGFPPEANYLFLGDYVDRGKQSLETICLLLAYKIKYPENFFLLRGNHECASINRIYGFYDECKRRFNVRLWKVFTDCFNCLPVAALIDDKILCMHGGLSPDLTHLDEIKSLPRPTDVPDTGLLCDLLWSDPGKDVQGWGMNDRGVSYTFGADKVSEFLEKHDLDLICRAHQVVEDGYEFFADRQLVTIFSAPNYCGEFDNAGAMMSVDETLMCSFQILKPAERKGKFMASNKM

SEQ ID NO: 111415 - protein, 46 aa, Oryza sativa
  Clone ID: PAT_MRT4530_15396C.1.pep
DFCQLRSQPRVIKNPLPPPSTKPRVNSRTQSKTNHILTGSERREPP

SEQ ID NO: 111416 - protein, 400 aa, Oryza sativa
  unsure (1)..(400): unsure at all Xaa locations
  Clone ID: PAT_MRT4530_15397C.1.pep
MAAAPGAGGQGGGGMDAVLLDDIIRRLLEVRTARPGKQVQLSESEIRQLCTVSREIFLSQPNLLELEAPIKICGCFVNIFKTSTFTRADELIVNVGSCNHFQISQEGPVSSLLLPLTEMEELGEHTATVAIDLQLISAVEAPLAKGWGYGYGDIHGQYSDLLRLFEYGGFPPEANYLFLGDYVDRGKQSLETICLLLAYKIKYPENFFLLRGNHECASINRIYGFYDECKRRFNVRLWKVFTDCFNCLPVAALIDDKILCMHGGLSPDLTHLDEIKSLPRPTDVPDTGLLCDLLWSDPGKDVQGWGMNDRGVSYTFGADKVSEFLEKHDLDLICRAHQVVEDGYEFFADRQLVTIFSAPNYCGEFDNAGRNTKXDETLMCSFQILKPAERKGKFMASNKM

SEQ ID NO: 111417 - protein, 44 aa, Oryza sativa
  Clone ID: PAT_MRT4530_15398C.1.pep
APSYSLLADLIAADWFLRLHGCATSSLLIGITIFTITNIFATSA

SEQ ID NO: 111418 - protein, 84 aa, Oryza sativa
  Clone ID: PAT_MRT4530_15399C.1.pep
LDRQYSIVEDGVCVQQAAVVEVPSELVAGASRTPAPKTRAPKLLLLFLDADEPSVSLQLQDLGLLGYSHANLVLLLPRSFASIR

SEQ ID NO: 111419 - protein, 113 aa, Oryza sativa
  Clone ID: PAT_MRT4530_1539C.1.pep
PRNQTGRPAGATPEFVHKFSPVSLRSMLKRRGVAAQQRAPEAMVLAAVLLLMIAYGVARNEAAVPDSSLSCLSMPRQQDGATTPNRRSLSVHPSCCTSSPPPSCYKPQPCPPS

SEQ ID NO: 111420 - protein, 73 aa, Oryza sativa
  unsure (1)..(73): unsure at all Xaa locations
  Clone ID: PAT_MRT4530_153C.1.pep
CSXXVVHSYMNLTHIFTTSKMKTFSHPFNSPQKNLTGQKNGKQNFPQITLLGSPQQPPNKSYKQLTFYAPLST

SEQ ID NO: 111421 - protein, 96 aa, Oryza sativa
  unsure (1)..(96): unsure at all Xaa locations
  Clone ID: PAT_MRT4530_15400C.1.pep
LPSSSLLSFCSPSLLRPSARSERRRAGSEVMAXAGADAGASWSSGNGGLELXSGGCGPDWWRSARAEATAGSPHPSSHRRREEVRPRSPVPPPSPP

SEQ ID NO: 111422 - protein, 47 aa, Oryza sativa
  Clone ID: PAT_MRT4530_15401C.1.pep
YPNRQLSQRGNFLDQAVVPTTTNHKHCLPHTVIIKCRNQKQLNSYLK

SEQ ID NO: 111423 - protein, 43 aa, Oryza sativa
  Clone ID: PAT_MRT4530_15402C.1.pep
MQLRQRQENIHHPSAGAQQDSEASSTCTFVTTTTDNVVVERIM

SEQ ID NO: 111424 - protein, 182 aa, Oryza sativa
  Clone ID: PAT_MRT4530_15403C.1.pep
MASGYPAGGEQPSGRLVVLRPLRLLRRRCLTFFCPCVAFGRIAEIVDQGATSCCARGTLYMLLAMATGFACAYSCCYRSRLHQQYGLQEKPCGDCCVHWCCGPCALCQEYRELKSRGFDMSLGWQGNMERMGKGVATAPPQMHPGMTRYYLACCRPSHDHDPRIVVAVGSPISFSHCRSCRL

SEQ ID NO: 111425 - protein, 74 aa, Oryza sativa
  Clone ID: PAT_MRT4530_15404C.1.pep
GCRNSGTRGRNRSYPLLTRVKQSTPRAYRRKASEKSATAMLINERGGGHRSESDARDDNTLILISQGPSNFYRR

SEQ ID NO: 111426 - protein, 47 aa, Oryza sativa
  Clone ID: PAT_MRT4530_15405C.1.pep
SRERTPFFLKNGNSMMHYILLQLTIPEVLMRLAESEPKTDRTLTKEH

SEQ ID NO: 111427 - protein, 64 aa, Oryza sativa
  Clone ID: PAT_MRT4530_15406C.1.pep
MERGHRGPKETKFPGHGNKFRIDDCPEERGREPFGEQLIHLHLSDVTLHAASRMPTSARGIEGA

SEQ ID NO: 111428 - protein, 96 aa, Oryza sativa
  unsure (1)..(96): unsure at all Xaa locations
  Clone ID: PAT_MRT4530_15407C.1.pep
CLTHAFLEEPTAGLNWGVYXYLMDWLLQTHPYDLGKDNEPHEATRLECGAVTGTIGQTVAYPLDDITRRMHKVAWNNAATIVTGEGKEELQPKAYD

SEQ ID NO: 111429 - protein, 273 aa, Oryza sativa
  unsure (1)..(273): unsure at all Xaa locations
  Clone ID: PAT_MRT4530_15408C.1.pep
MAVFWLISIIVLVLLSGESNAIPAASQQSQLGVNHRKPLQTLRPYNIAHRGSNGEIPEETTAAYLRAIEEGADFIESDILATKDGHLICFHDVILVVTTDXSPIVTEFRVKQRYNFRDQQYNGKYQIITFDEYILIALYADRVVGIYPELKNPIFINEHVKWSDGKKFEDKFVQTLLKYVILRDNFGRLPCVHKEVHPYTFRNENMFLHFDFHQDPYLEYEYWLGEIGVDGLFTDFTGTLHRFQECTTPYPKNEKNAEALLQKINYMLKDSGY

SEQ ID NO: 111430 - protein, 149 aa, Oryza sativa
  unsure (1)..(149): unsure at all Xaa locations
  Clone ID: PAT_MRT4530_15409C.1.pep
GGRRRNGRRRELGRGLGMERXRAENEREGHGEHFIGGGGAEXAGRRPDFAGDVGEKKEKVGGDSKSNPAPLVRRRGRKTRGKGAATWRXARATRRGARGKRRSGCGDGGCEVGDGXTGRAHLSASRVGGGSRPAQRRGEEEGEWAGGPL

SEQ ID NO: 111431 - protein, 120 aa, Oryza sativa
  Clone ID: PAT_MRT4530_1540C.1.pep
SATARQEESQPLSITHTISNTNTSTLQSTIKSHQKELETKLGIIGKCPCSCCFSSVELWPFLWSTWKFGSHIALSRRGDKALPRFPAGPGGPSTKPPRRGEGREPPVGEDRAVRLLWVHW

SEQ ID NO: 111432 - protein, 52 aa, Oryza sativa
  Clone ID: PAT_MRT4530_15410C.1.pep
VCHSRDLQKMRCRKLGLVDLGQVDAPPEVFIHECQALSHSGRGLRWEGAAGF

SEQ ID NO: 111433 - protein, 104 aa, Oryza sativa
  unsure (1)..(104): unsure at all Xaa locations
  Clone ID: PAT_MRT4530_15411C.1.pep
VHTYLYIHTYIYTYIHIYICVCIYICIYIYVCIYIHICSXIYIYVYVYIYIYVCMYIHICICIYIHICICIYIYIYIYVYIYIYIHIYIYIYIYIYTYNIYIYI

SEQ ID NO: 111434 - protein, 91 aa, Oryza sativa
  Clone ID: PAT_MRT4530_15412C.1.pep
MSSSASPSTAPSAEYAEVRSHRLDPFSSHEIDFPFPHLVFFFSILLDLQHLSNLVAIPSLSHENHYFLGPIGNLDPTDFIIGESNRIPFRL

SEQ ID NO: 111435 - protein, 518 aa, Oryza sativa
  Clone ID: PAT_MRT4530_15413C.1.pep
MDAAGEEGGMTYGEVVDYFNSLQDPPAQERIDCIIPYLISLLPAPFVPAPPDAASADDSEDDHFSFTSSDDYSAAEDARSFPSPPPGDGEEDHISRLADDLLSEIISRLSTKEAARTMALSTRWRRVWTKTSLLVDDAHLRDADNEVSLVRAISRCVDAHPGPVRSARITHVAFYHHEYALRRLVASLADKNVEDLILFNRPWPLNMPLPDDIFRCAYLRRLYLGAWMFPEVAAAALVNLRELGLFHCIIPDRDFDALLSLCSKLEVLSLAMSYNCPSRLRIKSPSLRAAVEWMSSLDEIVVDGAPCLERLLLHHAIPVAERTPIKIVSAPRLEVLGILDLQLHELQIGGTTIRPGMWMFVKSSAKLPSLKILAVKVCLAIEREIKLLMTLLKCFPHLETLHIKSIPPCASPEIANCADVWESLGSCECLKSHLKTVSIQGFHTERYEVLCLKYLILEGEVLETVAFFCEDKVCFAAKDDEAVEIELMFPKNLVQDRWSFQSAIDLSLDDPFFYAVES

SEQ ID NO: 111436 - protein, 50 aa, Oryza sativa
  Clone ID: PAT_MRT4530_15414C.1.pep
MTSCQRFHIHHQQSKKKGANAADISYIRDSRVNKEGCPEVAGERAQQALF

SEQ ID NO: 111437 - protein, 102 aa, Oryza sativa
  Clone ID: PAT_MRT4530_15415C.1.pep
MATRGRWRRLRVGVDSGEPVTGKTEEVADRDRLDLGRHALLARGRAAPPDRPSFCSALTVVTVAAVSVAPSCLRLNHRRREGGEEWGRDEERKREWRGNVKP

SEQ ID NO: 111438 - protein, 409 aa, Oryza sativa
  Clone ID: PAT_MRT4530_15417C.1.pep
MASVTGTQQANWGGLLETAATNVPIAAVTPRHHRSRSHSRYRGRRIQHSRGRRHRIRCPPSPLSPTATTCRFRGRGRRIRKLPPLAPEVGGGCIRPLPATAHCRPPPPLPRLGSVDPRVDVATEDGGGAVGGERRRARRLLLLAGAAAAIALLLSATAPVAGAEDDGYSYIPGSPRGPQNWGSLKPEWATCSSGKMQSPINLGLLDLTLAPGLGNLNYTYKNANASVVNRGHDIMVRFDGDAGSLKINGTAYQLRQMHWHTPSEHTIDGRRYDMELHMVHLNAQNQAAVIGILYTIGTTPDEFLQKMEPYIIAISNQEGKEKMVVGGADPNVAKGKDTVYYRYMGSFTTPPCTEGVIWTVVRKVHTVSLSQITLLKAAVLMGNENNARPLQDVNNREIDLFFPLPLINN

SEQ ID NO: 111439 - protein, 186 aa, Oryza sativa
  Clone ID: PAT_MRT4530_15418C.1.pep
MAAAAAGGESGECRSRGAEIAGGAGRRAEGRSPVTAGGGAAGDLVAGEAAAATRRRGVSEVGSRRRPCAPPPHSTFEPLPSSPRPHRHRYLTFQAPPSLAHLLHPRPPAPPLLLLRPTPTAHAIATGHVETEGAVNGVGLTKLMGRRAGRIALHATLISRDVDCWWRMQRLATMGNCPGSMRTTPQ

SEQ ID NO: 111440 - protein, 114 aa, Oryza sativa
  Clone ID: PAT_MRT4530_15419C.1.pep
MQLESGGDVGSSGGHGSCRLGLEVGGAGQPNTVSQPHAQAMTSPFAMPYPNGPLQQGAVSKAGGEKGLPLSGGSKIRPIPPQFKFSPVPRYSGETDPKEFLSIYESTIEAAHGD

SEQ ID NO: 111441 - protein, 105 aa, Oryza sativa
  Clone ID: PAT_MRT4530_1541C.1.pep
MGPLRDIKRTKKSSKRFLSAIKRAASSRSHHYSYSLSACPSNEDARVKGMLSHMAKCQWMRIKAKLSIPTPSWACKEIRMCRPTTSSGIGCSLIREHTTRSCLSK

SEQ ID NO: 111442 - protein, 111 aa, Oryza sativa
  unsure (1)..(111): unsure at all Xaa locations
  Clone ID: PAT_MRT4530_15420C.1.pep
ATLYSTIFFFFFYFXKQKENFQPPNHFISTFLMHTSKKTFSSLTKKNQNFIYNPTNTPDTKRFFDQNKQNHHGKLLLGNPQPLGFTGIQPPGETGRKTAAKINPCPFCPFW

SEQ ID NO: 111443 - protein, 186 aa, Oryza sativa
  Clone ID: PAT_MRT4530_15421C.1.pep
MSAAAKAKASGGGRRGGAKDPTDALRSDKKRRDMDDSDDAELDSVATEIQTIVQDAKGKFEKERQNYLKVLSKTSKECEGLLKNEYTKFQATHDKFCKEKAAHMQTLKDLFSKFEDAKEKLLIQYELQRKKEKATLSELEKTFSEKITNAEESLKKMKQDDKSIVNLRKSIGSFLDPDDEFGADDD

SEQ ID NO: 111444 - protein, 125 aa, Oryza sativa
  Clone ID: PAT_MRT4530_15422C.1.pep
MWPVRPCYSATARKLDVVALSEDPIALAGQTAVEWPVRPASARSDRHRLGQTEYGSVGSISATPSNTSRPPGGQSDRACAVGQTAVLWPVRPARARQLDRHYVAGLTAPSQAEPSHYPPLIVRRN

SEQ ID NO: 111445 - protein, 66 aa, Oryza sativa
  Clone ID: PAT_MRT4530_15423C.1.pep
MSAGQLAFLACVLLLKKETDDSKAIRIGLLDGSGGSENRGKDELTGQSGLVVELDRISCNCKSRGE

SEQ ID NO: 111446 - protein, 329 aa, Oryza sativa
  Clone ID: PAT_MRT4530_15424C.1.pep
MARKEVGMLLGISDKIDSLRVRLDGLKEFLADAERRRITDLHVQGWVKELKDAMYDATDILELCQLKAMDQDSRRSNNPSLLSLRNPLNAHHIGSRIMALNQRLDGIKQRAEQFSFIKLDRYGDCSRTAQGHGLRRTTPELDRSGVVGNKIEQDTRRLVELLTREEEEASAASISSNVRVVAIVGVGGIGKTTLAQNIFNHQDIKEKFDKIIWLSINQEFSDPELVRTAITGAGGEHSGHQELSLLQPILREAISGKKIFLVMDDMWSVHAWNNSLRIPLVNSAAQGSWVLITTRDERVAREMKAIQPYHRVDILSRQDAWLLLKKQFH

SEQ ID NO: 111447 - protein, 84 aa, Oryza sativa
  unsure (1)..(84): unsure at all Xaa locations
  Clone ID: PAT_MRT4530_15425C.1.pep
TALLRRHLPLPLPLRLRLRLRLRLXRVXELGAXDERTEVXXAALQLXGGPVHGGRGRRRYAGSSASGGSGEGASTVARPXVRXL

SEQ ID NO: 111448 - protein, 208 aa, Oryza sativa
  Clone ID: PAT_MRT4530_15426C.1.pep
MHAYVSLDPLERRRSDNLTTVRYGPQWRVLWRNLTAGFLRPSRVGLLAPLQQKAVDALVADIAARGADGGEVGVRDVVHDALFPLAVRFCFGDDIDELPCARPTARDAGVEARRRGQGLQWLDAGEPRALVAAAPLHRIRPPAGPRFSSHSSPNGGEHSIATPTAACSVLTSTRCSTCASCRTRRRRRRRRLRGPTKGHLPACTHRDE

SEQ ID NO: 111449 - protein, 37 aa, Oryza sativa
  Clone ID: PAT_MRT4530_15427C.1.pep
GEGTGGKPPALQLTAKSQLINHTREHYLRAHMLETHD

SEQ ID NO: 111450 - protein, 97 aa, Oryza sativa
  Clone ID: PAT_MRT4530_15428C.1.pep
MDVDGKKSSRYMNSRYRPKQHDGKESKENEHSSCKEAKNNEMEVDKQVDELASAVSRLSTADSTPSSISFGHRRSRGLAFVPRSIRQTRQAPTRPPK

SEQ ID NO: 111451 - protein, 82 aa, Oryza sativa
  Clone ID: PAT_MRT4530_15429C.1.pep
RTRLTRASVATPNLTTPWATPKGFRGCSRSLTLSRNPTNLHTPPQPPKPFGWALKTCPSICGIYPNYYIAPTTIPTVGGVWY

SEQ ID NO: 111452 - protein, 70 aa, Oryza sativa
  Clone ID: PAT_MRT4530_1542C.1.pep
KKFPAWSQKKFWPIKKFKILGVGLKTFFKGNFNLKKRLNNCKVGFATRGSPCKKLKLQKGWMGCIGNLAV

SEQ ID NO: 111453 - protein, 192 aa, Oryza sativa
  Clone ID: PAT_MRT4530_15430C.1.pep
MPSSSSTKAQAGILPMLYESPTVITPEKRNPQVSLCLNNVFSENRSNFNQFTGKCIHRASKPKPPLVLPTTGVEHGYTELMMATYSEKGPENKLDHGVDETRTYEEIKSKIFAGRKMAFGVAVMENHPKDARSKPSSGAKHSVGKCGHGGRKDLSMNCYFRSRKFPPGVNFDGHIPFTADYRTPRHHPPKNN

SEQ ID NO: 111454 - protein, 44 aa, Oryza sativa
  Clone ID: PAT_MRT4530_15431C.1.pep
YYIASIIQFFALRSVILHNGTSVRILLKNQFVPNFMCIAEVPKF

SEQ ID NO: 111455 - protein, 60 aa, Oryza sativa
  unsure (1)..(60): unsure at all Xaa locations
  Clone ID: PAT_MRT4530_15432C.1.pep
TARXRSLSXVPTRRCXSPSXQGSVWXPAGKXXGSLXXGNXMAALLXLPDLHPLGSGSLXS

SEQ ID NO: 111456 - protein, 52 aa, Oryza sativa
  unsure (1)..(52): unsure at all Xaa locations
  Clone ID: PAT_MRT4530_15433C.1.pep
NLKYSTPARSTNXNGXSSKGXKSAXGVAXXKGXSXMFSPNXHVCHREXSVLL

SEQ ID NO: 111457 - protein, 110 aa, Oryza sativa
  Clone ID: PAT_MRT4530_15434C.1.pep
IMLMVITSALDLCMAHISSCRTIPLLLGNNPARGKQVNFEMWDPRLGTRKPPYFIWHLWGRSDADHHLSVNMGGVEYHSVFFFSVAFGVSYSHFHLLLSIQLACQETLSM

SEQ ID NO: 111458 - protein, 161 aa, Oryza sativa
  Clone ID: PAT_MRT4530_15435C.1.pep
MVGGEVMCEAAAPRYRGVRKRPWGRFAAEIRDPANGRATNFPLVSSLPLPSPHYHLPGKAAAAAPPVAGPACSASSTVESSSGPRGPRPAATAAAVPRRRVPRPAPPAPDAGCHSDCASSASVVDDADDASTVRSRVAAFDLNLPPPLDRDHVDLCTDLRL

SEQ ID NO: 111459 - protein, 99 aa, Oryza sativa
  Clone ID: PAT_MRT4530_15436C.1.pep
GRAALGANISCIFFIHLETPSSNNHPSCSIRLGSASQTPALAHQSINPGHFMVLSAAMATCRACSWVTDLNLGRGTEAPQWTHQTHHPCLSHPLGHIAC

SEQ ID NO: 111460 - protein, 190 aa, Oryza sativa
  Clone ID: PAT_MRT4530_15437C.1.pep
MVGGEVMCEAAAPRYRGVRKRPWGRFAAEIRDPAKRARVWLGTYDSAEAAARAYDVAARNLRGPLARTNFPLVSSLPLPSPHYHLPGKAAAAAPPVAGPACSASSTVESSSGPRGPRPAATAAAVPRRRVPRPAPPAPDAGCHSDCASSASVVDDADDASTVRSRVAAFDLNLPPPLDRDHVDLCTDLRL

SEQ ID NO: 111461 - protein, 555 aa, Oryza sativa
  Clone ID: PAT_MRT4530_15438C.1.pep
SDIVQQHIGERGTCLGVSVFGTSTTARDGLGTWGVEEAKLSLVGAHVRSLRFDSMATGDPNPTTTPPSQQLQGADPQPQSQQDAAANATPAAVAVREDYVQNAVKFLSHPKVRGSPVLYRRSFLEKKGLTKDEIDEAFRRVPDPQPSATATAAASPSPSQHPNNQNHSSTVVQPYAPRQPATPAGSIIVATQPKFSWYRAFVAAGLLLGFGVSAAVFVKKLLLPRLKSWIRKVVAEGDENEGRQIKSKIDEETAEAVKASASAVSAIAKTNQELLASKDEEKKILVTLTQALDSQAKELKSLCESLNHSRDSINITREDRFSQYRALEEHAPSAARNGPVNTPWRASQQTNMYGVPNSDFGSGRPSFASTHNEATPGSFSRSYVETSAAHRGDNRSSGSKPWEMQQYSQQRIGYGSNSQLSDDGCPETQDNYGGGPSYSYHQNQNQNGKAPAPDIQAEEARPSVYISGAEERSPPPPPQRRWVPPQPPGVVMPEAVAAIRQPKSLAKQPSSEASQEAAGETHANGASSSSPLPEEALVNGSDAGRSEIEEQAEAI

SEQ ID NO: 111462 - protein, 188 aa, Oryza sativa
  Clone ID: PAT_MRT4530_15439C.1.pep
MAARALLVVAMAAAVLGTAMGVTTYTVGAPAGSWDTRTNYVQWVSAITFRVGDQLVFKYSPAAHDVVEVNKADYDSCSSSSPISTFNSGDDTIPLAAIGTRYFICGFPGHCTAGMKVAVKVEAATGSNPTPSPLAPLPRTPTAIAPNAMPPTNGGRPAPPSSSASKPVGVASLVGLSLSAIVAGLMVF

SEQ ID NO: 111463 - protein, 162 aa, Oryza sativa
  unsure (1)..(162): unsure at all Xaa locations
  Clone ID: PAT_MRT4530_1543C.1.pep
QVRIWKDKRIDNTSFKERYPSLYPIVRRRNCXVVNVTSSVPLNISFMRALVDQDLANXHNLCASIVHIHLSNNNGIFKWNFQXNGQFSVRSMYLALINNGYIERNKFIWEXKALLNINIFMWYLLEGAVVKIHNLARRNWNGSMRCCFCIKNDTIYHLFLDC

SEQ ID NO: 111464 - protein, 51 aa, Oryza sativa
  Clone ID: PAT_MRT4530_15440C.1.pep
MLAGVTKALEGSNCKVKWQPYCIKDAGLKMTCCMKNIGVQDGQCRYPSLLN

SEQ ID NO: 111465 - protein, 95 aa, Oryza sativa
  Clone ID: PAT_MRT4530_15441C.1.pep
PPATPSTPRRAQAQHMRSSLKQTEHSRTGDRSAQRKTAAKAAAPERIERPGKRRRERAQPRTVATVGKPGHPDRTSRRPETLSETYRASAKRGPP

SEQ ID NO: 111466 - protein, 139 aa, Oryza sativa
  unsure (1)..(139): unsure at all Xaa locations
  Clone ID: PAT_MRT4530_15442C.1.pep
APPEEALAIGGGEEGEVGADITPSDTHNNPPPVIQGPITRARARQLNLEVSSFLCSSLYDFENRLLSNDYIMIRYNGEDKETLTEGLRTVEDXKGVQVKXGGPNQVDFEYXTFRSLGPVCTKTGAQVAYVLGLGSSLYG

SEQ ID NO: 111467 - protein, 128 aa, Oryza sativa
  unsure (1)..(128): unsure at all Xaa locations
  Clone ID: PAT_MRT4530_15443C.1.pep
RIRGRNEARVHGRGREEAGREEGDDRPGAWAPRGRTRGQRMRGARVHGRLGSAWLGRSLGRAAGPGEEEGEAAWEKEGGGGSGPGGGEEARERREREGGEGDFGRGPGEREGXDFEPNLAQKKKEDYF

SEQ ID NO: 111468 - protein, 92 aa, Oryza sativa
  Clone ID: PAT_MRT4530_15444C.1.pep
CLHVVADVDVCTYICVHVYMYILVCILMLRSLLMHLLSEICRVTQFVSSIVLFVATYYPKVETPAGEVPDRSRYISRCCDLRILIICVYFDP

SEQ ID NO: 111469 - protein, 208 aa, Oryza sativa
  unsure (1)..(208): unsure at all Xaa locations
  Clone ID: PAT_MRT4530_15445C.1.pep
MSVEETASGSWVVEIESYISGDTSGEMARGSKPRHSIYRVPEYIKNMTNPRAYQPQVVSLGPFHHGDPALLPMEKHKCRAVASLVKRSGKPLQEFIAAVEEIKVQLQXAYEKLEDEWYQGTRFVELMLMDGCFLLEMARVFQLDGRAEDYEPDDPVFSEHGCLYLSDGIRSDVVLMENQLPLLLRKLVNVAYGHDFLRSARASPVPGE

SEQ ID NO: 111470 - protein, 52 aa, Oryza sativa
  Clone ID: PAT_MRT4530_15446C.1.pep
VLARIDAADPCTVPGVYKRFMSDQYVDIEARGPMTGIADYIWMRSGTYVLRY

SEQ ID NO: 111471 - protein, 674 aa, Oryza sativa
  Clone ID: PAT_MRT4530_15447C.1.pep
MAPSTRLLSWSSSSDDDGAGAGGELSRPRRRWRALVLGLGVRRKRSMEGVFGFREMMGEEFMGHVSSPSLAKMVQKVVSEEVEKAIFRQVSTPAPPRLLAGLNQQRPRYQLVFLNELKPVYTLMKLEAKDGPGLKVAIVERLENNQMRIVRFGHLASAKVEVVVLHGNFNAKNEEQWTPEDFSKQIVCGREKSAQLLTGNLTLKLNGGEALLENATFTDNSSFTSTKKFRLGLRLANNSEDRVLEGITEPFRVKERRVEGFEKHYPPMLDDEVWRLEKIGRNGAHHQALTNSGVDTVQKFLQSYFTDEKKLFQTFSKMSQAAWKTIISHAMTCEVGDDLCLYEVKGNNVGLFFDAIYQLVGVKFGDSYKPINELDEIEQSAVETMKQLAYANISGIQYDHKMVNNYPVPLHRFHCGGTSMLTDFIPKQQIPTCGQYNSALAGQPFESTENFSSFQEASNASVDMSRFVQGQTSNVQFSQQLGMGNFIPHHSNQGTFIPRPRITPLCIPNTEKTYFNPNAHSSIQADHAATRIGQYAHNERSHSPEESYKRFSPDNFLHTDEVVALMQPHLVPPSNSENFSNLLNLSSNDQTSQQIAAPFQPSRTNSFDSSSCDQLIQNFISQFSSNERVAVPLSPRKWVKIRAALKLASVGRLSRASRKASHRPPARPRLVPIV

SEQ ID NO: 111472 - protein, 118 aa, Oryza sativa
  Clone ID: PAT_MRT4530_15448C.1.pep
MESRKEEEQHGGGGAVGWMTVPAFGEWDMKNGAVPDYSMDFSKIREMRKQNKRELSRASLGGDDDLLAAQQHKAAAPQPAPNASAAADDHRRPLHAAHDDSPTGRKKFLSYFQCCIRA

SEQ ID NO: 111473 - protein, 95 aa, Oryza sativa
  Clone ID: PAT_MRT4530_15449C.1.pep
GASFVKPWQRFLLRFAPAFPPTLGVPPIGVLGSLIIGEENLPNILRSCYISGLLFFGPPVEQIPLFVDYHLGFISWGGGWGFLDYPFVVLNVEFL

SEQ ID NO: 111474 - protein, 75 aa, Oryza sativa
  unsure (1)..(75): unsure at all Xaa locations
  Clone ID: PAT_MRT4530_1544C.1.pep
GLPENPVPFAGLKVQGIKIGRLPMFSMFGFFVQAIVPGKGPLENLVGPLXNPVANNAWVFSPKFTPGSLMAHPPL

SEQ ID NO: 111475 - protein, 133 aa, Oryza sativa
  unsure (1)..(133): unsure at all Xaa locations
  Clone ID: PAT_MRT4530_15450C.1.pep
KKKNPRXRREKNSXRQFSVGDAEQRLAEELVRLSAAAVAAADASAPDVAAAAPARVGAAQQGGVEDNPAVERGAGGGQVARERQPEVERPQQRRREVEQVEEPPRRHDRHQVEPHTTARSAACFARLLPTQVX

SEQ ID NO: 111476 - protein, 77 aa, Oryza sativa
  unsure (1)..(77): unsure at all Xaa locations
  Clone ID: PAT_MRT4530_15451C.1.pep
LSLSPSFPVSSRRVPFVTAPRLALTPRSVAAARRAMAXAATPQPSPPSPKAVRVVVKDRLQGDLFRDWTAETARALG

SEQ ID NO: 111477 - protein, 99 aa, Oryza sativa
  Clone ID: PAT_MRT4530_15452C.1.pep
RTRTEYHQRAKLKIVQITRSSQTKLHIYRTRDYCNPKRKINPPKTPEIPTPTHGKPMPFEAKKKTLIYTNLNPPTEKSLAKPSTPTPPRTPPPSCRIPA

SEQ ID NO: 111478 - protein, 39 aa, Oryza sativa
  Clone ID: PAT_MRT4530_15453C.1.pep
MGKKARGGAWRQGSTQRRDLETASTQNGSAAHASAPLLR

SEQ ID NO: 111479 - protein, 77 aa, Oryza sativa
  Clone ID: PAT_MRT4530_15454C.1.pep
MECEESYGLGKYILVLTSCGKSTGKAKCAIATVEFLSNLSDLEFLFMVYKLKDLVLTVDTEAKGVYLHVPREIGVLG

SEQ ID NO: 111480 - protein, 55 aa, Oryza sativa
  Clone ID: PAT_MRT4530_15455C.1.pep
MDRLSRVESSRMGGSMHADLYAFWSPQRKADDGVPSHAHLTRTSTSENDIDMSSG

SEQ ID NO: 111481 - protein, 52 aa, Oryza sativa
  Clone ID: PAT_MRT4530_15456C.1.pep
LFAFALAPLLLFLFGSVFLPPNFAEPYYHGFYNHHLCTLFHYNTPPLHQAGR

SEQ ID NO: 111482 - protein, 65 aa, Oryza sativa
  Clone ID: PAT_MRT4530_15457C.1.pep
DARKDLAYAMQITDARRRCAFPVPPRQALGRSTIGASSAAMAMANPEKLRSQIFFLYFTSKSVER

SEQ ID NO: 111483 - protein, 288 aa, Oryza sativa
  Clone ID: PAT_MRT4530_15458C.1.pep
MANSPTPTMLAFLALGLALLLSATGQASAQNCGCQSNMCCSKWGYCGTGKDYCGDGCRSGPCYGGGGGGGGGGGGGGGGGGGSGVSVESVVTEAFFNGIKNQAPNGCAGKNFYTRQSFLNAAHSYSGFARDRTNDDSKREIAAFFAHVTHETGHMCYINEINGASMDYCDKNNKQWPCQPGKKYYGRGPLQISWNYNYGPAGQNIGFDGLRDPDRVAQDPTISFKTALWFWMNNVHQVMLQGFGATIRAINGALECNGKNPGAVNARVNYYKDYCRQFGVDPGGNLYC

SEQ ID NO: 111484 - protein, 119 aa, Oryza sativa
  unsure (1)..(119): unsure at all Xaa locations
  Clone ID: PAT_MRT4530_15459C.1.pep
KVSFLSNKNSYLPIGINMYTRGHCKLSQRSIQLLSPHRRPLYRGFHLSSGKTWHLTXGCIGFRSPAKRXVLCFAGPCNCIGFIGVVQGCIXVHSTSWIALVRLIYLPTYLSHNFVNLVW

SEQ ID NO: 111485 - protein, 71 aa, Oryza sativa
  Clone ID: PAT_MRT4530_1545C.1.pep
LALLAFPNVGFNLHVERIFRSCSVGSTGGWRPRGSLTVHGGPGAPGSHRPAPWAPRVSHTRGRDRLTAGPH

SEQ ID NO: 111486 - protein, 162 aa, Oryza sativa
  Clone ID: PAT_MRT4530_15460C.1.pep
MGMGFEHGFALPVPTRPVAIPKCIGSKKIDAARALAGADLAKAGSSGGGGSPDLAAGATTRQWFLDTAVLLPSRRRGELADGVASLAAAAAVAAYLAMMTTAAAMDLARRRRPQHGGDRMRQRAGLRRLQREASACGFAAPEPRRDACTGSSASSMTACETT

SEQ ID NO: 111487 - protein, 1046 aa, Oryza sativa
  Clone ID: PAT_MRT4530_15461C.1.pep
MAFPSGKAYYLHLLLLAILPSLVARRGAAQQGGVDEKQLLLQVKRAWGDPAALASWTDAAPHCRWVYVSCDGGGTGRVTSLSLPNVAVAGAVPDAIGGLTALTVLNLQNTSVGGVFPAFLYNLTAITSIDLSMNSIGGELPADIDRLGKNLTYLALNNNNFTGVIPAAVSKLKNLKVFTLNCNQLTGTIPAALGELTSLETLKLEVNQFTPGELPGSFKNLTSLKTVWLAQCNLTGDFPSYVTEMMEMEYLDLSQNSFTGSIPPGIWNIPKLQYLFLYTNQLTGDVVVNGKIGAASLIYLDISENQLTGTIPESFGSLMNLTNLALMTNNFSGEIPASLAQLPSLVIMKLFENNLTGQIPAELGKHSPFLRDIEVDNNDLTGPIPEGVCDNRRLWIISAAGNRLNGSIPASLATCPALLSLQLQDNELSGEVPAALWTETRLITVLLQNNGHLTGSLPEKLYWNLTRLYIHNNRFSGRLPATATKLQKFNAENNLFSGEIPDGFAAGMPLLQELDLSRNQLSGAIPVSIASLSGLSQMNFSRNQFTGDIPAGLGSMPVLTLLDLSSNKLSGGIPTSLGSLKINQLNLSSNQLTGEIPAALAISAYDQSFLGNPGLCVSAAPAGNFAGLRSCAAKASDGVSPGLRSGLLAAGAALVVLIGALAFFVVRDIKRRKRLARTEPAWKMTPFQPLDFSEASLVRGLADENLIGKGGAGRVYRVAYASRSSGGAGGTVAVKRIWTGGKLDKNLEREFDSEVDILGHVRHTNIVKLLCCLSRAETKLLVYEYMENGSLDKWLHGNKLLAGGATARAPSVRRAPLDWLARVRVAVGAARGLCYMHHECSPPIVHRDIKSSNILLDAELMAKVADFGLARMLVQAGTPDTMTAVAGSFGYMAPECAYTRKVNEKVDVYSFGVVLLELITGREAHDGGEHGSLAEWAWRHLQSGRSIADAVDRCITDSGYGDDAEVVFKLGIICTGAQPATRPTMRDVLQILVRCEQALQNTVDGKVAEYDGDGAPFLPIRGGSRRKQLSDTKGIDDGNGSLDSIV

SEQ ID NO: 111488 - protein, 146 aa, Oryza sativa
  Clone ID: PAT_MRT4530_15462C.1.pep
MAHQAHNPAVRHSVTPFSNLTREEFEARLMGIAAKGDDDLSTTGNHLNLSEQQLVDCDHTGAMPDSRDATNEEQAKGEAKAREGDRGGGGRHAEGLQDSLERPRAPPSASAMLYPAVKPLPPLSLGCPILARLSGYLAAGSDHVLV

SEQ ID NO: 111489 - protein, 102 aa, Oryza sativa
  Clone ID: PAT_MRT4530_15463C.1.pep
FPPFQLFGGGFPPPPRPFFFVGLFFFWGFPFPRWLDLFILKPIGLSPFGLQGPLSFFRNFLAGGKNWGFFPPFPRVGFPPPVGQGFLRSPQPRGFFWANAPF

SEQ ID NO: 111490 - protein, 848 aa, Oryza sativa
  Clone ID: PAT_MRT4530_15464C.1.pep
MADADVSSSKTTTARDYSTAILECAKKKSPNRLMADDAEGGVAVDNSTVTLSEATMEELGIFRGDLVTLRGRRRREAVCYAQKDESCPDGRLRLSRGVRSNLHVRLGDLVTVKPCPTIRNAKRVQLRPFDDSVEGISGDLFEPYLKPYFMDALRPVKKGDRFLVRGHMHAVEFKVMDTEPNNEPVIVAGDTEIFCDEGDPVKREDEERLDGPGYDDVGGVRKQLAQIRELVELPLRHPKLFQTLGVRPPKGILLYGPPGTGKTLLARAIAAESGAHFVVVNGPEIMSGMPGESEANLRAVFAEADAAAPSIVFMDEIDSIAPSREKAHGEVERRVVSQLLTLMDGLRPRAQVIVIGATNRPNSLDPALRRFGRFDRELDIGVPDELGRLEILRIHTKNMPLSDDVDLERVGKDTHGFVGSDLASLCSEAAMQCIREKLDIIDIENDTIDVEILNSLTVTMDHLKFAMEVTKPSALRETGIVEVPKVSWDDIGGLGEVKRELQETVQYPVEHPEMFDLFGMSPSRGVLFYGPPGCGKTMMAKAIAKECKANFISIKGPELLTMWFGESEGNVRNLFDKARQSAPCILFFDELDSIAVKRGNSVGDAGGTPDRVLNQLLTEMDGINAKKTVFVIGATNRPDIIDPAMLRPGRLDQLIYIPLPDASSRLEIFRANLRKAPMSRHVDLPAMAASTDGFSGADIKEICQRACKLAVREVVQKSTLVGKALAMAGAELTVDHFKSAMKHARKSVSELDVIKYEYFKHKFSGGIPDEEEAPATEPELPVGQLRLVAKPKTKTKAELEAEAEAAAKAKAEAEAKAKAKLKGKAVAVDDDDDDSTYSMDSMDEDLLY

SEQ ID NO: 111491 - protein, 236 aa, Oryza sativa
  Clone ID: PAT_MRT4530_15465C.1.pep
MGWPGAHAVRLSLSRFLRGAHDRGESGTAADVGGPLALLAGTVSASCPFGLSTSNICSFGLDQCARRILAPFPLRVPGSHQQGSTAPATQHRPLPVVGGDGTRAGERNSGCDEEGTRAGGCDSGKGGLRLPTKRVHLYRRPRSLAPSVASHHSFTSPPREPTAVIVGAVVAALVFSCYVPPPLAIHPSRCLPPPSASPPLLSIVAAEGWNIEGIVVGNMVKRLHIGLTVIDSEWRA

SEQ ID NO: 111492 - protein, 495 aa, Oryza sativa
  unsure (1)..(495): unsure at all Xaa locations
  Clone ID: PAT_MRT4530_15466C.1.pep
MPGAAAAAVVDSRPCTQHAEGPAAVLAIGTANPANIVYQDGFADYYFGLTESEHLTELKDKMKRICHRSGIEKRYIHLDEKLIREHPEIIDKHMPSLETRVDIVTTEIPKLAESAARKAIAEWGRPAIDITHLIFSTYSGCSAPSADLKLASLLGLNPSVSRTILSLHGCSGGGRALQLAKELAENNRDARVLIACAELTLICFSXPDESKIVGHGLFGDGAGAIIVGADPLVDGERPLFEMVLASQTTIPGXPTLIKDNIRQCLLNTFRSVGNMDPNWNDLFWAVHPGGRAILDNIEGELQLQPAKLAASRHVLSEYGNMSGTTIAFVLDELRCRREKEGDEHQQPEWGVMLAFGPGITIEAMLHLSEKWKQGFPFPLGAHGAVGPTKHYKIYTFKGPRTLRSINEEVHPIKDSCSEGTTVLRELIQNSDDAGVFHVRLCLDRRMHGAGYAAAGRPPQWQGPRAATPPRPPPPPAPVPGAAHRHRHRLPARCRC

SEQ ID NO: 111493 - protein, 69 aa, Oryza sativa
  Clone ID: PAT_MRT4530_15467C.1.pep
LRVGPGPSGEGQSAWKNKEYQPKVLTLDVEAALPSSKRLHRALEAMSANVAETNNLPEVTGSKQLIPNG

SEQ ID NO: 111494 - protein, 312 aa, Oryza sativa
  Clone ID: PAT_MRT4530_15468C.1.pep
MPGTATAAVVDSRLCTQHAEGPAAVLAIGTANPANIVYQDGFADYYFGLTKSEYLTELKDKMKRIYIVTTEIPKLAESAARKAIAKWGRPATDITHLIFSTYSGCNAPSADLKLASLLGLNPSVSCTILSLHGCSGGGRALQLAKELAENNREARVPVACAELTLICFSNPDERKIVGHGLFGDGAGAIIVGTGPLVNAERPLFEMIVASQTTIPGYEQALGMQTTVHPGGRAILDNIEGELQLQPAKLAASRHVLSEYGNMSGTTIAFVLDDLRRRREKEGDEHQQPEWGVMLAFGPGITIEAMVLRNPLS

SEQ ID NO: 111495 - protein, 392 aa, Oryza sativa
  Clone ID: PAT_MRT4530_15469C.1.pep
MPGAATAAVVDSRQCKQHAEGPAAVLAIGTANPTNIVYQDGFADYYFGLTKSEHLTELKDKMKRICHRSGIEKRYIHLDEKLIREHPEIIDKHMPSLENRVDIVTTEIPKLAESAARKAIAEWGRPATDITHLIFSTYSGCSAPSADLKLASLLGLNPSVSRTILSLHGCSGGGRALQLAKELAENNRDARVLIACAELTLICFSNPDESKIVGHGLFGDGAGAIIVGADPLVDGERPLFEMVLASQTTIPGTEHALGMQTTCSGIDFHLSIQVPMLIKDNIRQCLLDTFRSVGNMNPNWNDLFWAVHPGGRAILDNIEGELQLQPTKLAASRHVLSEYGNMSGTTIAFVLDDLRRRQEKEGDEHEQPEWGVMLAFGPGITIEAMVLRNPLS

SEQ ID NO: 111496 - protein, 106 aa, Oryza sativa
  Clone ID: PAT_MRT4530_1546C.1.pep
PRDPSSFLPNLSPPLFFCTPPILPSHARYSLRAFDRRLNLCWECANDNKKRLLPADHHHRNLHRAIRWYTESLWNDHYWGAMIGLATDIRLLLSMLDLRTLTLHLK

SEQ ID NO: 111497 - protein, 426 aa, Oryza sativa
  Clone ID: PAT_MRT4530_15470C.1.pep
MVALEMCAGVGVRGHELKHGRQRHEEVGSEVAGDGVASLGEMDLYGDVLESVVERVPAADLAASARVSREWLRAVRAALRRRPRRLPWLVVHLHGRRRRTAAYDPHSGAWVTVPAARHDTPSHVRLVRGAGGDRVCALSLSGLAVSGDPLGKDVCVALKAPGVWRVDPVFAAVGDRVVALGGACQLALGEGEDASVVEVHESGSWTACGPMPAELRESAAATWLSVAATDQRVYLTDRSTGWASWFDPAKQQWGPTCRLRPDATVSTWGLAPGRGGAERLVLFGAKRCGRAEQAKSRVVIQAWEVDGDGLALSRGAAHDTMPGEMSERLFPRDEDGDEEDEEEMSPSIGVCGNAAGGYVYNAADPTIGAVLYELRDGVGSAVERWEWVPCAPSVEAEPLGRFILACSPVGLDELARGQPAACTTAQ

SEQ ID NO: 111498 - protein, 101 aa, Oryza sativa
  unsure (1)..(101): unsure at all Xaa locations
  Clone ID: PAT_MRT4530_15471C.1.pep
FFFFFFLGQEKKNVTASHSYILIFKCDLVTMLQDGKHQIHLQKQLNILYPDMRCVPIGCXTRCLTYAYIQFPVTQSKLFTSFYQAELFLGGFLKIFLCALA

SEQ ID NO: 111499 - protein, 411 aa, Oryza sativa
  Clone ID: PAT_MRT4530_15472C.1.pep
MAIRITVSYSGYVAQSLAASLGLRCSSASTAAGCRFFQDGGWRPFCMLTSSSRGHAEHHRNGGGGGEHRREAGEGDRPKALPLSAAAGGHSLFLSPAYASSRAQPPSLAVGLLSVLAQGATGSKGGIYGAASLSGSSSSISLGFNPASFLPFLQTSKWLPCSDLATSSSAPPSSPSPSPPPPAPAPSIRPKKALVSSASSSPAIARSSGGSGAAMSRSNWLSRWMSSCSDDTKTAFAAVTVPLLYSSSLAEPRSIPSKSMYPTFDVGDRILAEKVSYIFREPEILDIVIFRAPPALQDWGYSSGDVFIKRVVAKAGDYVEVRDGKLIVNGVVQDEEFVLEPHNYEMEPMLVPEGYVFVLGDNRNNSFDSHNWGPLPVRNIIGRSVFRYWPPSRITDTIYEPRAEYSVAGLS

SEQ ID NO: 111500 - protein, 221 aa, Oryza sativa
  unsure (1)..(221): unsure at all Xaa locations
  Clone ID: PAT_MRT4530_15473C.1.pep
MAPTPVGRTGMGPTPVRLCRAWVGPKRRAVGQAVGSRPLWPSIVMDHDQINWHAHTFEGELWTCTGVKQISQASCFLSTAMCRVGQPRHARAFTPLLWCRSLTTAALCFGRRRQSFAISPQSTSSGSLDVEGMALADYFFGPELDDLMQWLGDGDVGRKGTLPTKKEARETMPTVEVTAGHSASAFATASTVCREDYAVGEHATGTPYRHRFHXKCIVPWL

SEQ ID NO: 111501 - protein, 118 aa, Oryza sativa
  Clone ID: PAT_MRT4530_15474C.1.pep
RGAPPQKGGGVWLRGTLFFFFLWGGPPGDLSLLRRNFAVLGNYAGDCFSPPKKKRVLGWTVSKGNCQLVLVFFQTEKIRTKENKKLQQNKVKTLKKKKQEKKKKKKKKKKKKKKKPAA

SEQ ID NO: 111502 - protein, 114 aa, Oryza sativa
  Clone ID: PAT_MRT4530_15475C.1.pep
MTIVEVGEVGLVIDVISVGAKAKEQHNAVAILFYLSSNNSDASWRRSRRWSSSSGTAHTHSQKNAMVILYGLLQSAANQSTAIAAGAVLALTTLLSNDRVDLAQDSIVLLARKA

SEQ ID NO: 111503 - protein, 60 aa, Oryza sativa
  unsure (1)..(60): unsure at all Xaa locations
  Clone ID: PAT_MRT4530_15476C.1.pep
MKGAKYKGAAKPDVKXLAVKSKGSENPAVNGRKGKAFKDPXNKPKEGFLRFFSFLLEEFP

SEQ ID NO: 111504 - protein, 96 aa, Oryza sativa
  Clone ID: PAT_MRT4530_15477C.1.pep
HRSNENDSSFRKGLRSKYFHSLISPQEQHRRIFFDRFTSGTHCSCPSYAKSLAGDTINPSHELQEISPLPCTLAQRTSSHSSMAGVLSSHPPMAPH

SEQ ID NO: 111505 - protein, 206 aa, Oryza sativa
  unsure (1)..(206): unsure at all Xaa locations
  Clone ID: PAT_MRT4530_15478C.1.pep
PPQPNFLGPRAPKPQNGTPKGTPPLKPFREKPPNGPKKKGKKPKKPGPRAPPKERAPLGETPPPPGLKGPHKGGAPFPSRGANFWKRPPGRPPPQKPPPPKREFPPNQXKLGNPRVFPPPPWKNPAPEIKFRGPKKKTNPPQPPEGKLGPPKRPPPFFFFFFFFFKFFFFFFFFFFFFFFFFFFFFFFFFFFGFFFFKRGRTLGRP

SEQ ID NO: 111506 - protein, 64 aa, Oryza sativa
  Clone ID: PAT_MRT4530_15479C.1.pep
SQQLLCSCSWRVSCTQSPCSLHVAYVYARVCSFLLLPCVMDRCADNLFCFKEYEKKLKKKTPLT

SEQ ID NO: 111507 - protein, 104 aa, Oryza sativa
  unsure (1)..(104): unsure at all Xaa locations
  Clone ID: PAT_MRT4530_1547C.1.pep
PHPPSFQSPLFSSKNXPIFHQQFFPPLNIFSQHSPFQPINNFQPFFHQLPLPQFSNFYFDQSQAQPPTFLALNIPSIFGFSPSFNPAPCSIPPVGGIWFLIVPV

SEQ ID NO: 111508 - protein, 263 aa, Oryza sativa
  Clone ID: PAT_MRT4530_15480C.1.pep
MWDPPVRGSWLWSLGPLVPLLLVPPPPRAGRAPRGCSRRSAARRRGERLRRVMACERFSSTSLKNLTFISHSPDNGDSVHDDYKDLVIDTPSLVSLHLECLPFLAPCLVNVSSVAKAYIRLDDMSFPCFDTKYNILSGLSNVTKLKLLNEEYDDEDEDEDDSFRSRQNEVLKRDLRRCQSFNNLKKLSVDDCSCHQIEGLAWEQWMSYPQEETPDLSFSCERLKKVKIICVQDDKRVPAIVNAILANANSLPEIVIKPYKRFD

SEQ ID NO: 111509 - protein, 135 aa, Oryza sativa
  Clone ID: PAT_MRT4530_15481C.1.pep
MDEDEDEDDSFRSRQNEVLKRDLRRCQSFNNLKKLSVDDWYVDVDLSALIYLLRCSPIIEKLTLHLGMIEGLAWEQWMSYPQEETPDLSFSCERLKKVKIICVQDDKRVPAIVNAILANANSLPEIVIKPYKRFD

SEQ ID NO: 111510 - protein, 45 aa, Oryza sativa
  Clone ID: PAT_MRT4530_15482C.1.pep
RRHRCFTPSPKVLEDDEWDKWCNVFSSYILSVMFIRVHGCLRLGI

SEQ ID NO: 111511 - protein, 538 aa, Oryza sativa
  Clone ID: PAT_MRT4530_15483C.1.pep
MDLMKSNPLQGSPWSLLNLLVLIIVAAMICGELCRRRRRRRGDENGGATRLPPGPWRLPFVGSLHHLAVMRPRGVVVHRALAELARRHDAPVMYLRLGELPVVVASSPEAAREVLKTHDAAFATRAMSVTVRESIGDKVGILFSPYGKKWRQLRGICTLELLSVKRVRSFRPIREEQVARLVDAIAAAAASSTAEAAAVNISRQITGPMTDLALRAIMGECFRWREEFLETLAEALKKTTGLGVADMFPSSRLLRAVGSTVRDVKLLNAKLFELVECAIEQHREQIRAAHDNGGDDDDAHGHGDKECFLNTLMRIQKEGDDLDDTHHGNRQSCHSCGSESTSTTLEWALSELVRNPHVMQKAQAEIRHALQGRTRVTEDDLINLKYPKNIIKETLRLHPVAPLLVPKECQESCKILGYDVPKGTIMFVNAWAIGRDPRYWNDAEVFMPERFEKVAVDFRGTNFEFKPFGAGRRMCPGITFANATIEMALTALLYHFDWHLPPGVTPDGLDMEEEFGMSVSRKRDLYLRPTLHMGLETI

SEQ ID NO: 111512 - protein, 351 aa, Oryza sativa
  Clone ID: PAT_MRT4530_15484C.1.pep
MEKPTKKGVAPPMAWRTRLSILAAGCLTDATCRADGTINRRLLNFLDPHVPPSAAPRNGVASRDVVVDPAIPLRARLFYPCPSGGDGGTGDATKPLPVVVFFHGGGFAYLSAASRAYDAACRRIARYAGAAVLSVDYRRSPEHRYPTPYDDGLAALRFLDDPNNHPLAADDGDVPPLDVTRCFVAGDSAGANIAHHVARRYALASTTFANLRLAGLIAIQPFFGGEERTPAELRLVGAPIVSVPRTDWLWRAFLPPGADRTQEAAQAASPAGAAGIDSPAFPPATVVIGGYDPLQDWQRRYCETLRGKGKAVRVLDYPDAIHAFYIFPEFAEARDLMLRIKDIVAGGGGEH

SEQ ID NO: 111513 - protein, 69 aa, Oryza sativa
  Clone ID: PAT_MRT4530_15485C.1.pep
SPQVHPQVTTQPFPPQVAQAPMYFAGQESAAVAARVHHQPPGQAPQTVAEGALARWVPPARSSPSSRPA

SEQ ID NO: 111514 - protein, 75 aa, Oryza sativa
  Clone ID: PAT_MRT4530_15486C.1.pep
MGVATPTCSRIHGFTGTNNDLGDALDALKCWFYVFAGRVFVSSGGCAQSAILIANPTPPCRRSRTGSIAKEHGEA

SEQ ID NO: 111515 - protein, 647 aa, Oryza sativa
  Clone ID: PAT_MRT4530_15487C.1.pep
MDFTAPSFSLGSEFDEPEEAVGYTAPDAPSFSLGIDFEGDGDESHLTDAGNGGEEQKRYEAPDAPSFSVGIDSGSDGGEERRREEQRRSYEAPDAPSFSLGIDSDGDGGDEPHLTNGGHREEQQRRYEAPDAPSFSLGIDFGDGDDEPRLPNASRQAPRYEAPDAPSFSLGFDDDEDDVLIGGSRHELGTVEEEDDDFVLADGQQQQQRRHETVVPDPAPPPPEMNRFKRLRRGPAPPSQAPTPPPHRTPAPATMEASPVVSSKAVLGDIGSFEDEIEDFTDEERFMRDVPPSVGSCITSSSSRFSHASNSKFSLMNHGVLMSQSTSKSKKFAQTPNYSASKSMEESSTKKLLPKTALSPMRKIHLLDSDSDSDDNKEMPGLQQNCKSKVSTVQHKGKAEMNDSWATPALDEFCNEYFKSVEDSRPSQQKEGNSFCGPKVIRSNYSVSETGGHFPHQSTPSGAVLEDNQTDSHPPAMHYFFHHDQLVRDLVRQRLKHFVPVGVDSRGNEQDGTQNLQYRSQTGRCAAENDRWVTPNKRMPVATQVGRRRVNPAGMSGSGHWLTGDDGKKVYISKDGQELTGRVAYRQYQRESGKGFRQSKKKSSAGTRAKKATTKALLLFYTSCSWFSHSTNAGTQGLGALKLFTAG

SEQ ID NO: 111516 - protein, 68 aa, Oryza sativa
  Clone ID: PAT_MRT4530_15488C.1.pep
FAEAKKNFKKINHVYPYMYGSDDDDDDSEVATAEWVRSKKAAIEGGKIKFDDSKKPMKVNGNPFPVNM

SEQ ID NO: 111517 - protein, 70 aa, Oryza sativa
  Clone ID: PAT_MRT4530_15489C.1.pep
MRFGRFRRLWIGVQGKASEDPGPGYGAKDPTTEAARTWLPQVTGMGSVPCPSCGNRHARGRELPRGHWDG

SEQ ID NO: 111518 - protein, 123 aa, Oryza sativa
  unsure (1)..(123): unsure at all Xaa locations
  Clone ID: PAT_MRT4530_1548C.1.pep
NFXVTPLEAKLDSSLLLRFEXKVITXQWXTSLLDFXMHSXKGYHWAKASKRDVDASSHLLPLPNASGVGLNPPATGFRNFACRLLHWFFPPPLFFKAFNWVRTRVLGGRFPVRSSKGTARIKI

SEQ ID NO: 111519 - protein, 60 aa, Oryza sativa
  unsure (1)..(60): unsure at all Xaa locations
  Clone ID: PAT_MRT4530_15490C.1.pep
LXRLILVRVHYFTQQKPHFLHSRRRGHNTNSIITLGGINPFFPTQRHRTCWAEFHPAPIY

SEQ ID NO: 111520 - protein, 325 aa, Oryza sativa
  Clone ID: PAT_MRT4530_15491C.1.pep
MALYLAEASRYFACTDLFREPSKYAWSDYYEDHFIVQNQKVALVTNKRVILLQCVDLDKMDKKPSKILWDVPWEDVLALELAKAGYQRPSHVPGGQHDVYFAFDEDMREFHSFARPLLSPRGAASNVEERLINDTVNFQNMWSSEQEIRSRCKLLSKQVADDGRVFSIWRPLCPSGYVSIGDIAHVGIHPPHVAAVYKNVGGNFALPLGYDLVWRNCGEDYRNPVSIWFPRPPEGYVALGCVAVSAFEEPPLDSAFCVSERFAEDAVYEEQIVWASSDAYPWGCYVYQVQSKSLQFMAMRRPKEECELKPKKVSESYAQQALERS

SEQ ID NO: 111521 - protein, 250 aa, Oryza sativa
  Clone ID: PAT_MRT4530_15492C.1.pep
MEWDKAKASSGEAVDDRGGGEGGLGYVKVMTDEQMEVLRKQISIYATICEQLVEMHRALTAQQDSIAGMRLGNLYCDPLMVPGGHKITARQRWTPTPMQLQILENIFDQGNGTPSKQKIKDITAELSQHGQISETNVYNWFQNRRARSKRKQAALPNNNAESEAEADEESPTDKKPKSDRPLHQNIAMRDHNSERISEMHHFDTEHEQIRRMMYASNDSSSRSSGSLGQMSFYDNVMSNPSTSYKHPCFI

SEQ ID NO: 111522 - protein, 79 aa, Oryza sativa
  Clone ID: PAT_MRT4530_15493C.1.pep
LMIVSGRPTIGGFWTIVFSGLMLIPFAEGGYAGGAHKPNKGNTTWEKHAERSWARTRSRRRPLGPPVELAGALAQGRFG

SEQ ID NO: 111523 - protein, 107 aa, Oryza sativa
  Clone ID: PAT_MRT4530_15494C.1.pep
SSGRWPRTSPSGGSRRAGYGARRAWSVSSPSASSRSSGTRSTAAPWPWRASRYARTCPPRAPTPASPTAACGCSSCSTPSRAGRCSTPRRRASSAPATPALSRSAPS

SEQ ID NO: 111524 - protein, 74 aa, Oryza sativa
  Clone ID: PAT_MRT4530_15495C.1.pep
SSRLRTAYPTAGFQQALRHRVSIGTAGQHHCRRVWQPCLASTQCVPPHHFSLHIFGVPRHPFSGIGPGQSQVWG

SEQ ID NO: 111525 - protein, 319 aa, Oryza sativa
  Clone ID: PAT_MRT4530_15496C.1.pep
MEKRMETLEQIKETLRETSKLVPDIVRAAVGLEHHYQTVELPHDDGCVKSFAAAFLRPQAQEQAHGDGEVQQAVRMESASCYVPDHDEDAHFVHDAAGVVGGYRRRVGVDAGAFSRGLMTSAFAQLVTAEPGTPVCPYTLLERAYEETLESGAQGGSTAVILSLADGNVLRWAYIGDSAFAVLRDGRVVVRSVQQQRYFNAPYYLGGRRGDEGMTVGMVGEMKVRRGDVVVAGTDGLFDNMSDAELEKVVQIGTALGFSPKNMADIIGGTAYEMSRCLLKDSPFAVEWRKQHENEEGHFYGGKVDDITVVVACIVSSDS

SEQ ID NO: 111526 - protein, 414 aa, Oryza sativa
  Clone ID: PAT_MRT4530_15497C.1.pep
MAELAIGISRTALEELVNKLKSVIKEEEEQWQTMHRDVVFIRDEFEMMQSFLNSADGEVVKSSMARTWVRQVRNLSYDLEDCIEFILHLDTNKRSWWLRLLQSWSCGKGGVSLPVDEAVTEMKKLKARVEDVSQRNTRYRFTNDLTQHQQQLVSSGSATGGGAPGFDILAEARDTAARRKGVVDLIKLITEKSNDLRVISLWGTGDDLGTMSIVRNMYDDSRIHDNFRCRAWVKVAHPINPHELVRSLVVQFYANSCQQQLPAATDALSWFSLKYKKQRDALSSSETSTGELVKEFLRHVDTHRYLIILEDLSTMVQWDAIWPYLRGGKNGSRVLVSTRHHEIASLCTGKPHRVLELQRISIHQSICIFFKEEAAVGRQIRPGGGGQEALAGRLRQHQAAVAEWQWPVGFVIFV

SEQ ID NO: 111527 - protein, 93 aa, Oryza sativa
  Clone ID: PAT_MRT4530_15498C.1.pep
LYRSITEHTYIVTSVLAYLGWALHHASSIPPYMYRLILILVLTNIYDYDTFDHLPQLFWHTISLYLHWQQHIKTRSIQLVGRMNLALLLPSEH

SEQ ID NO: 111528 - protein, 236 aa, Oryza sativa
  unsure (1)..(236): unsure at all Xaa locations
  Clone ID: PAT_MRT4530_15499C.1.pep
MATQISKKKKFVSDGVFYAELNEMLTRELAEDGYSGVEVRVTPMRTEIIIRATRTQNVLGEKGRRIRELTSVVQKRFNFPENGVELYAEKVVKPRXLCAIAQAESLRYKLPWDASPSGRAWLWGFLRLVSGRTGPQGACAGHLVXGKLRSQRAXKFMKVXDGSMISAGHPVNEYIDSAVRHVLXWRQGVLGIKVKIMLDWDPKGKVGPTTPLPDLVTIHAPKEEEELRPPVLIAEA

SEQ ID NO: 111529 - protein, 114 aa, Oryza sativa
  unsure (1)..(114): unsure at all Xaa locations
  Clone ID: PAT_MRT4530_1549C.1.pep
MVGDTMVIYFPLLAVKADLKVFGEVRITMRKSANNTMPAELEEPVXGADRVLYLXPLYGEPASYLTGXYHGDYGWDTIGLFIHPXTFAMNRELEVIHSTRTTTRTLSCHVPELL

SEQ ID NO: 111530 - protein, 48 aa, Oryza sativa
  Clone ID: PAT_MRT4530_154C.1.pep
MSLEFDRKSRKPSISITVTQTDPSIRIGIGIGIGIEIEIEIERDCSST

SEQ ID NO: 111531 - protein, 247 aa, Oryza sativa
  Clone ID: PAT_MRT4530_15500C.1.pep
LEQLHRNQLRHRCVGAVKSHTTPFCYAPRNTRITPLATASFGDTADSSSAIFPRIHVKDPYQRLGISRDASGEEIRAARNFLINKYAGHKPSVDAVESAHDRIIMQSFSDRKKPKVDLKKKYRELTQSRPVKAIQGRFQTPSSKVIWQTAITFVLLGVLTLVFPTEEGPTLQVAISCAANIYFIYQRLKSGWRTFFYGFGSFFASWFLATFLMVSVIPPILPGPRNLEVSTACVTYALLFVSSAFLK

SEQ ID NO: 111532 - protein, 248 aa, Oryza sativa
  Clone ID: PAT_MRT4530_15501C.1.pep
MLAHSLAINPSRAAQCPVTSRASSAPLGLVSSLAFSRGRKESVKLFINVDRYTKYSTPFCYAPRNTRITPLATASFGDTADSSTPIFPRIHVKDPYQRLGISREASEEEIRAARNFLINKYAGHKPSVDAVESAHDRIIMQSFSDRKKPKVDLKKKYRELTQSRPVKAIQGRFQTPSSKVIWQTAITFVLLGVLTLVFPTEEGPTLQVAISCAANIYFIYQRLKSGWRTFFYGYVFFLLRSFFVCFSH

SEQ ID NO: 111533 - protein, 143 aa, Oryza sativa
  Clone ID: PAT_MRT4530_15502C.1.pep
MSSLAGISSRGRENDDGSTSDSDVVALVLSVVTGGRLLRLSLSRRRGSPQQQQQQKRRLKKDATASQSELQHSSMLQSQSQQQQQQSQSPQSQQSQSQSPQSMLMSSDMSAMGGGGRRREQLDRSSDGWMQIDEQVKSKSIDI

SEQ ID NO: 111534 - protein, 133 aa, Oryza sativa
  Clone ID: PAT_MRT4530_15503C.1.pep
GATASWIAARSPRAAAQRAACSMAVVEEASEQLDGRARKRNATATSKLLANSDNSPAKRDSNTLPSSSPLPPPLYRTAMAVMTTTARTHIAPPLSQLRVHATAGHHQSHAQPREREGLFSRETVTTLELEIRC

SEQ ID NO: 111535 - protein, 46 aa, Oryza sativa
  Clone ID: PAT_MRT4530_15504C.1.pep
MEPNQSFSNLIPDDSGLVWRGIGWYRLGINWYLRWVLDDAHVAHRY

SEQ ID NO: 111536 - protein, 71 aa, Oryza sativa
  unsure (1)..(71): unsure at all Xaa locations
  Clone ID: PAT_MRT4530_15505C.1.pep
GPSPAIQKACXAGPRPKRPSPTSTPGGLALALSVPRSAPLWLALRSQPASHPAGLLVWALWAGAECPTVSA

SEQ ID NO: 111537 - protein, 142 aa, Oryza sativa
  Clone ID: PAT_MRT4530_15506C.1.pep
MAASYAAATCCCRCQLHLHRGGEQLVVVVVHHRAAAAADRLPHGTPIKTITDYEINPHCAHFVLLSDPFLQYGVTPGSLRPQECGGRCAYRCSATAYRKPCMFFCQKCCASCLCVLPGTYGNKQSCPCYNDWKTKRGGPKCP

SEQ ID NO: 111538 - protein, 56 aa, Oryza sativa
  Clone ID: PAT_MRT4530_15507C.1.pep
MEALVGKYFPHLAKVLAQEATIAAKGKLNHYHVQIWVKRRTPYDYYYNDPDNLENP

SEQ ID NO: 111539 - protein, 855 aa, Oryza sativa
  Clone ID: PAT_MRT4530_15508C.1.pep
MRVLMVDGDAWRRAPAPATSPAAEEAEFLWELRKYVLLLATLAATVTYTAGLDPPGGFWTDNVGELLAGDPVLQKTYPGRYKAFFYCNATAFVASLVIVNLLLVRFLCRRRWWLRALQAAMILDMFGLMGAYAAGSSREAAMSAYILVLVILVCSYVSAHVLLYGLTTAQVSAPDAPERVERARKYLLIFATLAATVAYQAGLSTPGGFWLGSLENQHLAGDPMLRGNHPSSALWVCVGAAMVGLMGAFAAGSCRSFKTSIYVIALVGAVLLYIAIQFMVFISEPVKDWLHRAGETLQKCLKLDELEQRNQQQITLSNQGNGDAYLLLKKSRMYLLLLGILAASVTYQAGLNPPGGFWQSDGTDGYRHYLAGDPVLHITYHRRYMVFFYSNATAFIASLVILILLLSNMISTQGIKYCALQVAMILNLFGLIGAYAAGSCRQASKSVYVSVLVLPVFLYVGIHVLVFMLEVSPTWATWRVEVREKLKQCMPEWLKNLLELEKHVEEEEEEWKLEKRRKLLLLVAILAASLTYEAGMNPPGGFWQEKKSGHVGDPVLNNDNYRHRYLAFFFCNTTAFVASLAIIMLLVNRKLSARGIRSYALRVCVILVLVGLMGAFAAGSCRKVKTSIYVFVLVLAVLLCIAFQVALVVSGSLRRLVNSLLSKLGAPLEEDAGERLPHTAADGGDGEPRDLWDEKLPKYLLLLAALAAAVTYQAAMSPPGGLWDDGQTEHIVGDPVLLTNYARRYKVFFYCNATSFMASLVIMVLLLIKRVSNTQPALLALHAAMILDLFGLMGVYAAGSCRRVTTSAYILALLVGVSAYIVVLVVVSVGVARWMKKVMDKVGEKLTHCFSFEDL

SEQ ID NO: 111540 - protein, 101 aa, Oryza sativa
  unsure (1)..(101): unsure at all Xaa locations
  Clone ID: PAT_MRT4530_15509C.1.pep
ALVRTCVRRQQHIIAAHTFWXLDTFQSINKKVMHERGGRQLTLDAQQYDXHAISIDPARVPELQLQPVIDVYSDETEAAXLSSDEMXLTAIWGIYPNYYID

SEQ ID NO: 111541 - protein, 187 aa, Oryza sativa
  unsure (1)..(187): unsure at all Xaa locations
  Clone ID: PAT_MRT4530_1550C.1.pep
TSNWIDRSIDREEQTMPCLAQEYHPKLPATNHYCKSLSSLIRETYAHCHVPCARIPAAGWSSGDDSDDDDSLLDEVLDTKQVIMNEMRNRQMKKRARCSLDSPMSSPFVWSFTPLDPRSVLEKFPSPKESVTEEEKTTGKEEEVGGGRRPTESEGGSSSVKSFFLRADRAVGATGGCRRRSAAXGPA

SEQ ID NO: 111542 - protein, 208 aa, Oryza sativa
  unsure (1)..(208): unsure at all Xaa locations
  Clone ID: PAT_MRT4530_15510C.1.pep
SWRRPWGTQTERAKWXTPFATPTPFATVPARYSDKGXGESELSPSWGATKPPKPLDTFRHTXHALRHSTNEVRFATXTPFAIVPIRYGIKGWGRKXVASKLGGYEATLASGAFRHTHALRHXYPQGTATRAGDGNELLPSXRGYEATLASGAFRHTHTLHHNTNKFITGNNKRFDSEKSKEMCERLKLEIEFASVTHPQTNGAAERDE

SEQ ID NO: 111543 - protein, 886 aa, Oryza sativa
  Clone ID: PAT_MRT4530_15511C.1.pep
MAADAYADAAPPRRAPAPATSTVAKEAEFLWELRKYVLLLATLAATVTYTAGLDPPGGFWTDNVGELLAGDPVLQKTYPRRYKAFFYCNATAFVASLVIVNLLLVRFLCRRRWWLRALQAAMTLDMFGLMGAYAAGSSREAAMSAYILVLVILVCSYVSAHVLLYGLTAQVSAPDAPERVERARKYLLIFATLAATVAYQAGLSTPGGFWLGSLDNQHLAGDPMLRGNHPYRFMVFFYFNTTAFVASLVTIMLLMSRTVSRHGFRSSALWVCVGAAMVGLMGAFAAGSCRSFKTSIYVIALVGAVLLYIAIQAMVFFSEPVKDWLHRAGETLQKCLKLDELEQRNQQQITLSNQGNGDAYLLLKKSRMYLLLLGILAASVTYQAGLNPPGGFWQSDGTDGYRHYLAGDPVLHITYHRRYMVFFYSNATAFIASLVILILLLSNMISTQGIKYCALQVAMILNLFGLIGAYAAGSCRQASKSVYVSVLVLPVFLYVGIHVLVFMLEVSPTWATWRGRVREKLKQRMPEWLKNLLELEKHVEEEEEEWKLEKRRKLLLLVAILAASLTYEAGMNPPGGFWQEGKSGHVGDPVLNNDNYRHRYLAFFFCNTTAFVASLAIIMLLGNRKLSARGIRSYALRVCVILVLVGLMGAFAAASCRKVKTSVYVFVLVLAVLLCIAFQVALVVSGSLRRLVNSLLSKLGAPLEEDAGERLPHTAADEPRDLWDEKLPKYLLLLAALAAAVTYQAAMSPPGGLWDDGQTEHIVGDPVLLTNYARRYKAFFYCNATSFMASLVIMVLLLIKRVSNTQPALLALHAAMILDLFGLMGAYAAESCRRVTTSAYILALLVGVSAYIVVLVVVSIGVARWMKKVMDKVGEKLTHCFSFEDL

SEQ ID NO: 111544 - protein, 89 aa, Oryza sativa
  unsure (1)..(89): unsure at all Xaa locations
  Clone ID: PAT_MRT4530_15512C.1.pep
YLSCEIPRGHSGPPSLPLTGFGAMAKPVPVCRGFRHIIFARSAFCRELHLTKVVLPTITAFAHMASLLSFGVSLILELXVSAGSAEGLP

SEQ ID NO: 111545 - protein, 130 aa, Oryza sativa
  unsure (1)..(130): unsure at all Xaa locations
  Clone ID: PAT_MRT4530_15513C.1.pep
DTKLGGPYPKKGGPALANIALQCICNDAKMRPRMFXVLEKLEQLQDSQYNMGSPPVGIRGTSNPVPXLPMRIQPLPRGSLGAAASPLPGYRAAQVPLKCHIEEVFFLPGCIVCFVNRGFLSLFFRGTFCF

SEQ ID NO: 111546 - protein, 177 aa, Oryza sativa
  unsure (1)..(177): unsure at all Xaa locations
  Clone ID: PAT_MRT4530_15514C.1.pep
VAAKSRSRNAAATPYFTNRPMKKTYSKNGPFWXAKVACTVVQXDGTNNSGAILLPPWRVGADEHIRTNHRKVKLKWMXYVTCRIFQSSTEKLLASKTXSCKRNLEVLISPNPMKRGTIRCNFLCTCPWVXNLPNSESNSDLGGGGAREAGALPLPCKFLTSTVIEGWRQQLWRQKRT

SEQ ID NO: 111547 - protein, 148 aa, Oryza sativa
  Clone ID: PAT_MRT4530_15515C.1.pep
EGAVRGGRGTSSCSSSLRRRSCSRSPDCRAASDGTWSKPPAHLRHCLAALPPATVSSTSPPQRCHLANGALASAPSTGRPSTMPPMGTEPVSTSAGPAPSPGCKGTSSMWRRPPPPTTSAACGLPPLPLRPSAPAAAPPRGRGRAERD

SEQ ID NO: 111548 - protein, 63 aa, Oryza sativa
  Clone ID: PAT_MRT4530_15516C.1.pep
SAHLVPSLGPARPSSFLSSRNQSLVVVSRVLRFGALFSRDPDRSELIFDLVGNLKMHSCPIIL

SEQ ID NO: 111549 - protein, 45 aa, Oryza sativa
  Clone ID: PAT_MRT4530_15517C.1.pep
ENSYNFFFIYKEPDSINELENIILIHDDKYIYVAVSLLRNMCLHA

SEQ ID NO: 111550 - protein, 152 aa, Oryza sativa
  Clone ID: PAT_MRT4530_15518C.1.pep
MPRFVHHLLSSNSGGLPFFSGAGDTPTPAGRRPWAAEDRRWAVDFGGRRRRRRSRGDGGGRWASVGGGGKARVRLGGGGRWLRIRRRRAAGDGEDGGAGAPHRRRHEEKERGEGERGRGLAGAVDSFRPVGEAGGGAVGQWWWRWNRATARG

SEQ ID NO: 111551 - protein, 123 aa, Oryza sativa
  Clone ID: PAT_MRT4530_15519C.1.pep
GAPLLSPHSPHWQKGRTARGGRRRTVQGGRRGAAAPLPPFLPSRSGRRGEGGGRRPAAGRGAVPACAPGDGGGRAPPSLGRGRQRRGGSRRRGSRALPPRSGQRGRGESGGRRLPAPPSQISL

SEQ ID NO: 111552 - protein, 418 aa, Oryza sativa
  Clone ID: PAT_MRT4530_1551C.1.pep
EQPINDFLRDYMLMTVRDSNPWVCTDGLLRRCVPTEEGLKIIKRCHASPYGGHYGAFGTQDLMEPFPKSRNCEYILVAVDYLSKWVEAMPCNTVDAKHAKKMFTEIIFPRFGTPRMVISDRGSHFIDKTFRDLLRDMGAKHNVAIPYHPQTKGEWRKMQIAELEEWREKAYHNTNIYKERTKHWHDKRIKIKKFKPEDKVLMFNSRVKLFGHEKLRSKWEGPFDIIDTSSHGAITLRYDSGNIFKDDEKIAPPPAEQYVGTLFTKAGDEVLHKYITPTATPSTPKEYRFCIQGVRTPGGGYGKGLLQPLTASEKEGAAESRSPPPMKVKRHLMPPPIVRAAGQFQEDKVKSPEPSVHKLAAQVKKLRKENIELRDRNTELGVELAELRNNFDTLSRGREGLAQVRLYPMVRPNPPDHR

SEQ ID NO: 111553 - protein, 115 aa, Oryza sativa
  Clone ID: PAT_MRT4530_15520C.1.pep
MEVLLVKVLGSSFGGGYFCVASRSEAIREASAPNLAPPMYSTGSHLHPFPRQATAMKAARGWSDLATQGPNLAYLQRGMGISPAREAGSPIAVVATAGCGGEGTEMDDRIWPHKV

SEQ ID NO: 111554 - protein, 136 aa, Oryza sativa
  unsure (1)..(136): unsure at all Xaa locations
  Clone ID: PAT_MRT4530_15521C.1.pep
GLRAPARRPWRTTTKTSWCTASRAVVSQDTMQLRQDCCXRQLAAVDDSWCRCSALNHMVGGIYRELGATDVGHPMAEVFPGCRRGDLERXAASLPAFCNVDIPNGTGGVCYWLGYPRTPRTGHRLLSYCVYDSVGC

SEQ ID NO: 111555 - protein, 168 aa, Oryza sativa
  unsure (1)..(168): unsure at all Xaa locations
  Clone ID: PAT_MRT4530_15522C.1.pep
MASNKVVFSALLLIIVSVLAATGAMADHHKDQVVYSLGERCQPGMGYPMYSLPRCRAVVKRQCVXTAHPAARGRATPAGLLAGSFAAVDDSWCRCSALNHMVWEASTRELGATDVGHPMAEVFPGXCRRGNLKRTTANLPAFCNVDIPNGTGGVCYWLGYPRTPRTGH

SEQ ID NO: 111556 - protein, 175 aa, Oryza sativa
  unsure (1)..(175): unsure at all Xaa locations
  Clone ID: PAT_MRT4530_15523C.1.pep
RFSANKKPWPSNKVVFSALLLIIXSPWLAATATMADHHKDQVVYSLGERCHPGMGYPMYSLPRCRAVVKRQCVGHGAPGGAVDEQLRQDCCRQLAAVDDSWCRCSALNHMVGGIYRELGATDVGHPMAEVFPGCRRGDLERAAASLPAFCNVDIPNGTGGVCYWLGYPRTPRTGH

SEQ ID NO: 111557 - protein, 56 aa, Oryza sativa
  unsure (1)..(56): unsure at all Xaa locations
  Clone ID: PAT_MRT4530_15524C.1.pep
PPHKPTKRPPPPPGHPXEEQGPTRRMRTRKSNKEITLHQHRRLRRSPYKVTHMAFR

SEQ ID NO: 111558 - protein, 140 aa, Oryza sativa
  Clone ID: PAT_MRT4530_15525C.1.pep
RVPLPLLSSPLSSSRLHVHPAAPPRAQRYHILRASCPPSALHPRARPLLRPPHRRRGRPCSSIPPPPSPLSRGPPRRASDWHPRPPSPIAVSPAPAVPSATPSHPVLPPPLARCCHARSSGRPCPRCGLVSAERLKDCPP

SEQ ID NO: 111559 - protein, 82 aa, Oryza sativa
  Clone ID: PAT_MRT4530_15526C.1.pep
EHGLWTLATRPIGWTDADCHEDVMSGDGDIAQWCAIGDAHMISYVRRAPFLGWPEKTSKTVNLEWEYNIRYSTVIEWPFNKG

SEQ ID NO: 111560 - protein, 318 aa, Oryza sativa
  Clone ID: PAT_MRT4530_15527C.1.pep
MGAGGRWVEEYGRSSSPSSNLQCFLDCTTPAVDTHLLPKANGRFSSDSWHHAEMDSVEYFNLADLWEQYYEWSAYGAGTTVQLYGGERVVQYYVPYLSGIQLYTNKAQTASRSFGEDNGMDYWSDDEDNEKMSRSWSSTSEDSLFNCDAISGNRKRHGHMYFEFFEVCSPYGRIPLIDKVYELSQSYPGLTSLRSVDLSPASWMSVAWYPIYHIPYQRNVKDLSACFLTYHTISSSFQDYALESMANGKRNDETEKKVSKTHLAPFGLAAHKLQGSLWTNPRTGDRDRMVSLFGAADSWLKQLGVQHHDYNYFITHPM

SEQ ID NO: 111561 - protein, 172 aa, Oryza sativa
  unsure (1)..(172): unsure at all Xaa locations
  Clone ID: PAT_MRT4530_15528C.1.pep
MCLMYKGTMRVLLILLHDFPEFLCNYHFSFCDMIPSSCIQMRNVILDAHPQDMRVVDPASPNLKIDLLPEISMAPQIMSDVEGALKSKLMKTEVDEYFKKSEGSLFLSDLKQKLLLPQNETSVAGTRYNVPLINSLVLYVGIQXLQQQQTESSASGPAIHTGHMDISELLWQ

SEQ ID NO: 111562 - protein, 742 aa, Oryza sativa
  unsure (1)..(742): unsure at all Xaa locations
  Clone ID: PAT_MRT4530_15529C.1.pep
MITGGQSYVSAPPAFSADGRLLLACTGRTVSVFSASTGMLVSELEGHEGDVTAVVVAPPPVAAAAKLASYCWTAGLDGFLVYWDFAAAELVRKVQVGLPVHSMVIPNIARISRGAEIYTPFAFVSVEDTSKPSNEKLRGQLRIYDLTKGRQVGSLLAETRKPEMIVASSSGEFLGITNKRKLHVWRIPTKNFKPDKIMLGKLSYKKNLRTLVLHLSESMVASIDXTGRILIWSDFGNAPFTGLMDSISELNEARAAVRGSGDSETVTTCHXSTNGVSGTTNQFRLQKMPYMEVMEFSAGLNLDITSPNLDGFNRDVYGFDYSNKLVAVPTEDYCIQFYDLFENTEVSEVQVCERNFHPVDDITMYISLVSLSIDGKFMCTIDVKLPEEELGGLVTLKFWNQGSRAGQYFLSTVIYEPHSDAGISAIAFRPGKNMAVSSSFGGNFKVWVQSMLSQPSDEKNQSGWRCQSVGSYKNKPMTAATFSSDGSVLAVAAENVVTLWDPDNNTLVGVIAEALSPITKLSFIGTSPFLMSLSQSSKPQVAMWNVPNLSMQWSYSLFAEAACCSSSRSEFAVLALLSCPDGETLAEQDGVILLFDAENPKPVSSWSVKKARGGSVAFLKGDSSLDANRKDRIDGEASSLVYVNGSHEYVIFDPRSNEELHIGKSAHKNIQTEEPGPIGYASIFGELPKLESKKDVPEILFIPSERPWETIFSGSTHVLPPLTKLCPAFLASLLEKRPVANE

SEQ ID NO: 111563 - protein, 76 aa, Oryza sativa
  unsure (1)..(76): unsure at all Xaa locations
  Clone ID: PAT_MRT4530_1552C.1.pep
MGEEDDVGQRNWRGRQHXTAPACRXKRAALSPSVAAPIXNARFPPRTGLNMAAARPVEDRPWSEQPLLEPCKQRRR

SEQ ID NO: 111564 - protein, 76 aa, Oryza sativa
  Clone ID: PAT_MRT4530_15530C.1.pep
LECRERGKNKTGSGGPTLFISTEILPIWNPWKPSLPSRRTGATVVRGEKWSLGAYNTYRIPAALKGASRLSWRVLR

SEQ ID NO: 111565 - protein, 75 aa, Oryza sativa
  Clone ID: PAT_MRT4530_15531C.1.pep
FNCHVSATSKPRTTKTRSISPRRRHVSETALQNRPGSQIESVLRVWGLRYLVLWFRATDKISIPFEGRKVNLFLQ

SEQ ID NO: 111566 - protein, 68 aa, Oryza sativa
  unsure (1)..(68): unsure at all Xaa locations
  Clone ID: PAT_MRT4530_15532C.1.pep
MGSKDVFFAAPLMPPMVDISGAQLSESQMRFRDKQCHRQVQDTPLNTCRXVLDRNFTARERFQPMFPP

SEQ ID NO: 111567 - protein, 110 aa, Oryza sativa
  Clone ID: PAT_MRT4530_15533C.1.pep
MKFNVVEQRQIACHPHSRRAIASRRATRTATTSPSRTHPTRCRHEPLQPPPRHYASPCHPHSRRTRAGPPLAASPCSTACTAVALVAARRAPPRRSRDGAAAIASVQQAG

SEQ ID NO: 111568 - protein, 92 aa, Oryza sativa
  Clone ID: PAT_MRT4530_15534C.1.pep
MEESHAFTASHRVTLLIAGSQLYADNLTKEERMEGERGKERNEGGMIWKQGMRHSRTEGVRIAGHVEKGGRGSLAPCRVSNIAVLSRKNDHS

SEQ ID NO: 111569 - protein, 88 aa, Oryza sativa
  unsure (1)..(88): unsure at all Xaa locations
  Clone ID: PAT_MRT4530_15535C.1.pep
FNIKPXGDKMHRGLFKRKGGTPAMNYRLQIPHLHKLRYYEIIWRRAKESGNLGATRTERECAGNTHRHSLRVALIVANLASGGEEDHE

SEQ ID NO: 111570 - protein, 96 aa, Oryza sativa
  unsure (1)..(96): unsure at all Xaa locations
  Clone ID: PAT_MRT4530_15536C.1.pep
NEHKTLCSHTFLTYLCQIKIWHFLVSAVLNHWFLLDFFKALISYILGLNFMLMKLVIINLHFQTDXNNFRLLSNLRFMMDIFVVFQFDLLFCVVFS

SEQ ID NO: 111571 - protein, 238 aa, Oryza sativa
  unsure (1)..(238): unsure at all Xaa locations
  Clone ID: PAT_MRT4530_15537C.1.pep
MAWALLLCLAAAAAAVAAAPPHSQCLDNLPDLTAGGGEAGVVVHDLAGFEAYVTGAVHSTKVVLLASVGFGRLAPLRRKIADKVGQAGYYVAVPDFFHGDPYTLDLNLTEWFSKHSPVKAAEDAKAIFSDLRKKGISVXGVGGYCWGGKFAVEVAKTNEVEAIVTTHPGLVTVDDIKEVKCPIEIIGAQNDTLTPPKLVYQYVQALRHRTDRIDYFAKVFQGVNHGFACRYNASNPFE

SEQ ID NO: 111572 - protein, 437 aa, Oryza sativa
  Clone ID: PAT_MRT4530_15538C.1.pep
MAAAKSVERLGQRRVVPAEPTPAGPLRLSWLDRYPTQMALIESLHVFKPALDRAIGGDDVAVGPARTIERALARALVHYYPLAGRLAFSDSGEVCVDCGDAGVWFTEAEASCSLEDVDYLEYPMMVPKDELLPPTPAGEEERELVLLVQVTAFACGGFVVGFRFSHAVADGPGAAQFMAAVGELARGAGGVSVDPVWGRDAIPDPAAAVIGSLPDPAGAKRLEYLAVDISADYINHFKNQYNAEAHAAAAGVARCSAFEVLIAKAWRSRTRAAGFEPDTTVNLCFAMNARPLLHASLPRGGAGFYGNCYYIMRVSAPAGKVAGSSVTEVVKIIKDGKRRMPSEFSRWAAGDMAGGDPYQITSDYRTLLVSDWTRLGFAEVDYGWGPPAHVVPLTNLDYIATCILVRPWAHKPGARLITQCVTPDRVAAFHEGLLDLN

SEQ ID NO: 111573 - protein, 75 aa, Oryza sativa
  Clone ID: PAT_MRT4530_15539C.1.pep
LVSQAVAVARTSSGLILNTFDSLEHDELAALRRGLDVPVFDVGLLHKLSPMAPSSSSRAIPAPVTPRSAPRRTKR

SEQ ID NO: 111574 - protein, 951 aa, Oryza sativa
  unsure (1)..(951): unsure at all Xaa locations
  Clone ID: PAT_MRT4530_1553C.1.pep
MAKGGRVFIRSNSDKYRSTNHSLPSXEGNDVGILYSPTVGANLVSKSFAFAYLSDKAVTPTNKFFKHPNGNMIEGFGIVQNVPVCFEDKEAILDFHVFEIQDFDILIGLPIEQHLINTPRLDSLKITLGGNKFSVPFSRARIALTDPLTEIECMMSIFSDMIEDIMEVFMVDFSVYGKTFGHYQQNLEKVLQRCQEKDLVLNWGKCQFMVREGIVLGHRVSERGIEVDRAKIDVIDQLPPHVNIKGIHRFSGHAGFYGRFIKDFSTIARPLTNLLAKDAPFEFDDACLKSFEILKKALVSAPIIQPPNWTLPFEIMCDASDFAVGAVLGQTKDKKHHAICYASKTLTEDQLNYATTEKELLAVVFATDKFRSYLEQPINDFLRDYMLMTVRDSNPWYATIVNYMVSKYIPPGENQRNLKYESHRHIWDEPYLYRVCTDGLLRRCVPTEEGLKIIKRCHASPYGGHYGAFGTQDSKEFVRRCTSCQRQGGITTRDAMPLTYNLQVEIFDVWGIDLMEPFPKSRNCEYILVAVDYLSKWVEAMPCNTVDAKHAKKMFTEIIFPRFGTPRMVISDRGSHFIDKTFRDLLRDMGAKHNVAIPYHPQTKGQTETSNKQIKNILQKTVNNMGTGWKDRLPDALWAYRTAYKTPIGMCPYQIVYGKSCRLPVELEYRAYWAIRNWNMDFEGAGEWRKMQIAELEEWREKAYHNTNIYKERTKHWHDKRIKIKKFKPEDKVLMFNSRVKLFGHEKLRSKWEGPFDIIDTSSHGAITLRYDSGNIFKDDEKIAPPPAEQYVGTLFTKAGDEVLHKYITPTATPSTPKEYRFCIQGVRTPGGGYGKGLLQPLTASEKEGAAESRSPPPMKVKRHLMPPPIVRAAGQFQEDKVKSPEPSVHKLAAQVKKLRKENIELRDRNTELGVELAELRNNFDTLSRGLCAKIKCAFEETGKENKYYAN

SEQ ID NO: 111575 - protein, 38 aa, Oryza sativa
  Clone ID: PAT_MRT4530_15540C.1.pep
VFLIRIGHLRRFPHLINVLVAFGLGGRECPQLILYGML

SEQ ID NO: 111576 - protein, 65 aa, Oryza sativa
  Clone ID: PAT_MRT4530_15541C.1.pep
KSRPKKGSGQQAPGRRPGRTEGEGVIARAQGRRTPVGGVTGGVQRGCRRRCAPAPWCPRIWRLIR

SEQ ID NO: 111577 - protein, 82 aa, Oryza sativa
  Clone ID: PAT_MRT4530_15542C.1.pep
SGLNINERSLKVGLHQYHAGSHTPLRHMVNLRGLHPEKSIDHTRASVNLPNSIQRASIVSFTTRTNHRKFNGWKFGMSCCTI

SEQ ID NO: 111578 - protein, 97 aa, Oryza sativa
  Clone ID: PAT_MRT4530_15543C.1.pep
MPSCIVASYVTYTSHRRSCVPTPTSCVATPYLSPLPAHTTAVGVGIGGRSDLRYVGGLTVRVESESVFIGSRVSLLGKAMFRVYFGLYPELDMDKGL

SEQ ID NO: 111579 - protein, 59 aa, Oryza sativa
  Clone ID: PAT_MRT4530_15544C.1.pep
APCRVEAPVFNFYGQCVTLILDKEVQSYPLFFNVRNTPGWRELGCLSLDPLLGSLWPYK

SEQ ID NO: 111580 - protein, 226 aa, Oryza sativa
  unsure (1)..(226): unsure at all Xaa locations
  Clone ID: PAT_MRT4530_15545C.1.pep
SLQLLAVPPSLDTANTEGVSARPDAASSAAASGRRQLGCGGGKAISVAIWGSVVAADVRQGAVELVVAAAQRGDDYSGGGARLDDAGGRWSSGARAAAARAARSDGRSSPESGDARARRGVSGRTRGELGKRERRLRGVFIWAWSGEIVAVEGGIGXNGRRSGAASWARGGGGGGRFHHLGKKGGXRGGAESAAREAAMAXMTVGIGEPEVGGGPDKWVRRSHLSA

SEQ ID NO: 111581 - protein, 243 aa, Oryza sativa
  Clone ID: PAT_MRT4530_15546C.1.pep
EAEKAELDNQIAALEAEARILDQEENEFWKSRNAFNTTLTEFQNERDALATRYAHDAQVLNQLQRRSVYNDTFNITHDNHFATINGLRLGRLPNPYVDWPEINAAWGQTCLLLATLAERLGYKFDGYELCPMGSTSTITRIESKGGGASVVAEPTTTRPQQASSTATTASSPQISKQRLELYSSGDFPINFGFLHRKFDAAMVAFLECLRQLGDFVEHHHQAPSSAASGSGGVRMPYESVRSY

SEQ ID NO: 111582 - protein, 313 aa, Oryza sativa
  unsure (1)..(313): unsure at all Xaa locations
  Clone ID: PAT_MRT4530_15547C.1.pep
MIFPRDKINTIPLEYSRVKCYNGISVRLRMNSVTIIYQKYFCAIAGDYISSNVVKKXTTIRPHFIGKRESRLLPQPVGLPSTSSSRSPLAPLSLQSSPNPLIPLPLTPTSGTVGPTCQVLLLPPAPQFQPSCRHCRLTRRRFRATPPPPFLPKWWNRPPPPPPPLPPLFPKIRRRFAPPRAHDAAPLRRPLPADSTLHSHDLATPSPYKHSPQPPLSFPELPARSPAHPTPSPXSPLSGELRPSLLAALAAAALRRHHHRHRRAVPHPGPYSFSPLHLRNTAAPRARAPPPAGVVQPRAAAAIVVAAMRRRHH

SEQ ID NO: 111583 - protein, 133 aa, Oryza sativa
  Clone ID: PAT_MRT4530_15548C.1.pep
MVRRRDDDGGGDGNARQQEGKGGEEIGTSTLDGGRQRQHYSLQPWPHVAGTVVPRPQNPRSSPAVRRACILDRVVHWFWGRSPGCLPGMCLPHCSSSRITMMYSLAEFEGNQQQVGQSDRRNTCGPTSGTQPV

SEQ ID NO: 111584 - protein, 171 aa, Oryza sativa
  unsure (1)..(171): unsure at all Xaa locations
  Clone ID: PAT_MRT4530_15549C.1.pep
ENIPLNECDYTIIQKLITYLFSQPSLVNASILLXFNITMHRSKEFKISKLKIEKKXKNRKPIFFFGLVQDCITAGGRWRHTLQVCSSALVRHCGCSCGGSRPRCRRARVARWRSLSRSDQIADRVGVATREGEEERYRESCDGATLRFLNSDRLDTPYTRVXGGACGNLMV

SEQ ID NO: 111585 - protein, 925 aa, Oryza sativa
  unsure (1)..(925): unsure at all Xaa locations
  Clone ID: PAT_MRT4530_1554C.1.pep
KTSHCRVARSDRPHTSGQTGRAQRSIVDIGFAITDTPLTLIDHRNLQLNAQAMNALFNSLSQKXFDRVSNLEIAYEIWNKLAEIHEARSEYKDAKLHFLKIQYETFSMLPHESVNDMYGRLSEWVRSKKIIPCQWVKNSRKEERYDFDITKADKIFDLLLRKKQIQLPTGHTIPSAEELGKKRYCKWHNSGSHTTNDCKVFRQQIQAAIEGGKIKFDDSKRPMKVDXQSFPVNMVHTAGRTTDRGRARGFQVNSAKIINKYQRRYEKXQEKHYEEDDDGFDPHWEKGSKIEEQGALSGSRAGNQPSVEEDKAEAGNQVPVAEEATADEAKRLAKGKSVVAASVIMVFTLPAESGIKQEDIDEVEEESAKLIFSPEQAVFEKPEGTENRHLKPLYINGYVNGKPMSKVMVDGGAAVNLMPYTTFRKLGRNAEDLIKTXHGAHLDVLVQSAYLNGXMTFGLKSAGATYQRAMNYIYHDLIGWLVEVHIDDVVVKSKEIEDHIADLRKVFERTRKYGLKMNPTKCAFGVSAGQFLRFLVHERGIEVTQRSLINIRKIINFYSGGXSSSQKNXNSTQRNKGHKFILVATDYFTKWVEVIPLKKVDYGDAIQFVXGACNLPIWYSXTITTDQGSIFVSDEFVQFADSMGIKLLNSSPYYAQANGXAEASNKSLIKLIKRKISDYPRLVFYVNKAINTACHATNRLYLHRLLKKTSYELIVGRKPNVAYFRVFGCKCYIYRKGVRLTKFESRCXDEGFLLGYASNSKAYRVYNKNKGIVEETADVQFDETNGSQEGHENLDDVGDEGLMRAMKNMSIGDVKPIELNNFARNKVWTLVERPRDHNVIGTKWVFRNKQDENGLVVRNKARLVAQGFTQVEGLDFGETFAPVARLEAIRILLAFASCFDIKLFQMDVKSAFLNGEIAELVFVEQ

SEQ ID NO: 111586 - protein, 55 aa, Oryza sativa
  Clone ID: PAT_MRT4530_15550C.1.pep
MQKHRIRGADSGIFRWMNWHAKYLCQTTYLHHMASNIILMFLERHLLTVINGCVN

SEQ ID NO: 111587 - protein, 118 aa, Oryza sativa
  Clone ID: PAT_MRT4530_15552C.1.pep
GRKTHFFFCKRAQGGGTLNKTKGGSTRLLDKSKKQNKSLNPPKQGKGPLIMDFKNELKPERKDIRAADSQPLGKNRILEQLPFFHGTRIFGGGNLHFDFRNQNTAILTNLPGKKGNPL

SEQ ID NO: 111588 - protein, 214 aa, Oryza sativa
  Clone ID: PAT_MRT4530_15553C.1.pep
MAKLQVTYTVYPSSGKPARVGRIIAASASGEHGGGLKVRLTTVLSIASRRRRGRVVDALERIRRGERRRGDRKHQDHELEDFKKRSTKVDGGLRVVPGGLGDGGAVCGGGGGARRPRALGQPVEGVAEAYPRRPRHLQDTGAAIFVRRGENLRCPQFAGGEDADHTCTITSSSSSSTASSNPGGELPGSPLSVALAPACNMISWRVLRNRRTFR

SEQ ID NO: 111589 - protein, 656 aa, Oryza sativa
  unsure (1)..(656): unsure at all Xaa locations
  Clone ID: PAT_MRT4530_15554C.1.pep
MATPRGHLPACVAAVAAAAALLTSLLPPPVAGQPLGNFCGDSGNYTANSTYQGNIRSISATLPKNASSSRTLFATATLGAVPDIVYALALCRGDTANATACAGCVAAAFQDAQQLCPYNKDATVFYDACALRFSNQNFLASTNGDNKFLILMNTQNVSAPAKVFDAAVGVLINATADYAAANSSRRFGTGEEGFNGSKIYGLAQCTPDMATATCRSCLGGIVGMMPKYFSGKQGGRVLGLRCNYRYEIYPFFDGVSLLQLPAASLGAPPAPSPAAVNVTPPATTTVAAILAAVVICFYIWKRKTERARKPSIADPTDPADIESIDSLIHHFSFPRVXTDSNIYSESHPLTSQSTASTGRWEGCQLMMCQLQSLNQDKETKSFEFKIRKSLTTVMDLLRFRNKLQGEGHKLVGEALNSECISPLAESIFWLVFVCSNKPTLVYDSVLKIGLAIARGLQYLHEDSQLKIIHRDLKASNVLLDSDFNPKISDFGLARLFGNDQSQDVTNRVVGTYGYMAPEYAMRGHYSIKSDVFSFGVLILEIVTGRKNNVSYDSEQSVDLLTLVWEHWLAGTVVELADSSMAGHCPGDQILKCVHIGLLCVQEDPTERPMMSMVNVMLSSSTVSLQAPSRPAFCIQKSSVNSDSYSEPFRGANQSTV

SEQ ID NO: 111590 - protein, 1313 aa, Oryza sativa
  Clone ID: PAT_MRT4530_15555C.1.pep
MSRKQEGVVERGGDGKVVWDMGSSLYDSYELASLCRILDRHIGTDLPSLHGEPRQEGLAAGAPPPPPTERNGQQVVVLRDDRRGRTGTGRKVTLRTLFRAAASWAIRQRKAHDCACVGAATTGAIQPVVSPGRPRLFLPISTKVRPRTGVQRFSFRFTWYQSHTDPIQSLERDAMASSSKNNTGNPLVGQPISEKLGKSNHAVWKAQILATIRGARLEGHLTGDDQPLAPILRRKEGEKEVVVSNPEYEEWVATDQQVLAYLLSSMTKDLLVQVATCRTVASAWSMIQGMFGSMTRARTINTRLSLSTLQKGDMNITTYVGKMRALADDLMAVGKPVDDDELIGYIFAGLDDEFEPVISTIVGRPDPVTIGETYAQLISFEQRLAHRRSGDQSSVNSANRSRGQPQRGGSRSGGDSNRGRGAPSNGANRGRGRGNPSGGRANAGGGTDNRPKCQLCYKRGHTVRDCWYRYDENFVPDERFAGTAVSYGVDTNWYLDTGATDHVTGELDKLTVRDKYHGNDQVHTASGAELYRKFFFIKDLATRRTLLRGRCHKGLYALPSPSSHHHQVKQVYGVTKQSFERWHSRLGHPSYTVVEKIGVVNIRNSTLSLIKLASLIMYRVLTLINRMGPQKENIVTLLRDVVFDETQFPFTKLHPNAGAKLRAEIALVPELAASLPRGLQQISSVINTPENANVSNENMQQDSTYDNEPETETDGAPDTVSANAPAESSGSPPINEPASPFGESDSATASPASAPVNSAPHPDAAASGSSAPRGSTSQGGTPSVATDDPHPATTVTGQEAQRPRTRLQSGIRKEKVYTDGTVKWGMLTSTVPPQQGRNVIDCKWVYKIKRKQDGSLDRYKARLVAKGFKQRYGIDYEDTFSPVVKAATIRIILSIAVSRGWCLRQLDVQNAFLHGVLEEEVYMKQPPGYENPSTPDYVCKLDKALYGLKQAPRAWYSRLSGKLHELGFKGSKADTSLFFYNKCSLTIFLLIYVDDIIVVSSRKEAVSALLQDLQKEFALKDLGDLHYFLGIEVTKIPGGILMSQEKYASDLLKRVNMSDCKSVATPLSASEKLIAGKGTILGPNDATQYRSIVGALQYLTLTRPDIAFSVNKVCQFLHNPTTEHWAAVKRILRYIKQCTGLGLRICKSSSMIVSGYSDADWAGCLDDRRSTGGFAVYLGDNLVSWNAKKQATVSRSSTEAEYKALANATAEIMWVQTLLQELNIVSPAMAQLWCDNMGAKYLSFNPVFHARTKHIEVDYHFVRERVARKLLQVDYVSTNDQVADGFTKALPVKQLENFKYNLNLGKVVIEGGC

SEQ ID NO: 111591 - protein, 128 aa, Oryza sativa
  Clone ID: PAT_MRT4530_15556C.1.pep
EGAFRPIVSLVVKAFSPVFYIRREICPGLLFRRPCESFGFYAGPSHFFHAGPGDSPATGREGLVSLDSHLWKNSVQIEGVVLLPPVLFFPPSANSCFCTIDRSPPIMCSSPPLSVGLKRGENRFFLPA

SEQ ID NO: 111592 - protein, 117 aa, Oryza sativa
  Clone ID: PAT_MRT4530_15557C.1.pep
DERDSPTSPTRIPPPPPNPRVAWPPGERGLHGLAMDASGAAEIPALPSRSLRPPPPTGFQKILEGVGGGGGRGERKAGWCRVSDRFGVRFFFSSLSLKPAVCCCSALEFWREREHPR

SEQ ID NO: 111593 - protein, 234 aa, Oryza sativa
  unsure (1)..(234): unsure at all Xaa locations
  Clone ID: PAT_MRT4530_15558C.1.pep
LPLLILFSVPKLWQDMLRNKYLGSQPLSQAFXKAGDSYFWASLMKAKQDFLRFRSFRIRESSQIRFWEDKWLGNASLRDXYPCLYNIARHKQSTISXIFQNNPPSFSWRRDLIGAKLAAWHNLWPRIADLVLAQEQDEFRWNLTPNGIFSVNSHYLALVHTGIPNINRCIWKVKVLLKVKIFFWYLRRGIILTKDNLAKRKWKGNKKRCFCHKDETIQHLFFQCHVTRLTLSDF

SEQ ID NO: 111594 - protein, 73 aa, Oryza sativa
  Clone ID: PAT_MRT4530_15559C.1.pep
MAVVLGSAKAGLEACCAKIESPDDLSNDGDGIHRPRWGRRSDKQGMERWDDTKTICKTLYNVGMGAIWMWILG

SEQ ID NO: 111595 - protein, 872 aa, Oryza sativa
  Clone ID: PAT_MRT4530_1555C.1.pep
MALVASSTATSTTGASPPVPPGCHAARRGLRPTPGWHASPTSPWARGLHHPHCLGATPHAESFVLHLASTLRRLRHGLGGFNSLAAWALLRPPGILRLHPAGTLRRPRYGLRGFTCLTAQALHRPPGLFTFTRLARFTNLATGLGASPPSSPIRHASPTLPQDYCAQGLRRMLGAPPTPGRNDSAPGVTTTPGGYTACWGTLHAGGSAFTRPTRLSPRHDGYARGLRRTLRAPPSPGRHESALGVIATPGATPHAEGSAFTQPTRLGLGHDCYARGLRRMLGAPPSPGRHDSALGITAMPGGYTSRRGLCLQPADTTRPWARLLRPGAAPHAGGSAFTRSARLRPKQDYCAGGLRRMLGAPPAPGRHDSALGATTTPGGYAACWGLRLHLGVPFSRARIALTDPLPEIESAEEVIAVPPHESPEALLEDEVPDFIKDEAEPVQVVPKKGGMMVVANAQNELILQRTITDTQEQPINDFLRDDMLMTVRDSNLWVHSNGLLRRCVPTEEGLKIIEQCHTSPYGGHYGAFRTQGKIWQSGFFWLTMHEDSKEFVRRSTSCQRQGGITARDAMPLTYNLQVEIFDVWGIDFMGPFPKSCNCEYILVAVDYVSKWVEAMPCSATDVKHAKKMFTEIVFPRFGNPRMVISDRGSHFFDKTFRDLLRDMGAKHNVATPYHPQTNGQAEILNKQIKNILQKTVNKMGTGWKDRLPDAVGDMGPGWPRALGVPRRTPQALGARRPEALTRSDAFFKTMRMPLRLPPSDMWAPYSPRHGMKECELPAVGMVKRHLTPPPIVRAAGQFQEDEVKSPEPSVHKHAAQVKKLHKENIELRVCNAELGVELAELRNNVDTLSRGLCAKIKRAFVEMGKENKYYAN

SEQ ID NO: 111596 - protein, 278 aa, Oryza sativa
  Clone ID: PAT_MRT4530_15560C.1.pep
AVSSPVKPTNAADTTSPNDKNVLVEQGYSVYVKHLPYECTTKDVEEKFRKFGAIRPGGIQVRHRQPDGFCFGFVEFESRQSMLAAIEASPVSIGSKASIVEEKRTTTRVVNGVTHIENNGNARGGRFQQDNRGGGYRGDNFRGREAGFVNNGNYRDGDNMRNGFRNQNEYSGRGRGPQGNGYHQNGNGGGYHQNGNGYHQNGDGYHQNGNRYNQNGNRYHQNGDEYYQNGNGNGHRQNGSGYYHQNGNGYRQDRIFHNGNGNGRPARFNGPRQTPVQA

SEQ ID NO: 111597 - protein, 530 aa, Oryza sativa
  Clone ID: PAT_MRT4530_15561C.1.pep
MAVTLLEIARIFATKVPGKIDADVLQLLWKVYFMKETPISVTCLVGAGPDGKHTALEAVTIVLDLPPPQPGSMSGFASVDMVSASDPKSAMALQRLVQAAVWFLGENANYAASEYAWESATPPASSRNPTLASALTRLQRCAFSGSWEIRIAAVQALTTIAIRSGEPYRLQIYEFLHALALGGVQSNFSELQLSNGENQGASGTGLGSLISPMLKVLDEMYRAQDDLARDIRQHDNSKQEWNDDELKKLYETHERLLDFVSLFCFVPRAKYLPLGPTSAKLIDIYRNRHNISTSSGLSDPAVATGISDLMYEPKDVPKEATLIQTGIDPDLAMAWAAGLEDDVWENNAPAVDKVKDFLAGAGTDAPDVDDEEYMNSRPSDDDGRSSGGSSPESTGSVETSISSHFSGMNYPSLFSSKPSGYGASQQTIREEPPSYSTSVLQKRESFENPLAGRGGRSFGSHEDEDRSSGNPQSGKALYDFTAGGDDELSLTAGEDVEIEYEVDGWYYVKKKRPGRDGKTAGLVPVLYVNS

SEQ ID NO: 111598 - protein, 202 aa, Oryza sativa
  Clone ID: PAT_MRT4530_15562C.1.pep
KLIRSKRAAGLEDDVWENNAPAVDKVKDFLAGAGTDAPDVDDEEYMNSRPSVGYDDMWAKTILETYEAEDDDGRSSGGSSPESTGSVETSISSHFSGMNYPSLFSSKPSGYGASQQTIREEPPSYSTSVLQKRESFENPLAGRGGRSFGSHEDEDRSSGNPQSGKALYDFTAGGDDELSLTAGEDVEIEYEVDGWYYVKKKR

SEQ ID NO: 111599 - protein, 80 aa, Oryza sativa
  Clone ID: PAT_MRT4530_15563C.1.pep
PFLSSLAFDRHMSLLEAKFNHRDVCKTQQSSCWVGFFALYTPRVHSIHCLCVEMYTCFGVLPFVCYSGPSVMIERRSLLL

SEQ ID NO: 111600 - protein, 75 aa, Oryza sativa
  unsure (1)..(75): unsure at all Xaa locations
  Clone ID: PAT_MRT4530_15564C.1.pep
LVRRLILGFPAFGASGWNLALEGQCKTWADGLSCXVVAAFLESRNSKVRGLAIVVLHPLVVRGILLISAHKAVER

SEQ ID NO: 111601 - protein, 183 aa, Oryza sativa
  Clone ID: PAT_MRT4530_15565C.1.pep
MTIVEMQMNIDCDGCEDNVRKALQRLQGVDYVDVDRVRGKVTVTGSASQKKVLRAARRSGRIAVLWPSAYDTDHRHHHQAYYAQPAYHHHHHYQQTIKPAAAAAAAVAVAARAPHHHHQHYSSVQHGRMSGGGKAVSSYNYHVHGYFDSDLHGYSGGHHHGDVVPAAARSYFSDENPHACAVM

SEQ ID NO: 111602 - protein, 69 aa, Oryza sativa
  Clone ID: PAT_MRT4530_15566C.1.pep
MAAGGGLSTGSPNNLPDEKGTRRGQQRLTSYTNARRAYQLSTKEGVLPHSWLWNTLNFLAVFEIASSRI

SEQ ID NO: 111603 - protein, 110 aa, Oryza sativa
  Clone ID: PAT_MRT4530_15567C.1.pep
MHGHPYRKQGKMFISTTYQVRAAVATSIGVAAARAKMLADQEEREMELLMASIIETQLKKIQYKIKHFEELELIMDHEYASLQQMKIFLVYEWLKVLQRAFETWVQYRGM

SEQ ID NO: 111604 - protein, 179 aa, Oryza sativa
  Clone ID: PAT_MRT4530_15568C.1.pep
SWFAPKDCNFLEFLLLLDAMDERIPPPAFFQFLPSGAHSSPHHQSPLRSPASERERYLAELLAERQKLAPFMQVLPFCNRLLNQEILRASSLPPNPNFVEPERVNHGSPLRLTGHPMNGQPMDLEGWSGMQTEMGVLQSPSMGWNVAPGVAGSPVVKKVVRIDVPVDKYPNYNFACIQL

SEQ ID NO: 111605 - protein, 95 aa, Oryza sativa
  Clone ID: PAT_MRT4530_15569C.1.pep
MEGCVIIHEVLHEKRTKKLKGIIMKIDFEKAYDKVNWDFLIQDLGLSPLICNLVSDAFCIGTSRSEGVQYVDDTVLFIANDDNQNCGNKIHLVLL

SEQ ID NO: 111606 - protein, 71 aa, Oryza sativa
  Clone ID: PAT_MRT4530_1556C.1.pep
RSVVALRPHLEALPRSEPPPPGSVALAAPRAPLSAGSVAHDRATAQDPPSHFEPPTAGSMPRAPPHSEPSP

SEQ ID NO: 111607 - protein, 290 aa, Oryza sativa
  unsure (1)..(290): unsure at all Xaa locations
  Clone ID: PAT_MRT4530_15570C.1.pep
FVHLSSILRGAAPNGSGASAQLRATVRGAPSPNALSTAQSRLPCTANREGGLGASVLRLHFPESNVERRDASVLQSGQEQNAGPNVGSLXGFSVIDNAKARVEXAICNQTVSCADILAVAARDSVVALGGPSWTVLXLGRTDSTPAREALTNTDLPAPSARLAELIGNFSRKGLDATDMVALSGAHTIGQAQCQGFRARIYNDNCPXRTPGSGDSXLAPLDTTTPYHGARPPTTATSLSKQRAPAPPTRSSPDRQQHGRSSLRTSGRPTGSASSRARRRRSATPAQGGQS

SEQ ID NO: 111608 - protein, 78 aa, Oryza sativa
  Clone ID: PAT_MRT4530_15571C.1.pep
FFSKDFGLSHWGRILPFSGSPPFMGGCIFLSPALIKPGHLFLFLDLFPPFVLGYFPFKIFMDPVLFPLVFLFTGCLPY

SEQ ID NO: 111609 - protein, 881 aa, Oryza sativa
  Clone ID: PAT_MRT4530_15572C.1.pep
MGAKGRATDRAMEEYKARSFMAMAARHLSLRMASLGALITMCQTANKSSAWTFGSSFTVGVKFHQYRKIDYTISFCTRRGTMEKVEVDGNFIGTGNWKLHGALCKQLHKVVLEVLDVIPVLEATRPGNSSGLLALSSLRIAVEKAKNLLQYCSECSKLYLAFTAENVLAKFEKARYALLESLHQLEETLPEAASSQILDIAKDLEKAVFTLDLIEKQAGVDVNQLVQNEAKSNGFLHDNELEFFRQTAFRVGVASSATALTERRALRRLLERAHAEEDIKKESVASYLLHLMRKYSSIFRSETTDFTNTSMCSSPSCSSRSLSSSIDLHGNGHVIEKSISRVGSFNLRQIKGLSGSMPLPPEELRCPISLQLMHDPVIIASGQTYERACIEKWFSSGNTTCPKTRNELSQLSMTPNYCIKGLIASWCEQNGVLVPSAPPDSPKLKYLRISSLNSSKCLVTNGVSTVLFEDTCAEDDIKDGGKVASEECTRQNSGEAPSEICEVDQASPEKHPHENSEKVAEATCELWLRVLSKDDDECVDEQREVIEQIRFLLKDDNELRKYAGANGITELLIHFVKKAVCRDDVQCQVVGTMALFNLAVSNDRNKKQLLSGGVLPLMEQMIQKPETYEAAVAMYLNISCLAEAQAIIGQSEAAPLLIKGLQGDGFRMSKTCCLDALLTLYNLSLQSSNIPTLISSGIMQSLHDVLTPSSPTTEKALAVLINLALTRAGKKEIMADSDMVGAIVVILENGDPAEKEKAVSCLWIICSGDDGGSQMVLQEGVIPALVSLTANGTGKTKDKAQRLLLLFRGKRQREVEQLQPRVQLHEVVSQATAQHEQQQQQQQEESSEPGSDKMSRLRNSKSKLRRFTRALARLLKKWGIR

SEQ ID NO: 111610 - protein, 261 aa, Oryza sativa
  unsure (1)..(261): unsure at all Xaa locations
  Clone ID: PAT_MRT4530_15573C.1.pep
HAVRKQINFLPPDRARGRKDELRTEPWRNSRLAPSSPCLPRVKFHQYRKIDYTISFCTRGXNLTRRGTMEKVEVDGNFIGTGNWKLHGALCKQLHKVVLEVLDVIPVLEATRPGNSSGLLALSSLRIAVEKAKNLLQYCSECSKLYLAFTAENVLAKFEKARYALLESLHQLEETLPEAASSQILDIAKDLEKAVFTLDLIEKQAGVDVNQLVQNEAKSNGFLHDNELEFFRQXAFRVGVASSATALTERRALRRLLERAH

SEQ ID NO: 111611 - protein, 35 aa, Oryza sativa
  Clone ID: PAT_MRT4530_15574C.1.pep
KSPKYLTYLNLEPLYHVSVILDYVSFYVMQILILK

SEQ ID NO: 111612 - protein, 178 aa, Oryza sativa
  unsure (1)..(178): unsure at all Xaa locations
  Clone ID: PAT_MRT4530_15575C.1.pep
PPVNPPRGFFFLQARGDPPGGGRRGPPRGPWEAPFLVRGGAPPPGGXQHPSPPVSGGLAAPGKGGGPPFLPPPLPQENPAGAVGPPLFFPGRAHFLRPGPPPPPGAPPGPAGVFPGGRFYRWGGATILPTKNNPGRAGDPPVGIHPWPWAPGPSQKKKGGGPLAVQFSPPPPIFKRVL

SEQ ID NO: 111613 - protein, 418 aa, Oryza sativa
  Clone ID: PAT_MRT4530_15576C.1.pep
MPPPLLLLLLLAAAAAAVAPARSKSTLESCSSSTACPALLSYTLYADLKLAELAALFSADPLAILAANSIDFAVPDPADRILPAGLPLRVPVPCACSDGIRRVTTVRYVARPGDTLASVASSVYGGLTTPDWISDSNGILGAKPDAAVDAGTTLFVPLHCACFGGVDNGLPAVYLTYVAGKGDTVAAVAQRYRTTATDLMSVNDMATPELAAGDIIVVPLPACTSSFPAFTADYGLAVANGTYAVTANRLFCVPAPLADSTCSSMQCANSSMMLGNFTLLMTSSGCSVTSCSYGGFVNGTILTTLTTALKPQCPGIKFVLNYVSVHHFCLEKPRLYAALAFRAGPHQYPPLIPPPTSSFFETYLGPSPTPMASEGGVMAGMAPTSTPAASSGPPPAGRHVVGDVLGAFALCLVGNLLW

SEQ ID NO: 111614 - protein, 92 aa, Oryza sativa
  Clone ID: PAT_MRT4530_15577C.1.pep
GVFFFFFFFFFCFFFFFFFFFFFFFFLRKRQRKKKKKGRGQTPNPNFFNFNGGGGENTQRAQIKLGGGPPILYFKLWGEKSHLRIEAQTTKT

SEQ ID NO: 111615 - protein, 192 aa, Oryza sativa
  Clone ID: PAT_MRT4530_15578C.1.pep
MTEYHFFSLEHAACTSSFPAFTADYGLAVANGTYAVTANRCVQCSCGPGNLDLFCVPAPLADSTCSSMQCANSSMMLGNFTLLMTSSGCSVTSCSYGGFVNGTILTTLTTALKPQCPGPHQYPPLIPPPTSSFFETYLGPSPTPMASEGGVMAGMAPTSTPAASSGPPPAGRHVVGDVLGAFALCLVGNLLW

SEQ ID NO: 111616 - protein, 427 aa, Oryza sativa
  Clone ID: PAT_MRT4530_15579C.1.pep
MAATKREPLRPISSNAGTVERRARGGAAAAAAAKEKEKENEVPTEIGRGKDGGEKKPPVVVAVVVPPAPPLKPSSLQVRMKAEEEKEREEEEEGSSPPVALVAGLQVRMGPRGRELLLPPPPPPPPLPLPTSSSYEAWDLSDNEAAPASSWATLPNRALLCRPLPLDVGRCTCIIAKETLAAAAAGARGVALYSLYTNEGQGRQDRKLAVARHRRRRGRSEFVVAQNLDGIFCTSDKNFLGTLSSNLVGSRYRIWGQGNRVDEIKSQSKRLLGVVAFAPTVTTLTGSFRSMRAWIPKNQSIHLKNSNSAQASEFPVVEIQHISGLPKDWQEKKIKADQLCSRSPFYNNMTKRYELDFRERAGRMGYKVQPSVKNFQMTLEEKGRQTILQLGRIGKSKYIMDFRYPLTGYQALCICLASIDSKLCCTL

SEQ ID NO: 111617 - protein, 576 aa, Oryza sativa
  Clone ID: PAT_MRT4530_1557C.1.pep
MSNEVNHVGKALMFNGTNYSIWKIKMSTHLKAMSFHIWSIVDVGFAITGTPLTEIDHRNLQLNTQAMNALFNSLSQEEFDRVRNLETTYEIWNKLAEIHEGTSEYKDAKLHFLKIQYETFSMLPHESVNDMYGRLNVIVNDLKGLGANYTDLEVAQKMLRALPEKRKERGRGSNSNRRRNRRPNKTLSNLRCFECGEKGHFASTLCFQCPSKDDDGDKSSKKKSGGYKLMKKLKKEGKKIEAFIGEWDSNEESFASSGSEEEGGDDASSKKKKMVVVAIKEAPSLFGPLCLMAKDSSKVTSFNDSESDDDCDNVSYDELVSMFEELHAYNEKEIVKFKALKKDHASLEVLYEELKTSHERLTISHEKLKEAHDNLLSTTQHEALIDVGISCDLLDDSATCHIAHVASSSISTSCDDLVDMSSSSSNSCVSICDASLVVKNNELKEQVAKLNKSLERCFKGKNTLDKILSEQRCILNKEGLGFIPKKGKKPSHRATRFVKSNGFRYGNLYLVDFNSSEANLKTCLVAKTSLGWLWHRRLAHVGMNQLSKLSKRDLVVDLKDVKFEKDKLCSACQAGK

SEQ ID NO: 111618 - protein, 98 aa, Oryza sativa
  Clone ID: PAT_MRT4530_15580C.1.pep
FVRFFDTSFMPVSPPFYRLVSVRPFLCVSFLFGPPLVSPFFSRFPSCLYFLWHCNFSPVLPWSLLLPCFYPALFGPTFGPFGSPSGFPRSFPGPPKGP

SEQ ID NO: 111619 - protein, 44 aa, Oryza sativa
  Clone ID: PAT_MRT4530_15581C.1.pep
KVFFDMIFSKAGFKSCPGKFESMSYFPFHTLFFFSVASRCVLQK

SEQ ID NO: 111620 - protein, 441 aa, Oryza sativa
  Clone ID: PAT_MRT4530_15582C.1.pep
MGYWADNILGFFLGREYFGLKGPIRSSFRPAFSPQLTLVSSHLSCPLTSLQNPTVAAAPAAMTSSPAARRRPPGPLALGLESSANKIGIGVVSLSGEILSNPRHTYVTPPGHGFLPRETAHHHLAHLLPLLRAALGEAGVTPADLACVCYTKGPGMGAPLQVAAAAARALSLLWGKPLVGVNHCVAHVEMGRAVTGAVDPVVLYVSGGNTQVIAYSEGRYRIFGETIDIAVGNCLDRFARVLELSNDPSPGYNIEQLAKKGEKFIDLPYVVKGMDVSFSGILSFIEATAIEKLKNNECTPADLCYSLQETLFAMLVEITERAMAHCDSKDVLIVGGVGCNERLQEMMRIMCSERGGRLFATDDRYCIDNGAMIAYTGLLAYAHGMTTPLEESTFTQRFRTDEVHAIWREKEMPVLTNIRAHAMAEVSKDEASVPTPIAVDS

SEQ ID NO: 111621 - protein, 256 aa, Oryza sativa
  Clone ID: PAT_MRT4530_15583C.1.pep
MTPWMDEWGRRLSARRRSGDGEESAEEARWMPGAVEGAAERGIEPSRARDRGGCEERGEVGDSGGGEGMCVSANSTHSEALDIWIQWVPLRREGVGIAKKAELHQLVYHSFGKISLNLGLWRVRRGLATSACYPFCPIDEDVEHLFLSCSGVAAIWHSYGLDEQQVASLAHLEDLWGLPPPDNALTPRIWRTILLAAVWNIWKRHNNKIFNSIDEAHSVVLHRCANDIELWSNRCNDVVGKQQLHSWALNLSVINH

SEQ ID NO: 111622 - protein, 68 aa, Oryza sativa
  unsure (1)..(68): unsure at all Xaa locations
  Clone ID: PAT_MRT4530_15584C.1.pep
VSNWKKCSEGPSTCHRVTKSSPNHKIRYMTSLNFXKPVTLHPQAVLIPVLSYVATESIWDPRGPHMSE

SEQ ID NO: 111623 - protein, 200 aa, Oryza sativa
  unsure (1)..(200): unsure at all Xaa locations
  Clone ID: PAT_MRT4530_15585C.1.pep
FLVLVSKPAVTSTKAAYDLSFSELPVDPFAGPTWDNHAQTKCKIFLWTAHKRRIYTNDRRVRRGLATSAXMPLLPHRHFCPIDKDVEHLFLRCSXVAAIWHSYGLDEQQVASLAQLEDLWGLPLPDNALTPRVWCTILLAVVWNIWKRRNNKIFISIDETNTLVLRRCANDIELWSNRCNDIVGKQQLHSWALNLSVINH

SEQ ID NO: 111624 - protein, 135 aa, Oryza sativa
  unsure (1)..(135): unsure at all Xaa locations
  Clone ID: PAT_MRT4530_15586C.1.pep
PRVRPLVRPRVRPRVRGVRRVPGVGLLYTELVQGIPPLFPRLVRKIRXVHSVFSFISIKHLPMQHVDAAERFLFRQVCPRARRVLRXGGRYSYTDSLEEPWEFAGLLVIGLKMFIQEESGFAPHQEMIDAAPDGD

SEQ ID NO: 111625 - protein, 64 aa, Oryza sativa
  unsure (1)..(64): unsure at all Xaa locations
  Clone ID: PAT_MRT4530_15587C.1.pep
XVHXPQXYPQXATNQXTRVASTFSLISTESAVXAPRXXPRFKTKDYIXQTNVFYXERKEGAPSC

SEQ ID NO: 111626 - protein, 297 aa, Oryza sativa
  Clone ID: PAT_MRT4530_15588C.1.pep
MGMRPGWVGGLVEESFFVGCPAHESRKKNEKNIFCLACCTSICPHCAPSHRHHPLLQVRRYVYNDVVRLGDLEKLIECSYVQPYTINSAKVIFLKPRPQSRPFKGSGNVCLTCDRILQEPFHFCSLSCKVDHVMVHGGGDLSNIILLHPHHHPNTATASAFPRFEDLRVGADDDAAAITAVTPEGRYGGGGGGSSDNGGGDGGGGEVGEVKRKKKKGGGTHLDLYFHALACITVEVEEQQSCGARRLPELALWLQSLELELGLQAMKWQPLDAGADRLTPWMKKKIEQDVVCLESWE

SEQ ID NO: 111627 - protein, 117 aa, Oryza sativa
  Clone ID: PAT_MRT4530_15589C.1.pep
QHSLGSVLPCVGMHHGGGGGAAIVWCPPVAGARSLAVGYQEKTCMNGEDGSAVGATTPNCRVRSSSCQVLACCSQSLELELGLQAMKWQPLDAGADRLTPWMKKKIEQDVVCLESWE

SEQ ID NO: 111628 - protein, 226 aa, Oryza sativa
  Clone ID: PAT_MRT4530_1558C.1.pep
MTDRNGPFGRLPEHLLVEIFIRLPTCEWVQISCVSKHWASIFQGECMWQTAIARNWPSAGLRKRWPGPIPRGSARRRFQALYVSQNLVSSGGDIDELVGHTYLYLKEQLERPVVAPSSILHGTIIDQFIACGRTGEKAHELASKIWLAVIDNLEENQQTFLLLKHLSQEGEFFLPFPYSRSYKVLWRVFDKLFTDFRDCFSRGDYHDALAGAKSRFQPVPSAWLGH

SEQ ID NO: 111629 - protein, 204 aa, Oryza sativa
  Clone ID: PAT_MRT4530_15590C.1.pep
MGIIWHHLRIVTARIYHMCVVRRYVYNDVVRLGDLEKLIECSYVQPYTINSAKVIFLKPRPQSRPFKGSGNVCLTCDRILQEPFHFCSLSCKVDHVMVHGGGDLSNIILLHPHHHPNTATASAFPRFEDLRVGADDDAAAITAVTPEGRYGGGGGGSSDNGGGDGGGGEVGEVKRKKKKGGGFFPQILGLGSRRKGAPHRSPLS

SEQ ID NO: 111630 - protein, 304 aa, Oryza sativa
  Clone ID: PAT_MRT4530_15591C.1.pep
MEGGGLIADMSWTVFDLPSHSDESEMMAQLFSAFPIHGEEEGHEQLPWFDQSSNPCYYSCNASSTAYSNSNASSIPAPSEYEGYCFSDSNEALGVSSSIAPHDLSMVQVQGATEFLNVIPNHSLDSFGNGELGHEDLDSVSGTNKRKQSAEGEFDGQTRGSKCARKAEPKRAKKAKQTVEKDASVAIPNGSCSISDNDSSSSQEVADAGATSKGKSRAGRGAATDPQSLYARKRRERINERLKTLQNLVPNGTKVDISTMLEEAVHYVKFLQLQIKLLSSDEMWMYAPIAYNGMNIGLDLNIDT

SEQ ID NO: 111631 - protein, 94 aa, Oryza sativa
  Clone ID: PAT_MRT4530_15592C.1.pep
YASAPSLHRAPPPPTSPPSPTADVLVSVAPPAPFPTPSSPLPPPPPCPRRHPFPTPSSPLLPPSPSPTLGGARVVARSPMPSSPPLPPPPSNHR

SEQ ID NO: 111632 - protein, 58 aa, Oryza sativa
  Clone ID: PAT_MRT4530_15593C.1.pep
SRTHAAPCQFKEDRGYCIPVIQFISCSFTNHILPINASHGNVGHLLSKRPSALCNDEM

SEQ ID NO: 111633 - protein, 214 aa, Oryza sativa
  Clone ID: PAT_MRT4530_15594C.1.pep
MRDVVVAVGGGTKAASRQQGQGGVTLAAAAAGSGSGSAASPCAACKLLRRRCAAGCVFAPYFPPGEPHKFANVHKVFGASNVSKLLQEIPVQHRGDAVSSLVYEANARVRDPIYGCVGAISSLQQQVEALQAQLALAQAEMVRLRMSNDYIGRRLRARGCDGGGGGEGGSTTTTTGSPSSMSSPAKTAEPEPLCKPTPELDMVVDQPDFGFWSY

SEQ ID NO: 111634 - protein, 43 aa, Oryza sativa
  Clone ID: PAT_MRT4530_15595C.1.pep
SADARVRSILLQSTYVVVHLPRWRSKKASYHSRNRNALLKLFC

SEQ ID NO: 111635 - protein, 125 aa, Oryza sativa
  unsure (1)..(125): unsure at all Xaa locations
  Clone ID: PAT_MRT4530_15596C.1.pep
MVVEDMHDWAHFRYAVVLEFEGNTHREKTLALEMLTQTCTVAEYKQQFDSLVYKQAAAVALTQECVSLEQSQQYVKKLTYKRVGPTLEGLPAVAETLAIKPXKRRANGLCFKCGDKYSPKHMHAV

SEQ ID NO: 111636 - protein, 190 aa, Oryza sativa
  unsure (1)..(190): unsure at all Xaa locations
  Clone ID: PAT_MRT4530_15597C.1.pep
KDAGAKGMILAAYAFDILDDAESGGSMPCVMVDFGAAQQIKHSADENTKLVVKVIDSYTSIEREVLALKISHFSIGGPILFYAEFLMPDITAPGSNILSAIQDSYNLMCGTSMACLHVSGVVALLKALHXDRSTAIIKSALVTTASNEKYGVPILTDGLSQNITDPFDYGGGFIDPNRGRDPXLAYDVDP

SEQ ID NO: 111637 - protein, 50 aa, Oryza sativa
  unsure (1)..(50): unsure at all Xaa locations
  Clone ID: PAT_MRT4530_15598C.1.pep
MKIIFVFALLAIVACNASARXDPLIYCYRLYQLQSHLLLFFQALSPCSEF

SEQ ID NO: 111638 - protein, 73 aa, Oryza sativa
  Clone ID: PAT_MRT4530_15599C.1.pep
YLLIISGVHISLLSSSSSRTRRSGGTTRRPEPGRLGAQRKKRRRSARVSPPAMARRDGHHTHGATDRCVVVTP

SEQ ID NO: 111639 - protein, 874 aa, Oryza sativa
  unsure (1)..(874): unsure at all Xaa locations
  Clone ID: PAT_MRT4530_1559C.1.pep
LEDEVPDFIKDEAEPGETPDLPIMEPPPXPPLELEPLPQGLRYAFLHNDREAPVIISDKLSEDEIQRLLTVLEKPRSVLGYSFQDLRGINPALCTHRIHIDPXSTLSREPQRRLNNAMREIVKKEVLKLLHARIIYPVPYSEWVSPVQVVPKKGGMMVVANAQNELILQRTVTGWRMCIDYMKLNKAMKKDHFPLPFIDEMLERLANHSFFCFLDGYSGYHQIPIHPEDQSNTTFTCLYNTYAYRRMSFGLCNAPASFQRCMMSIFLDMIEDNMEVFMDDFSVYGKSFGHCLQNLDKVLQXCKEKDLFRSYLVGAKVIIFTDHAALKCLLTKKDAKPRLLRWILLLHEFDLEIQDKKGVENSVADHLSTLQITDTQEQPINDFLRDDMLMTVRDSNLWYANIVNYMVSKYIPLGENQRKLKYESRCHIWDELYLYRVHSNGLLRRCVPTEEGLKIIEQCHTSPYGGHYGAFRTQGKIWQSGFFWLTMHEDSKEFVRRSTSCQRQGGITARDAMPLTYNLQVEIFDVWGIDFMGPFPKSCNCEYILVAVDYVSMVISDRGSHFFDKTFRDLLRDMGAKHNVATPYHPQTNGQAEILNKQIKNILQKTVNKMGTGWKDRLPDAVGVSRPPARKDYSSTDALWAYRTAYKTPIGMSPYQIVYGKSCQIPVELEHRAYXAIRNWNMDFEGAGEWRKMXIDELEEWREKAYHNAKIYKERTKRXHDKRIKIKKFKPGDKVLMFNSRVMLFGHGKLRSKWEXPFNVIDTSTHGAITLHDDSGNIFKERRLFQDDENAAPPSAERYVGTLFTKAWDEVLHKYITPTATPSTPKEDRFCIQGVRTPGGGYGKGLLQPLMTSXKEGAAESHSPPPMKVKRHLK

SEQ ID NO: 111640 - protein, 56 aa, Oryza sativa
  Clone ID: PAT_MRT4530_155C.1.pep
QTKDTCSNIILSTKDLHIFHLLLILPYIITTMPLDAHTINTFLTLPYQPSLYTTQY

SEQ ID NO: 111641 - protein, 26 aa, Oryza sativa
  Clone ID: PAT_MRT4530_15600C.1.pep
SNTKYFYALLVNLDRLIVPRSVRKIL

SEQ ID NO: 111642 - protein, 187 aa, Oryza sativa
  Clone ID: PAT_MRT4530_15601C.1.pep
MTWAKQLRASSSGCSGTNAATTKHAGAAKPPWLRPTPPPPSTPPQHGRPGSSPNAAQARRRRPASRQPHRQPRQLLGRCHQPLPPASHRPAAPSPASPVVRLPRQTPPSSRHQPPSTAPSAHRPDQVVTGQIQPRKGQIRRRHSGSAATRRAAARPSRCAVPPPHAGDGSPPGVRERQGPEPGDPLV

SEQ ID NO: 111643 - protein, 501 aa, Oryza sativa
  unsure (1)..(501): unsure at all Xaa locations
  Clone ID: PAT_MRT4530_15602C.1.pep
MAIMDTTIAHIMNKQEDTKIKSFKCWNPIQPHATLLTSKGXLDVQLCIRAPFWVQLERQCAVAPVMGLWACNFVWDPDAGIMLICIGKINNPRGGVMIAKAQCNNIXYGCSRVINVSPKFHRSRRVFVVVETYENGIIFLLGFHFSSFQKFLSLYDRCLXRHRYIQPPLGCLVESVYITIPLALGVQNIQQKEENNVLEKKAEEYEAPAMFEESLQGKLNGAEINEGEYSQAELHMSTISYTLAIPCDKKELCDNSSVILMPQLLNEHAIXVNEHVVQIANEVEERELLSSLKTLGYVLFHGFCELDNLKEKLFAKSNLPYXPTNANFHIFGXYNDRGIYLVHRVYRCXVDKNCKLERHIIAYHVISSFSCFDVKKXMVLNALCSEHHMENPRTVIYEEGEDDVTMTTIYTTVTHIKIKFTEXWNLIRPPTTLLNSNGHQIXIRAPFSARSQKQGVESPIMGLWACNFIWDPSPSRAHVGENYANNFIYYLHISKSMYGVN

SEQ ID NO: 111644 - protein, 141 aa, Oryza sativa
  unsure (1)..(141): unsure at all Xaa locations
  Clone ID: PAT_MRT4530_15603C.1.pep
AGLILQPATKHDVTMAIMDTTIAHIMNKQEDTKIKXPFKCWNPIQPHATLLTSKGXLDVQLCIRAPFWVHEXVDEKSRSPLSDGFGHIAKFHLSCPELERQCAVAPVMGLWACNFVWDPEPSGACVWCTPTKWSTTLGTLT

SEQ ID NO: 111645 - protein, 445 aa, Oryza sativa
  unsure (1)..(445): unsure at all Xaa locations
  Clone ID: PAT_MRT4530_15604C.1.pep
SAYEVPDYKFAXVESKLSLCDEKYDFVAYIDWKLAIDNEFDXDFSDAQMIKAANNKLTSSALFWWSYVSNKPKTWDECKTMMGKSFVSSYYKCTIIEKLENLKQDDRNVKVYIXEFKVFQNIQQKEENNVLEKKAEEYEAPAMFEESLQGKLNGAEINEGEYSQAELHMSTISYTLAIPCDKKELCDNSSVILMPQLLNEHAIXVNEHVVQIANEVEERELLSSLKTLGYVLFHGFCELDNLKEKLFAKSNLPXYPTNANFHIFGXYNDRGIYLVHRVYRCXVDKNCKLERHIIAYHVISSFSCFDVKKXMVLNALCSEHHMENPRTVIYEEGEDDVTMTTIYTTVTHIKIKFTEXWNLIRPPTTLLNSNGHQIXIRAPFSAREYLMESSQSYLSKXSSLISEFDLVXPRSQKQGVESPIMGLWACNFIWDPSPSRAHSRCAVRL

SEQ ID NO: 111646 - protein, 389 aa, Oryza sativa
  Clone ID: PAT_MRT4530_15605C.1.pep
MAFLGQNRLYDGISWNSHLSMVFFVPLAMEVDSIRLPAPDERDWSELPVDALSVFFAKIGAIEILMGAGLVCHSWLEAAKVPDLWRSLDMTRHKVIFKKTIGVMCAMARVAVDRSAGKLESFWAQNFVTSDLLKYIGERTTSLKSIRLIAYTRVPWKELVNLAAKSPLLEDLEHSYRDSLEEFFEHLGCKCPQLRCLRVNNDGFVYDDAKYDLMDQVIGDHDDDDDEEDELEYGPWDWPSNNNGVAFAIAESMHELRILQITNNTLTNAGVLAILDSCNNVSPNDQLRARWASLRHFNLSEGCRWSNFKELRVIGEDEGQEFRPEDELSDGLSKEFCYPSKDAGMGDGWDDVYWDDISLPSDDGRDPDLSNVNCDDITQYTYLHDYYSL

SEQ ID NO: 111647 - protein, 114 aa, Oryza sativa
  Clone ID: PAT_MRT4530_15606C.1.pep
RVTNYTFSHKYYIRNKPKIGGIYTSAATCKHGIRKALFWGGHISQNTHRKLIMGFPKGKLDLFFEKKGILEGVRIFSKKHPPPPLLETGATYSSTTMVWKDTWVPYFTTGLIPP

SEQ ID NO: 111648 - protein, 71 aa, Oryza sativa
  Clone ID: PAT_MRT4530_15607C.1.pep
GNEFHGDNPLKPKAAKNLKSKFFEPKLKTPSWAQGGEQTPKTGRLFGHSKNLALFFKIKKHFFPPPGGKGG

SEQ ID NO: 111649 - protein, 355 aa, Oryza sativa
  Clone ID: PAT_MRT4530_15608C.1.pep
MAGGDGGGGGGDESEFVGVGGGGGGGGEGEGNQSPPNRRFFVAVHVGAGFHAPANEKAYRRAMKRACLAAAAVLREGNGTSLDAVAAAIQVLEDDPITNAGRGSNLTESGHVECDASIMDGSTTTFGAVGAVQGVKNPIQIALHLAREQMWLVTESAKAQWGKYRSLLASAKESVNHSTGSGSESSSVQLEAPGAEAEDITGVKKMKMITRSIMEDDQDCVMDTVGAVCVDAYGNIASGASSGGIALKVQWIQSGPASACTKVLRQAVQSSSEMSHDTGAGLLLIQADVLKVRGEVSALGAAELVAAYSSPSFGVGYLGSNMNSPKVAMLRSSKAAPNTINHFATRVNFDAQSDQ

SEQ ID NO: 111650 - protein, 66 aa, Oryza sativa
  Clone ID: PAT_MRT4530_15609C.1.pep
DMLGAELIIFRRCLLLVMIGVGGIHSVIAQQMHAFYQSVPEFHGVYRWLDPFFPINPKVAARRILM

SEQ ID NO: 111651 - protein, 77 aa, Oryza sativa
  Clone ID: PAT_MRT4530_1560C.1.pep
FLPWFGDVCIGWFIFGAPALWHSGLRPICGGFPWRCSAIGSFFSFQGVGLFIFGQARSKVWIGEAVAFFVTGKIKLG

SEQ ID NO: 111652 - protein, 207 aa, Oryza sativa
  unsure (1)..(207): unsure at all Xaa locations
  Clone ID: PAT_MRT4530_15610C.1.pep
WRQRRQRRLRMRAVAAEVTDEDSGGRGRRLRRTRKRRLRAAVVEGGGGRGRGRWQRRRRRRRTRTRAAATEVARGQRWSRVVADAEEGGGSGRGWRWTRTRGAEIGDKEDPLLSKMRKEVVVAGGKDTMEPWXVDNDFFLVPVKISDHQGLYVIRELVSDTIRIGALVYGVHDERTLQEKEKIPYVSFRVRPIPYVLLNFASSLIYP

SEQ ID NO: 111653 - protein, 102 aa, Oryza sativa
  Clone ID: PAT_MRT4530_15611C.1.pep
LKWGGLAALTQLEWFREGWFTLPENPSRINQMVSLFPSPPLAENGGKNLVNQNPGSPKQALRFKGYSSRWETTHWPTAPKINFLAPEFFSLFFPGAPPVKLK

SEQ ID NO: 111654 - protein, 50 aa, Oryza sativa
  Clone ID: PAT_MRT4530_15612C.1.pep
MAVKDRFTENPGRLIVLTTSGSGVSDCPAAGFTAVQEGTAHCPLGVGVKP

SEQ ID NO: 111655 - protein, 318 aa, Oryza sativa
  Clone ID: PAT_MRT4530_15613C.1.pep
MAAALVFGWVEEGRGGYCDGTLGPQEAEPPSSHDTSRTIARTRQLLPWCTTIFSDVSLVERKANVYGLFDEEEEEEEEEAESLFYCVAPECRSGVEEDHQTHAAGHDTLLIRFLGGGGGGYLRVIGDEPWSWFVGGIESIPVEKGKGKLVPLRPPSGRRCKTCADVLVAAESALFCTFQCKARSGEVAGHRWAQDLLLDDFAVPCESHHSCAPGTFGSKNSRFTTGRVIDSDGRTVIRHVSDPDGGRCRGVCTICKGDVASADHACLRVSPQRCVAIIMGTLGSVCAYMVATMVASSWILTGLNAVQGSHNMAIRRGH

SEQ ID NO: 111656 - protein, 329 aa, Oryza sativa
  unsure (1)..(329): unsure at all Xaa locations
  Clone ID: PAT_MRT4530_15614C.1.pep
MERAEETPRAPSTAPSARVSIWESVRACGVWGKEVDKAELRRQVVMPLYARRAVAAAVKAKDEAVGVAAAAERGEEGEVEVEVEAAVTPVVVFVNSRSGGRHGPELKVRLHELISEEQVFDLSVVKPSDFINYGLGCLEKLAEQGDNCAETIRKKLRIMVAGGDGTVGWVLGCLTDLYRLKREPVPPTVLTKLLREAVKRYLSKAATAPTCSLDSWQAVVMMPDGEGKELPFAPKKRXSCRELHSDDGLLEIFGLKEGWHASFVMAELIKAKHIAQAAAIKFETRGGQRNRAYVQLDGEPWKQPLLQEQSTIIELNKVPYPSLMINGEQ

SEQ ID NO: 111657 - protein, 99 aa, Oryza sativa
  Clone ID: PAT_MRT4530_15615C.1.pep
MKTSTEEAGRGEDRATRRGEDEESIGVEALEDEEASASSHPALHPSPAAYAANAAAVRTRMRRKVEASTAGGGINHLWCEHIGKQGRELLLLHDVIRQR

SEQ ID NO: 111658 - protein, 118 aa, Oryza sativa
  Clone ID: PAT_MRT4530_15616C.1.pep
MSSGSATPRRISDCAATAVDADDAVAGGCKASPKPIATAYWSWRLNAIATAHEISLHRLSSPGGSCVAADEANGSCDEDEAMSARGGGGSCSWRGRGGGSCELVKLQLDLYLRESAAP

SEQ ID NO: 111659 - protein, 59 aa, Oryza sativa
  Clone ID: PAT_MRT4530_15617C.1.pep
YFVQNIFLMYCLSPSKSCILHFMNYSIDIQDPSMVNRITMEKLFPFQFFNNEFPFHLCL

SEQ ID NO: 111660 - protein, 113 aa, Oryza sativa
  unsure (1)..(113): unsure at all Xaa locations
  Clone ID: PAT_MRT4530_15618C.1.pep
MXLALSTSAAAAAAAAARALAARVTTTKGYAASAASXAIKRXAAAVERKGAAGITQAKDGSSSSAXKXVSWVPTXDXAXPASHFPXGPXPPNSAPPTSPXXXPRXARELPSRH

SEQ ID NO: 111661 - protein, 99 aa, Oryza sativa
  Clone ID: PAT_MRT4530_15619C.1.pep
RHVQTSFPAAHITNVEVSYRGKLLLGLVWFLLTLDTVGTFLHSFTRKSAIELFRVTWGVTAKNAHMCFNDLVLSYKAIYTDSSGGNCTICCVTYHERRY

SEQ ID NO: 111662 - protein, 1441 aa, Oryza sativa
  Clone ID: PAT_MRT4530_1561C.1.pep
MSNEVNQVGKAPMFNGTNYSTWKIKMSTHLKAMSFHIWSIVDVGFTITGTPLTEIDHRNLQLNAQAMNALFNSLSQEEFDRVSNLETAYEIWNKLAEIHEGTSKYKDAKLHFLKIQYETFSMLPHESVNDMYGRLNVIVNDLKGLGANYTDLEVAQKMLRALPEKYETLVTMLINSDMSRMTPASLLGKINTNDMYKLKKKEMEEASPSKKCIALQAEVEDKSKSKVNEVNKDLEEEMVLLARRFNDLLGRRKERGRGSNSNRRRNRRPNKTLSNLRCFECGEKGHFASKCPSKDDDGDNMFEELHAYSEKEIVKFKALKKDHASLEVLYEKLKTSHERLTIPHEKLNATCHIAHVASSNISTSCDDLMDMPSPSSSSSSCVSICDASLVVENNELKEQVAKLNKSLERCFKGKNTLDKILSEQRCILNKEGLGFIPKKGKKPSHSATRFVKSNGKYCSKCREVGHLVNYRTGGSHWVLDSGCTQHMTGDRAMFTTFEVGGNEQEKVTFGDNSKGKVIGLVAKTSLGWLWHRRLAHVGMNQLSKLSKRDLVVGLKDVKFEKDKLCSAYQAGKQVACSHPTKSIMSTSRPLELLHMDLFGPTTYKSIGGNSHCLVIVDDYSRYTWVFFLHDKSIVAELFKKFAKRAQNEFSCTLVKIRSDNGSEFKNTNIEDYCDDLGIKHELSATYSPQQNGVVERKNRTLIEMARTMLDEYGVSDSFWAEAVNTACYATNRLYLHRLLKKTSYELIVGRKPNVAYFRVFGCKCYIYRKGVRLTKFESWCDEGFLLGYASNSKAYRVYNKNKGIVEETANVQFDETNGSQEGHENLDDVGDEGLMRAMKHMSIGDVKLIEVEDKPSTSTQNEPSTSASPSQAQVEVEEEKAQDPPMPPRIHTALSKDHPIDQVLGDISKGVQTRSRVASICEHYSFVSCLEPKHVDEALCDPDWMNAMHEELNNFARNKVWTLVERPRDHNVIGTKWVFRNKQDENGLVVRNKARLVAQGFTQVEGLDFGETFAPVTRLEAIRIFLAFASCFDIKLFQMDVKSAFLNGEIAELVFVEQPPGFEDPKYPNHVYKLSKAFYGLKQAPRAWYERLKDFLLSKDFKIGKVDTTLFTKIIGDDFFVCQIYVDDIIFGSTNEVFCKEFGDMMSREFEMSMIGELSFFLGLQIKQLKDGTFVSQTKYIKDLLKRFGLEDAKPTKTPMATNRHLDLDEGGKPVDLKLYCSMIGSLLYLTASRPDIMFSVYMCARFQATPKECHLVAVKRIPRYLKHSSTIGLWYPKCAKFKLVGYFDSDYAGCKVDRKSTSDSCQMLGRSLVSWSSKKQNSVALSTAEAEYVSAGSCCAQLLWMKQTLLDYGISFTKTPLLCDNDSAIKIANNPVQHSRTKHIDIRHHFLRDHVDKCDIVISHIRTENQLADIFTKPLDETRFCKLRNELNVIDFSNVA

SEQ ID NO: 111663 - protein, 51 aa, Oryza sativa
  unsure (1)..(51): unsure at all Xaa locations
  Clone ID: PAT_MRT4530_15620C.1.pep
HASAENDVVQVTELLMNELLKLDAVVADGDVKAQRRXQVXLATAAGPISTD

SEQ ID NO: 111664 - protein, 87 aa, Oryza sativa
  Clone ID: PAT_MRT4530_15621C.1.pep
IGVGRNHRRFLTILHHPIGATHTESIYLPTPRGGSFRGCSRKWEGGVVFLSRLIFPYQTLHRKNTGAGLMGFYHLMMGLICPVSGLN

SEQ ID NO: 111665 - protein, 179 aa, Oryza sativa
  Clone ID: PAT_MRT4530_15622C.1.pep
MASSPTMLVVICSSLAMAVILSSSSPAMAQLDVGFYSKTCPKVEEIVREEMIRILAVAPTLAGPLLRLHFHDCFVRGCDGSVLIDSTASNTAEKDAPPNQTLRGFGSVQRIKARLDAACPGTVSCADVLALMARDAVALSGGPRWPVPLGRRDGRVSAANDTATQLPPPTGNITQLARM

SEQ ID NO: 111666 - protein, 142 aa, Oryza sativa
  Clone ID: PAT_MRT4530_15623C.1.pep
MATAGQHGGGRKQQRLCGGRRGQRQPGRKAKAEDGGDRAAGDGGQRRLGRTIEAEDGGSCTTGDEGSGDRVAWLMRKTVAARPRGGGKRRRWLQQGQRRQLATEAGNIAAKGMADAGVGEEKRPRKAGPTVSSSGACSPTTN

SEQ ID NO: 111667 - protein, 709 aa, Oryza sativa
  Clone ID: PAT_MRT4530_15624C.1.pep
MALFAAARRAATSTLPLLRPLAAAAARPQPRSMPFSSSAPLTKPAFDSELVRIIDNAINDAEEESDGDQDRVSMDSLESDDEPEPATAKVKCEKRWTSDESEYEEIQVPSKSSIPLTVTISKGDGQILEFSCTAHPEEIVIDTLSLMQPPEDDNNEMIADEGPDFDDLDESLQKALNKYLELRGITPMAAKFLQEYMIYKENEEYLLWLRKLKDFSSSIQNELFVVWACFLLLLLGSADTMTAFSFNDSSQQTRSMMNQTLHVVYLLFLILYYKGQLRGTFLVSLFLLWENQVVYEYMKYEPLNSAGIQGGSSEYIYLVDGEEVEKVDNGEVIKVSYKVPETVDVEKCPQVRLRFAADHVGHINFPLQYDKCRDFVVKGLLANDEDLGRAFRVIEAELGFLFDFFYARYPSIKDTLAPDLAVNAANNILIHGFNLDLLVTRLVIVWYIFLESYQFLAFIFSDWHKGTIGQYFILDNIQPHWVKTFLSWFSLEAQALDSSLMTRSVRLMPVVLRELNNCDGKITDGRMWMYRTGIIDLNLDRDVLHAWTPLLVAFQPELVPDSTYTSTSMARGTLQNACDFLAKCESASDKYDKLMDLGRLDHTEHNVRFLSEGARIAVYLVERIEDAGKRWKVLAAFWANMMLYIAPSDRAVAHATRMATGGEFVTIIWALLSHAHVVDKLQHRGGAPGLPILLEEEEDKRAQAGPALI

SEQ ID NO: 111668 - protein, 109 aa, Oryza sativa
  Clone ID: PAT_MRT4530_15625C.1.pep
MRPVIPSGLQERPASANSSSRVYEASISAPWRRIQTPPSIPNHRVGRRPPADSRGDRKCLSSPSEVWTPRRLGGAVPSCQPAHRWVIDSTFCIEDYSQMNTVTIKFLKC

SEQ ID NO: 111669 - protein, 153 aa, Oryza sativa
  Clone ID: PAT_MRT4530_15626C.1.pep
MAPTKKAVRFLIDCASLPLLVALSRCASHHFVAMFLLVSDWWVVAMMQKKSTDNINNKLQLVMKSGKYTLGYKTVLKTLRNSKGKLIILANNCPPLRKSEIEYYAMLGKVSVHHFHGNNVDLGTACGKYYRVCCLSIIDPGDSDIINTTPASQ

SEQ ID NO: 111670 - protein, 328 aa, Oryza sativa
  Clone ID: PAT_MRT4530_15627C.1.pep
MCLPFSSCFGGKNELDFGETSRDPDYHPLSTTPSGNSYQGGDATETRYAYQQQRKPAAAPSTDGSAKAPPLAAAGWSNNKELCFVSRCRRVFAVAGELPSYFVLFVLNQVQILHYAPDFDELPTRVPEANFCAVSNRYRCCGCKNLKALANFSKFRMPRPPEAVGRGSLDVFRPVRRNTCCEAYPRQDYFAGVKLVKLPVTSIVRDGSAQFPVVRAEHTTVEALQQSSMCFKLGTCFGVGVGGGDDYYRGYTTVATDETGRKANNDVARKPVTAAAAATRDVYGRAADQPSPKPPAAARNSKVADDTGVKQPADAAAPVISRDPGHVD

SEQ ID NO: 111671 - protein, 403 aa, Oryza sativa
  unsure (1)..(403): unsure at all Xaa locations
  Clone ID: PAT_MRT4530_15628C.1.pep
TRHRSAVPSGASTGIYEALERRDGDGAAYGGKGVLNAVRNINEVIAPKLVGVDVRNQSDVDAIMLDIDGXRPNKSKLGANAILGVSLSVCRAGAGAKEVPLYKHIQELGGAEELVMPVPAFNVINGGSHAGDNLAMQEFMLLPVGASSFSEALRMGSEVYHALKGIIKAKYGQDACNVGDEGGFAPNVQDNREGLVLLMDAIEKAGYSGKIKIGMDVAASEFLTKDGSYDLNFKNQPNDGAYVISAQHLCDRVRPRVRDFPIVSIEDPFDQDDWSSWASLQSSVNIQIVGDDLLVTNPKRIAEAIGKKACNALLLKVNQIGTVTESIQAALDSKAAGWGVMVSHRSGETEDNFIADLAVGLASGQIKTGAPCRSERLAKYNQLLRIEMELGNVRYAGEAFRSP

SEQ ID NO: 111672 - protein, 64 aa, Oryza sativa
  Clone ID: PAT_MRT4530_15629C.1.pep
MPARSVLRCRCLSLAWAAALSSDAFVGHHLCLSNLRRHGPKLCIPPSSLTILLEYSLNVETGYE

SEQ ID NO: 111673 - protein, 1368 aa, Oryza sativa
  Clone ID: PAT_MRT4530_1562C.1.pep
MSNEVNHVGKAPMFNGTNYSTWKIKISTHLKAMSFHIWSIVDVDFAITGTPLTEIDHRNLQLNAQAMNALFNSLSQEEFDRVSNLETAYEIWNKLAEIHEGTSEYKDAKLHFLKIQYETFSMLPHERAWGNYTDLEVAQKMLRALSEKYETLVTMLINSDMSRMTSTSLLGKINTNDMYKLKKKEMEEASPSKKCIALQAEVEDKSKSKVNEVNEDLEEEMGHFASKCPSKDDDGDKSSKKKSGGYKLMKKLKKEGKKIEAFIGEWDSNEECSASSGSEEEGGDDASSKKKKMIVVAIKEAPSLFAPLYLMAKGSSKVTSLSDSESDDDCDDVSYDELVSMFEELHAYSEKEIVKFKALKKDHASLEVLYEELKTSHERLTISHEKLKEAHDNLLSTTQHGAHIDVGISCDLLDDSATCHITHVASSSISTSCDYLMDMPSPCSSSSSCVSICDASLVVENNELKEQVAKLNKSLERCFKGNNTLDKIMSEQRCILNKEGLGFIPKKDKKPSHHATRFVKRNGKYCSKCREVGHLVSDCPGGYASNSKAYRVYNKNKGIVEETADVQFDETNGSQEGHENLDDVGDEGLMRAMKNMSIGDVKPIEVEDKPSTSTQEEPSTSASSSQAQVEVEEEKAQDPPMPPRIHTALSKDHPIDQVLGDISKDEALCDPDWMNAMHEELNNFARNKLWTLVERPRDHNVIGTKWIFRNKQDENGLMVRNKARLVAQGFTQVEGLDFGETFAPVARLEAIRILLAFASCFDIKLFQMDVKSAFLNGEIAELVFVEQPPGFEDPKNPNHVYKLSKALYGLKQAPRAWEFEMSMIGELSFFLGLQIKQLKDGTFVSQTKYIKDLLKRFGLEDAKPIKTPMATNGHLDLDEGAMPPRTRHGRRAPTPDPVSENEESSGDEYVQSDEDNMENVEGDEMEVSDDGDDNESANGEDDEASDDGSPLDSSIQFVLNLRNAQQYTILRHHDQFRRPNDCNDPRFHTRFQKSVYVQVYANKAFAEHKWISWRHIGETPEFENLQEMFRTIGIDRIVTMKQPFDEDLIRQFYATVWVSGDCDAMKWMSGTLRCSINRREFKELLHIRFNNGDDLHDEHTHNLFPIDHFSQFYEEGGRHTYGKVAGLRALPSVINRIVRATILPRYGNNDDIRGVAWHVIDAIMDGRRFDVINLMMKEIAISKGTIGQGIYYAPYIMSPPPPQGYDPSTLFHPQYAYFGMQPNDFFNPVLGAINTLSESIQRLSTGHEALREDVRGLRTDVGNLNTSTGLLEAEMMLLGMADTEPTEPYQESSAFASIVELLVEELPGDLSEKIVEEARRRFVSGLEFTTFGVKEELPRVIEAWVVLSVGRLPPCPPLDEGGVRWLRS

SEQ ID NO: 111674 - protein, 44 aa, Oryza sativa
  Clone ID: PAT_MRT4530_15630C.1.pep
FKKCREALMSPQTETKASVEFKAGVKAYKVTYYAATSVATEYDI

SEQ ID NO: 111675 - protein, 95 aa, Oryza sativa
  Clone ID: PAT_MRT4530_15631C.1.pep
LSFRNDPLKHIDLHHAVFSGRTVVGNHSAVAGAAPAAPQGAVQWQTIDMAQLVVDSGFPTRMGFLAPYPHVRYHRDQLAVEGAPPPVGREETFNH

SEQ ID NO: 111676 - protein, 113 aa, Oryza sativa
  Clone ID: PAT_MRT4530_15632C.1.pep
MLQRIGARMVTPCLAMVVAALVEARRLRVARDAGLVDRPDTATACLAMVVAVLVEARRLHVARDAAAHLLCRTPPPLLSSAVPCRCSPPSPHPAARLHCSLSLACLRRVSERE

SEQ ID NO: 111677 - protein, 41 aa, Oryza sativa
  Clone ID: PAT_MRT4530_15633C.1.pep
KFQIKAATDLVSFRGILKFKPGKLWSEVVSLKGCEFPQVAS

SEQ ID NO: 111678 - protein, 160 aa, Oryza sativa
  Clone ID: PAT_MRT4530_15634C.1.pep
ARTFGSTNLLTGTPPPSIRQKSSTTSACRPACASATIAALALFPPPSRGGASTGRPRWPAPHVRDISSSRLSAAETVATLLSGILSNSVGGFTGPGLCAAVGVRGTVSSFCRVAAEAATHRRKWWRRRRRRTPHWRWVGRGVEVGGGGGGGRGCDKGAGA

SEQ ID NO: 111679 - protein, 77 aa, Oryza sativa
  Clone ID: PAT_MRT4530_15635C.1.pep
MSVFVIIIGCYTAIDWITDIVIFINILSSLFNIALFYCSTAEGECESGSSGSATVLGKVAAGREGDGEEHRSIAARP

SEQ ID NO: 111680 - protein, 74 aa, Oryza sativa
  Clone ID: PAT_MRT4530_15636C.1.pep
SVPSSQSDSSVQICTVRGRSSSASFKHSHPHGLCNLCARLMSFKCSSGPNPYPMVSSRGSFRSCPAVIIVVISH

SEQ ID NO: 111681 - protein, 468 aa, Oryza sativa
  Clone ID: PAT_MRT4530_15637C.1.pep
MISKNIEDLRDKELQPQLEELIGSGNTKVLIRSESQFQAALLLQVELNTLYSTFLKWIAYHRSYLHSLNSWLLKCVKPLRGKKSSRRKKEADTPITKFAVAPMFKTCESWIKLLDDLPTKDLEDAIKGLVADINHSVPRQEKRRDVSLKKYMELAVDINKAKEQYENVKLKNMGKNTLPYPSRRANGRGHPTASRQISLLLLLVLGGSGGVAGRGSQNAMDLWNKLRSLDAYPKVNEDFYSRTLSGGLITIASSLAILLLFLSEIRLYLYSATDSKLTVDTSRGERLHINFDVTFPALPCSLVAVDTMDVSGEQHYDIAYWHEGIGIMVVKYAVKDNSDDQCCNSCEDVRDAYRKKGWALTNIEEIDQISHKINKLSFGVEFPGVVNPLDGVEWIQEHTNGLTGMYQYFVKVVPTIYTDIRGRKINSNQFSVTEHFREAIGYPRPPPGVYFFYEFSPIKVKNGYTDFM

SEQ ID NO: 111682 - protein, 93 aa, Oryza sativa
  unsure (1)..(93): unsure at all Xaa locations
  Clone ID: PAT_MRT4530_15638C.1.pep
XILXGQXXXLXXXXIGDXLGXRXXXPFFLREWEETXRLXPXPPPGVVARXVXRGTRAXRRGRSWRTAARRRTXGRXXGXGDGXXXLXRILSPS

SEQ ID NO: 111683 - protein, 120 aa, Oryza sativa
  unsure (1)..(120): unsure at all Xaa locations
  Clone ID: PAT_MRT4530_15639C.1.pep
LMIDSDSDGFLDTVPCEADSHIRRGANKGQQTRSQPGDLDDGXGDIEYRTYVPDPGYDNLXPHGVLKGMYMXSVTXKSVIENMLMRYDPDVIGVERDLDEDEEAELTGHGGMTFLYGQLY

SEQ ID NO: 111684 - protein, 747 aa, Oryza sativa
  Clone ID: PAT_MRT4530_1563C.1.pep
MKKLKKEGKKIEAFIREWDSNEESSASSGSEEEGGDDASSKKKKMVVVAIKEAPSLFAPICLMAKGSSKNNELEEQVAKLNKSLERCFKGKNTLNMILSEQRCILNKEGLGFIPKKGRLMMVALLLDMWVPLYSVVNYRTGGSHWVLDSGCTQHMTGYASNSKTYRVYNKNKGIVEETADVQFDETNGSQEGHENLDDVGDEGLMRAMKNMSIGDVKPIEVEDKPSTSTQDEPSTSATPNEALCDPDWMNAMHEELNNFARNKVWTLVERPRDHNVIGTKWVFRNKQDENGLVVRNKAREFEMSMIGELSFFLGLQIKQLKDGTFVSQTKYIKDTQEGAWRSDRCYMSGLTGQMRRSDRPRRSDHGSAAVLTGVCAQSNRLAAVGLTGHQRAGLVRRLVEMMTVEVERIEDEGRKVFAEHKWISWRDINETPEFEGLQDLFKTVGIDRIVTLKQDYNEDLIRQFYATVWVAGDYNGVRYTHGKLAGLRTIPSVVNRIVRATILPRLGNNDDIRGVAWHVIDAIIQGRQFDIVSLMMQEIAISKETFTQGIYYAPYIMRLIQDKLGAAGQNLKKHKQYKPRLQLGAPRAPRAAPSSHPRASSSSAPLPPPWYDPNAFFHPQYAYFGMQPNEHFNPVLGAINTLSESIQRLSTGHEALHEDVRGLRTDVGDLNASMGRLHTRVGWSDRRHMRGQTGPLEARMVLLGMANTEPTEPGVAGDLSEKIVEEARRRFVSGLEFTTFGVKEELP

SEQ ID NO: 111685 - protein, 107 aa, Oryza sativa
  Clone ID: PAT_MRT4530_15640C.1.pep
MLSCPPPPRRRCRRRRAPSGPPDTAAAAPRGSRRPPPSPETSAPPRRRSSSRAPSPSSRPSSAAAGGGTGRRSRRSRAAGGRGAPAAGRPAAGRSPRPPTATGGRHA

SEQ ID NO: 111686 - protein, 34 aa, Oryza sativa
  Clone ID: PAT_MRT4530_15641C.1.pep
MFGSQKAQMKSQIQIARNHLRTEQDVQGRTLSSS

SEQ ID NO: 111687 - protein, 58 aa, Oryza sativa
  Clone ID: PAT_MRT4530_15642C.1.pep
MLLAVVLTAAVALALVNAVNSHDFAAHLAGVDCRMGLAGPARCPASGFMELLMPALHD

SEQ ID NO: 111688 - protein, 92 aa, Oryza sativa
  Clone ID: PAT_MRT4530_15643C.1.pep
AHDHWFCPHPNFCSTLLGVMFRCCAVGNVSRTYSIDYALVELRFFGQTVSIADDVCVPGLTLCKTIICSRLEIFYPIRVNKKPVSFTQRPLA

SEQ ID NO: 111689 - protein, 84 aa, Oryza sativa
  unsure (1)..(84): unsure at all Xaa locations
  Clone ID: PAT_MRT4530_15644C.1.pep
SCPKVGRPNCGYDHHGRPLELIQLLFSVLCIRCETCARFFVLRVFFFWVCVCDRYVXLHIHAPFGLLLQIMSHLNXVYHVISVG

SEQ ID NO: 111690 - protein, 135 aa, Oryza sativa
  Clone ID: PAT_MRT4530_15645C.1.pep
MAEKEEGKVAAEGGAEAEADEEVEVKFRLFDGSDIGPLRCNAVATTVAALKDRVVADWPKDKTIVPKTANDVKLISGGKILENDKNIAQCRAPFGDLPSTAITMHVVVQPSSAKSKPDKKTNKLPKTTRCSCTIL

SEQ ID NO: 111691 - protein, 133 aa, Oryza sativa
  unsure (1)..(133): unsure at all Xaa locations
  Clone ID: PAT_MRT4530_15646C.1.pep
SKVHHRSLNLYRCVIPVPKLTNRPFRSSNLFDCVIQVPKLTDHSFMSSNLLSCVTPVPRLGFEYYLGXIGRDRGDTTKQVGETKGVIYKFRDRDDTIEQRRELPSIYYQLSEIGSNIRSDYFSLHLFELVYPP

SEQ ID NO: 111692 - protein, 102 aa, Oryza sativa
  Clone ID: PAT_MRT4530_15647C.1.pep
PPPFYLSSLSGPLDSSPFEGTSAPAVPLKEGPGNSFASNIAMGGTSIYMPAIPFWAQEDKDFVNGALAAGKIGRPPSFQGVASLELLQKRMCGGPAFFGSTS

SEQ ID NO: 111693 - protein, 63 aa, Oryza sativa
  Clone ID: PAT_MRT4530_15648C.1.pep
PSTKDVWSLALAGRAHPSTCSSASNPGGSSSPNAKQPHPSNLGGGKIPGPGSLPASIGGVRRF

SEQ ID NO: 111694 - protein, 305 aa, Oryza sativa
  Clone ID: PAT_MRT4530_15649C.1.pep
MPSSANGHGNSSTRSTSAIVVDRVTGHHLFKIDGYSFTKETPTGTPIASGEFTVGGYRWRIEYYPNGRGKKSADYIPLYLSLDKNTSGEVKVKYQIELADRVKKKKKQPSLISKPFMRRRKFEKSKYLRDDCFTIRCDIVVMREIRTEEATFVSVPPSDLKQQLGDLLETGKGADVVFEVGGGETFAAHRFFGSMKESDAAAGGVVRIEEMEAQVFKLLLRFVYTDSLPKMKEEDVMCQHLLVAADRYNLKRLKLICEKKLCKYIGVGTVASILALADQHYCDGLKKACFNFLGSSENPPVASII

SEQ ID NO: 111695 - protein, 229 aa, Oryza sativa
  Clone ID: PAT_MRT4530_1564C.1.pep
LQSVIPLSQQLEYFKEYIEKLKQAKGEDVANEIITEALYVFSIGTNDFIINYFNLPLRRAVYTTAEYTAYLVGEAAAAVRDTHELGAHKIIFAGLAPIGCLPSARTLNHDAPGECNEEHSQVAVAFNTALTEAIGKLNDELTGLRVVYSDTYSVLSAILSNPSYYGFVNIAQGCCGTGLIETSVLCGFNDHLTCQDANSYVFFDSVHPSERTYQIIANKIINTDLKLVL

SEQ ID NO: 111696 - protein, 195 aa, Oryza sativa
  unsure (1)..(195): unsure at all Xaa locations
  Clone ID: PAT_MRT4530_15650C.1.pep
DSPWRGALSLFPADDAHGDGVDLATRGSCRLLTMGDGHVRCRFQAEVRGFSLMSGQHIIIVRRRTHDLFSGGLARRATPRQKAADRLAXRSVKAGEDERRRGLSWRDCAICLDAXSAAREGDCRRRDTRFHSELAIXNRWLGVHGSCPVCRRELPPADXKQPPEEQQNGGAXTAGERRRPRSVLVSYVVLGDAPL

SEQ ID NO: 111697 - protein, 132 aa, Oryza sativa
  unsure (1)..(132): unsure at all Xaa locations
  Clone ID: PAT_MRT4530_15651C.1.pep
YDEKCDRFFANWGVXHLRFFRLCNYCQEXIPTEAMYSLANSRXSRAKRRRWEGEGGSSGREEDGLANLNISQCTALTPPAVQAVCDSFPALHTCPGRHSLIISGCLSLTSVHCACALHPHRAGRTMVPSHAY

SEQ ID NO: 111698 - protein, 296 aa, Oryza sativa
  Clone ID: PAT_MRT4530_15652C.1.pep
MTARRARTAWDGSRQFHKMVLLQKRSQDGIGRSNIMEAEGILKDLIDDKVNNVDAELHVLQEEHEKDLLEHDTSSSLLPLHPAQFPRILILLQEQRRKEMERQDGDAEGSGRGEHRSRGCRSPAETKTDRSPGIPRVLEVGFATVREHHGTKSTTGPQKSNNLQNKKIKSREDGREPEAAELRRGERRRDHEVVFAAAARDPPTLQRPDFDCVRQNKHPNANTENEMTGGDLEKASGSLLDQSKQPLNIKRDRRRLEEVSDKMWKDEAKEIGSRSPALTKGSTKESQMLQSLGKYI

SEQ ID NO: 111699 - protein, 54 aa, Oryza sativa
  unsure (1)..(54): unsure at all Xaa locations
  Clone ID: PAT_MRT4530_15653C.1.pep
FHGRXNXFTGLKSMRRQYPNQSYTEFQILYIPSEHLMGSRNLNGTTGAKVSAVL

SEQ ID NO: 111700 - protein, 170 aa, Oryza sativa
  Clone ID: PAT_MRT4530_15654C.1.pep
MRPASSPVPAVLTAPATAATAAIAVKPTPPQRALQASRRELVVAAGGVAAAAVALWPCGGAARAASDDEYVSETKDVIGKVRSTINMDRADPGVADAVAELRELSNSWVAKYRREKSLLGRPSFREMYSALNAVSGHYISFGPTAPIPNKRRARILEEMDTAEKALLRGR

SEQ ID NO: 111701 - protein, 514 aa, Oryza sativa
  unsure (1)..(514): unsure at all Xaa locations
  Clone ID: PAT_MRT4530_15655C.1.pep
HHEARQQQHRHERHVVARPHVRPRPPHAGLPLRTPRLRRRRGGGGARGLDHVLPGAGGLRRRWRGRLRRGRRRRGRLLLPLVLPSLPLLLLLLLRRELDDDGHPPFPLRLHDRTSTCSPPPPPPPSPGAPPPPAPPPPPPPPPXSSSSPPAPPPCPVFPLRPSRPPXSPPPSASPAYGSDEMAAPXGGASPPWGARSSRRPPRPRGCSPRRRPTPSPTRSWPSTRTPCMSPAAPPPPPPARTLPAPPXADPPGRGGXPRRRATGTRAAPPFACTRRSPAGRGCWSPRPPPGGSPTPAPPPPPPPPRGAPRAAPAASAAPAASAAGRAPRAPRPSPRPRPPPPPPSARASSSPRHSATPAPAHXPRPHSPGPGRPPPTRAPSSPWPPPRTGAAPRGPGTPAPSSSWPPPAGTPAALRWAAPASAPGTACSAAGRARGSSPPPPQHRHHHPSPPPPPPAARXGRDGPEPRHXSRWPSRPCPPAAPWPPPPPPPPRRTRRPPHPPSAWTPTLIILRW

SEQ ID NO: 111702 - protein, 293 aa, Oryza sativa
  Clone ID: PAT_MRT4530_15656C.1.pep
MRARVMMPNWPRPPIKDGEEEVGVGGGKKRENRERRENDIFKDVDGKAAAPEAKKKKQGGGGGGGKKENPYASRGLDKFSTVLSELESRREKILRQSEGKGWVPIVVKLPPEEEEQQQRKGGKNKRKQQAAATSATSSQSSTPPTSEPASPREDVIKPARPAAAAAAAEPGSAKRKAGVRWSWSDVRPRHYMPFVAVLLLASLVVFGKVFAICCTSVWWYLVPILTASSNGAGGAGGAHGVRRSKAAVKVLGKKASDKKMAVTPLLGPSHGKRGSSGVHELISPRSHPHGKKG

SEQ ID NO: 111703 - protein, 66 aa, Oryza sativa
  Clone ID: PAT_MRT4530_15657C.1.pep
MAIQQDTRQAPVAAILPPDKLGRDAVPQYMIYGFKQVSPRFQRFNWSYIWGSSWCTTLKDYERRPD

SEQ ID NO: 111704 - protein, 289 aa, Oryza sativa
  Clone ID: PAT_MRT4530_15658C.1.pep
MLFCGTGSFKDVDGKAAAPEAKKKKQGGGGGGGKKENPYASRGLDKFSTVLSELESRREKILRQVGGAGGGGAPGEGGGGGGGEHVLVRFVQSEGKGWVPIVVKLPPEEEEQQQRKGGKNKRKQQAAATSATSSQSSTPPTSEPASPREDVIKPARPAAAAAAAEPGSAKRKAGVRWSWSDVRPRHYMPFVAVLLLASLVVFGKVFAICCTSVWWYLVPILTASSNGAGGAGGAHGVRRSKAAVKVLGKKASDKKMAVTPLLGPSHGKRGSSGVHELISPRSHPHGKKG

SEQ ID NO: 111705 - protein, 343 aa, Oryza sativa
  Clone ID: PAT_MRT4530_15659C.1.pep
MAMVQPVDMAVKANEIMARFRPIAPKPVLPAAAAGVTGGGDGAAAVAATNRVLCQLQSRPCRARKRGRPSVVPPVSPPAGAKRKRAPAYPVPVAPLRCAAVATATRARVSVVVVPAPESAGGVSALAPVSPSAGDSTRLSPTVVEVEDEDEERGVVLVERDLLRKLLEPRKLLEPRAVRPVGSTIHVESVHIDVGRTTAAAAAAAPKTAEEVEAELESDSLPAVVSDSSNRVRLVNDAYKRMVGQPECPWLDAVATAASRRISGEVALVVSEPAAAAAALPETCKGFSCSAKIAWERDGKWSSVHAPCDVTRLQCESRDYVFAWRFRAAGDECNTHRRAAGDA

SEQ ID NO: 111706 - protein, 1614 aa, Oryza sativa
  unsure (1)..(1614): unsure at all Xaa locations
  Clone ID: PAT_MRT4530_1565C.1.pep
MSNEVNHVGKAPMFNGTNYSTWKIKMSTHLKAMSFHIWSIVDVGFAITDTPLTEIDHRNLQLNAQAMNALFNSLSQEEFNRVSNLETAYEIWNKLAEIHEGTSEYKDTKLHFLKIQYETFSMLPHESVNDMYGRLNVIVNDLKGLGANYTDLEVAQKMLRALPEKYETLVTMLINCDMSRMTPASLLGKINTNDMYKLKKKEMEEASPSKKCIALQAEVEDKSKSKVNEVNEDLEEEMVLLARKFNDLLGRRMERGRDSNSNRRRNRRPNKTLSNLRCFECGEKGHFASKCPSKDDDGDKSSKKKSGGYKLMKKLKKEGKKIEAFIGEWDSNEESSTSSGSEEEGGDDASSKKKKMAVVAIKEAPSLFAPLCLMAKXSSKVTSLSDSESDDDCDDVSYDELVSIFEELHAYSEKEIVKFKALKKDHASLEVLYEELKTSHERLTISHEKLNSSSSSCISICDASLVVENNELKEQVAKLNKSLERCFKGKNTLDKILSEQRCILNKEGLGFIPNKGKKPSHRATRFVKSNGKYCSKCREVGHLVNYRTDGSHWVLDSGCTQHMTGDRAMFTTFEVGGKEQEKVTFGDNSKGKVIGLVAKTSLGWLWHRRLAHVGMNQLSKLSKRDLVVVLKDVKFEKDKLCSACQAGKQVACSHPTKSIISTSRPLELLHMILFGPPTYKSIGGNSHWLVIVDDYSRYTWEFFLHDKSIVAELFKKFAKRAQNEFSCTLVKIRSDNGSEFKNTNIEDYCDDLGIKHELSATYSPQQNGVVERKNRTLIEMARTMLNEYGYASNSKAYRVYNKNKGIVXETADVQFDETNGSXEGHENLDDVGDEGLMRAMKNMSIGDVKPIEVEDKPSTSTQDEPSTSATPSQAQVEVEEEKAQDPPMPPRIHTALSKDHPIDQVLGDISKGVQTRSRVASICEHYLFVSCLEPKHVDEALCDPDWMNAMHEELNNFARNKVWTLVDRPRDHNVIGTKWVFRIKQDENGLVVRNKARLVAQGFTQXEGLDFGETFAPVARLEAIRILLTFASCFDIKLFQMDVKSAFLNGEIAELVFVXQPPGFEDPKNPNHVYKLSKVLYGLKQAPRAWYERLRDFLLSKDFKIGKVDTTLFTKIIGDDFFLCQIYVDDIIFGSTNEVFCKEFGDMMFREFEMSMIGELSFFLGLQIKQLKNGTFVSQTKYIKDLLKRFGLEDAKPIKTPMATNGHLDLDEGGKPVDLKLYRSMIGSLLYLTASRPDIMFSVCMCAWFQAAPKECHLVAVKRILRYLKHSSTIGLWYPKGEARGVLRFAPIEGSFLXCLPALAMIVVHPLRIPXVSLRNRAEMSTLKGDSEEESGDDVSRSGEDEDEGSDDXMHIDPSIQFVVNMRNPSQYTILRHHDQFLRPRDTPDPRFHTAFQKSVYEQVYAGKAFAEHKGISWRDINXPEFEGLQDLFKTVSIDRIVTLKQDYNEDLIRQFYATFYEDGVRYTHGKVAGLRTIPSVVNRIVRATILPRLGNNDDIMGADWHVIDAIIQGRQFDIVSLMMQEIAISKGTFTXGIYYAPYIMRLIQDKLGAAGQNLKKHKQYKPRLXLGAPRAPRAAPSSHPGASSSSAPPPPPGYYPNAFILPLHLFTGS

SEQ ID NO: 111707 - protein, 66 aa, Oryza sativa
  Clone ID: PAT_MRT4530_15660C.1.pep
SSQLFTVEIQADNLMRNEGDFQHMVLKAESLDPSYPFQKETEILVTLQSGYVFVQTDKPIYTPNQD

SEQ ID NO: 111708 - protein, 444 aa, Oryza sativa
  Clone ID: PAT_MRT4530_15661C.1.pep
MPRPPEPVHVLLLAAIAVQVFVRCTAQAASDQKPLVSRLAKDYNTSLYTISVKNGAPPLVVDLAGALVWSTCPSTHSTVPCQSAACDAVNRQQPRRCRYVDGGWFWAGREPGSRCACTAHPFNPVTGECSTGDLTTFTMSANTTNGTDLLYPESFTAVGACAPERLLASPSLPQAAAGVAGFSGTTPLSLPSQLAAQRRFGSTFALCLPVFATFGDTPVYLPNYNPYGPFDYTKMLRRTPFLTNPRRNGGYYLPVKRISVSWRGPGDVPVSLPAGALDLNARTGRGGVVLSTTTPYAIMRTDVFRAFGKAFDTVVTRGTESRMARVARQKQFELCYGGAGDTMLSFPMMKRTGFDAPAITLELDAGATGNWTILNGNYLVRETCVGVVEMGPEGMPVDGEPAVVLGGMQLENIRMVFDLDKRTLGFSRLLEWDLTNCYSSASFL

SEQ ID NO: 111709 - protein, 56 aa, Oryza sativa
  Clone ID: PAT_MRT4530_15662C.1.pep
ETSASSSWRSELSNVYIWYASYGSNMWKPRLNCYIAGGKVDGMQKLYSGSVNKALA

SEQ ID NO: 111710 - protein, 93 aa, Oryza sativa
  Clone ID: PAT_MRT4530_15663C.1.pep
MDPEARMRRFPPAGAILLLRQGTRRGARMRRPRRDRSPKREHNTNAQADTAPAAAAEALASLREVNPRRLLPLLLLCGEETRAHWRRRRRDAH

SEQ ID NO: 111711 - protein, 71 aa, Oryza sativa
  Clone ID: PAT_MRT4530_15664C.1.pep
MWPGCYGKYVGVHDGGGSGRSTLVRSQTDPALHTKIWPCSDGCSGGCADAVIGDDEGAMWHNVGGTAAARA

SEQ ID NO: 111712 - protein, 282 aa, Oryza sativa
  Clone ID: PAT_MRT4530_15665C.1.pep
MATTTTTPSSSLTAPLLRPSSNANPAPRSLPLLRSRRCARAVATAAAAAGHGAAHQRSGIWSIRDDLVVPRSPYFPVEYASGQERGPSPMVMERFQSVVSQLFQHRIIRCGGPVEDDMANIIVAQLLYLDAIDPNKDIIMYVNSPGGSVTAGMAIFDTMKHIRPDVSTVCIGLAASMGAFLLSAGTKGKRYSLPNSRIMIHQPLGGAQGQETDLEIQANEMLHHKANLNGYLAYHTGQPLDKINVDTDRDYFMSAKEAKEYGLIDGVIMNPLKALQPLPASS

SEQ ID NO: 111713 - protein, 107 aa, Oryza sativa
  Clone ID: PAT_MRT4530_15666C.1.pep
MAPVQEQDKQLVVDLVSTAVDQLARMCSTGEPLHRQRGAEMMAVEEHARMFRCEILMASMDYQGTAIKYLIIAHTRKPSRRSNGKYLVDAIKSQNHETMDHQKDAKD

SEQ ID NO: 111714 - protein, 80 aa, Oryza sativa
  unsure (1)..(80): unsure at all Xaa locations
  Clone ID: PAT_MRT4530_15667C.1.pep
KGIGAAIFIHVHFPPQGHPSYHQHQQPTKQTNPSSPHFAPDISKAGPVASSRCDTLSGXDTTGAQVSRACAHPSMPSSLW

SEQ ID NO: 111715 - protein, 355 aa, Oryza sativa
  Clone ID: PAT_MRT4530_15668C.1.pep
MGLDVGEIGVGAADLSLDLKMFAAKSFGRVRGKDTTTTAMGDCIRRLEEEMGKIEVFRRELPLCVRLLADVIDVMKEEVEKKGGDRKEDEEDAAGDKSNWMSTAQLWTGNSGGPDAAAADPEKQDKVRISSEAKSNGGAFVGSGAPAFARPKQSLMRKEDMAYDVRMPDLSLLSPPASAAAADESRRQVVGFSQAAARAAAMAASGPALSLQPQPQPAAAQQQQQARKTRRCWSPDLHRKFVAALQQLGGPQVATPKQIRELMKVDGLTNDEVKSHLQKYRLHNRPRVPSSTIVNQPIVLMQGLCYIPQEQSSSQSGSPEGPLHFSGSGMAGGGSSAATVSCEEEDGRSESYGWK

SEQ ID NO: 111716 - protein, 51 aa, Oryza sativa
  Clone ID: PAT_MRT4530_15669C.1.pep
VSLLCSAKIPCPGVPLNDIKVGYFGPNNKTMAVCKNAKGPAPGCPKGLLGF

SEQ ID NO: 111717 - protein, 481 aa, Oryza sativa
  Clone ID: PAT_MRT4530_1566C.1.pep
GGIGKTTLAKNIFNDDAIQEKFDKKIWLSVTQKFNEPDLLRSAIIATGGDHRSSHDRSVLELSLLNAIKGKNFILVLDDMWTERAWNDFLQIPFSHGGRGSRVIVTTRDERIARGVKAKYLHHVNKLGSDDAWSLLKKQVPLIDEPEIEALKDVGMEIIGKCDGLPLAIKVLGGLLCRRDRNHGVWSEILSNSTWSVDGMPQDLNYVLHLSYEDLSPHLKQCFLHYSLIPKNVVLGYDTIIGMWISEGLVLQCTKGLEELGEDYYKELIMRNLLEPSIEYVDQWHCTMHDVVRSFAHYVARDEALVVQGRQIDISNLHSQKFYRLSIQTDDEVEWNLLKEQMSLRMLISVSDIKLRPGDSLGNFSGLRILCINSSNFLPLVDSLCQLKHLRYLSLATDDISRLPDDIGKMKFLMYIDINACGNLVQLPKSILKLRQLRYLSLGDTHINAIPEGFHNLSSIRKLYGFPAHMGTGGVSPKENW

SEQ ID NO: 111718 - protein, 358 aa, Oryza sativa
  Clone ID: PAT_MRT4530_15670C.1.pep
MSMAEVCCDSAVVVGAEAEARARARAGRRRRAGVEGAGRWNATATAAGVAAEEAATRKRRASGGEAGLVVVAKRHGAASVAGRRREMEDAVSLREAFAAPANGEVAAARCDFYGVFDGHGCSHVADACRERMHELVAEEMGAGSPAAAAREPASWTETMERSFARMDAEVIAGCRAESGSCRCEGQKCDHVGSTAVVAVVEESRVVVANCGDSRAVLCRGGAPVQLSSDHKPDRPDELERIEAAGGRVIFWEGARVLGVLAMSRSIGDAYLKPYVTAVPEVTVTGRSDFDECLILASDGLWDVVSNEAACEVAQSCLRRGRQRWCAEAAAVLTKLALARRSSDNISVVVVDLRRGNAL

SEQ ID NO: 111719 - protein, 258 aa, Oryza sativa
  Clone ID: PAT_MRT4530_15671C.1.pep
MASRVASGVRDAVHSAQYIISKDKFKLHYCGTQGTIRRGTHGPSGLPSSGDGKGKGVAITGANPWYSGDDSDGSNSISDSERTVTADFRIFVCILVVMVIRRWILVHPRKDEVDPTGWDIENHLRNDQKTKDKQYYRHKDYNHKFRSKPEVQYFLDTGKAAGATPIQRTCCCSRLLHDARVYEVFQNYMVSYLLDVRAPSGARHEDDGTIPRDPSLSYRGKYLRASKVYNKERSFKAIEMAGVIGLFAIDDRCLMLCV

SEQ ID NO: 111720 - protein, 57 aa, Oryza sativa
  Clone ID: PAT_MRT4530_15672C.1.pep
VSLFVCLSLCLTKRQKNTFLFCKDKKLHIVSRPTLYLHGCSFLCIAHHESTKHHLRH

SEQ ID NO: 111721 - protein, 107 aa, Oryza sativa
  unsure (1)..(107): unsure at all Xaa locations
  Clone ID: PAT_MRT4530_15673C.1.pep
SSVSAMSSSLQYSNHNFLVTIRVVTFSKIGWFSCEPYFTQARQKSCTENFSLVNLTCLFHLSRILPSVFKLAFXLLQFMKKCKIEGNVMPQSIKTKKGTKKTSFFAC

SEQ ID NO: 111722 - protein, 183 aa, Oryza sativa
  Clone ID: PAT_MRT4530_15674C.1.pep
MLAMSVHPAATPALASRARISRPKLSAASPCTTSSSSTPRLVHLGSRRLPLRSLRGLAAAAASGAVEAEEGEEEKQVGGGDASAGEEAQEYKVKVPERQDPMLVLKFIWMEKNIGIALDQLVPGYGSIPLSPYYFWPRKDAWEELRAKLEEKEWISQKQMIILLNQATDIINLWQQGGGSLST

SEQ ID NO: 111723 - protein, 38 aa, Oryza sativa
  Clone ID: PAT_MRT4530_15675C.1.pep
MGMKWAVDGDQRSDMAAWALQGPSPLESTGNATIKAEI

SEQ ID NO: 111724 - protein, 43 aa, Oryza sativa
  Clone ID: PAT_MRT4530_15676C.1.pep
MSCDQADNVHEELSYAAYLEAWMISIDQIVDNDGSDLVGARTL

SEQ ID NO: 111725 - protein, 110 aa, Oryza sativa
  Clone ID: PAT_MRT4530_15677C.1.pep
MASSLMEATGDSESDAAAVDRGSCPADDGDAESCCGGDQDGGGGAAAAGSVEALSWERWMREYCAGYQLVVAADDGKCAAPATEDDVAAAGGSDAESDRLFWEACIAHGF

SEQ ID NO: 111726 - protein, 119 aa, Oryza sativa
  Clone ID: PAT_MRT4530_15678C.1.pep
WHSLVDCHTLTAYNIQTESTLHLELKLRGGMHIFVKTLTGKTITLEAKPADTIDNAKAKTHDKEGIPPDQQRLIFTSKQLVDGRTLGDYNIHKESTLHLVLTLTGSMHIFVKTLTGKTI

SEQ ID NO: 111727 - protein, 578 aa, Oryza sativa
  Clone ID: PAT_MRT4530_15679C.1.pep
MVIYLPVVKLSKELDMHRVMLMQLQLKSKENLSERTPEKTLINSLKNLLIEIDISSSKNNLNHSYESGQTFTQCSGEASDTARVTSGGEARRQLAAPVMADANRRIDLAAPLVSVRRHGGGAAGEAATRTDGTRPGHPKSVRTRRATMVHATARDEEPARDAMAVVAVAAPVRERDQEARFSDALSVADSCLTVNCSSASGLSDAVAQPPRGVGVGGGVMMDRFLPAAHAVAVLSPQCSSRKASVAAAAARNGHGADALLPPPEPTPTIRTLCIVPREKTDDADAAVDDNGGGGEWDAHSTRGVSSRRCGLLLPTRCMKSTLLLLNPAPAMRRRGGGRRRDRGAPLLSKIGRSQSLGNPLVRSAHDTGIMRSWEEVYINSLRRSGRGGRKGIGALLSPELDTTMPSVRELYLEQGDGAVHPKATHLGFLLVLDRSHDQCHDSHDDPKLLPPPRFPRPAPPKVFDGGKKQRRDAAGAGGGGGGGGYGWPLLLEDKAAASRDMVPPLPPLPSMKSPSESWLSRALPSVSSNPPATSFLGIHVQHKKQSPPPRCSSRAPAKLVADGHARPRQMRIHDLQKS

SEQ ID NO: 111728 - protein, 96 aa, Oryza sativa
  unsure (1)..(96): unsure at all Xaa locations
  Clone ID: PAT_MRT4530_1567C.1.pep
MANPEPPEPYSVRPSWWRSNRAEAGLTGHPMSELLGDLSEKIVKEARCRFVSGLEFTTFGVKKELPRVIEAWVVLSVGRLPPCSPLXEGGVRWLRG

SEQ ID NO: 111729 - protein, 293 aa, Oryza sativa
  unsure (1)..(293): unsure at all Xaa locations
  Clone ID: PAT_MRT4530_15680C.1.pep
MAGRLSTTLLGENRELPRKAAIHGSMRGAHGALRVPGAAAPAPAALVKNLYLSCDPYMRGRMRDFHGSYIPPFKPGSVIEGLGVARVVDSTHPGFSAGDIVSGMTGWEEYSLIDRPEQLSKIQQSDIPXSYHLGLLGMXGFTAYAXFYESAHRKGEFFLFRWYFPEGIDIYFENVGGPMLDVVLLNMRTHGRIAVCGMVSQNALTDPVGIHNIFCLVPXRIRMQGFIQSDHLHMFPQFVSDMAKHYRDGKIVYVEDMSIGLENAPAALVGLFSGKNVGKKVVCVSQELSQFTF

SEQ ID NO: 111730 - protein, 66 aa, Oryza sativa
  Clone ID: PAT_MRT4530_15681C.1.pep
VEHVKSTNIQSWPILHEIISCALPYPATVSTIRPQEYTLRASHVKCTQEVNVHLNSVYLHAGSKGW

SEQ ID NO: 111731 - protein, 398 aa, Oryza sativa
  Clone ID: PAT_MRT4530_15682C.1.pep
MARNRKVVLREYIAGRPPREDDMVLVDGGTVALRVPEAAAPAPAVLVKNLYLSCDPYMRGRMRDFHGSYIPPFKPGSVGFLLPFACSPFNQRCISPSTRRIALLVIEGSICVKVIEGLGVARVVDSTHPGFSAGDIVSGMTGWEEYSLIDRPEQLSKIQQSDIPLSYHLGLLGMPGFTAYAGFYEICSPKKGEFVFVSAASGAVGQIVGQLAKLHGCYVVGSAGTNQKMHHSGFTAMFQVELLKGKFGFDAAFNYKEEPDLTAALKRYFPEGIDIYFENVGGPMLDAVLLNMRTHGRIAVCGMVSQNALTDPVGIHNIFCLVPKRIRMQGFIQSDHLHMFPQFVSDMAKHYRDGKIVYVEDMSIGLENAPAALVGLFSGKNVGKKVVCVSQELSQFTF

SEQ ID NO: 111732 - protein, 138 aa, Oryza sativa
  Clone ID: PAT_MRT4530_15683C.1.pep
IRSAPRRPTTIGAKRRRGHCAAPLPRQDGRGRHVHRRRGAEACVEILGRSQGNRFLSMVSYPNPPDVDAGIPSRIVFMTRWMASMTVKAWTRGVKSKFVWGATLEQNEVGKMIYEDFLPLALERGRGCACAGSGDDWG

SEQ ID NO: 111733 - protein, 50 aa, Oryza sativa
  Clone ID: PAT_MRT4530_15684C.1.pep
LDTWWSCYAKEHLLIVFFSSSTCWKERKEVVMLCDSLGGFLAPLAVLGVM

SEQ ID NO: 111734 - protein, 86 aa, Oryza sativa
  Clone ID: PAT_MRT4530_15685C.1.pep
QGFDVTMPGGRGDQAQAAARSNADADRDDDKITVGDVLTDATAKLAGDKVAGAEDAAKVVQAETYSDAAARTRAGGEAQPSRRRRR

SEQ ID NO: 111735 - protein, 277 aa, Oryza sativa
  Clone ID: PAT_MRT4530_15686C.1.pep
MAQPQPQRMEDQLQSQAQGQGQGQTEAIKYGHVFAVTGELAGQPIAPRDAAAMRSAEESVPGVPVPQDIGGGYSAGVAMETAAAYNQAVAAVRPGQASDAATNQGIAVTQTSVPGGRIITEFVAGQVVGQYSVADQAVEQDATKITVGEALEATALAAGERPVDRTDVEAIRAAEMAAQGSDVTMPGGLADQAQAAARSNADADRDDDKITVGDVLTDATAKLAGDKVAGAEDAAKVVQAETYSDAAARTRAGGVGAAVSTAARLNQADDDADDDAE

SEQ ID NO: 111736 - protein, 78 aa, Oryza sativa
  Clone ID: PAT_MRT4530_15687C.1.pep
NLDNQASARIIRCKRAGVLKCSQLSFCALYYFYLICGEITSHRHDVDRWMYHGRLLFLKSNRMVDHIFMKKKKKKPAA

SEQ ID NO: 111737 - protein, 692 aa, Oryza sativa
  unsure (1)..(692): unsure at all Xaa locations
  Clone ID: PAT_MRT4530_15688C.1.pep
MAKFLPSLAKLGQPTPLAIHWPSVGPTVLLHVFFVVASKWKPQRQLPTPPPPVARPPRPAPPRRARCRYGATTPPPVARPPPARTASASPVATSPTAPTSAASSAPPCSSWATSPTSAASSALPWSPPGPRRRRDAAYFLGVHSFTFFLAAEVANGVVQSARWPCVVASSGTGSVTSRRRRRLAHPRLARTRVATAVAVRRCLARPRVAAVVRRPPLPHAPALCAHASCRRRRRPPSPHPRWRVGQIDIWRHLKLQDHPVKTQGWLRQSLRNPTPKSIERCSFIFVTAIQLCVGNMHGFCFRAEKYMKKKGGRKIFGFMVKEEKEENWGSVEFQVFSFTNKIRRLASHLELHKKDFSXSERGLRRLLGKRQRLLAYLAKKNRNPIFLERVEGVGFISGEEAVNWGLSGPMLRASGIQWDLRKVDLYESYNQFDWKVQWQKEGDSLARYLVRIGEMRESIKIIQQAVEKIPGGPYENLEVRCFKKAKNSEWNDFEYRFLENWIHATPSHFPSTPVDAVSPRLRTEPEDTTTDFGFGNDTDAGASSGGDSGFSWWRRRASGGRNPVRSGPHATTAVEDAAGERCSCSSSPRRSFAAARTSSRVPSARDADATGRRRRRSRGPLCRLLLGCLGFLVACPDNTMVAESTPVRWLPLSVSSTARLTWVAAKELDRGEGARRWRRGSSAPETAPERPH

SEQ ID NO: 111738 - protein, 90 aa, Oryza sativa
  Clone ID: PAT_MRT4530_15689C.1.pep
RCILWSRRVIPSTRSASNRIKASPPQGLYMLAIHYCTESGSAYQDLDSRANNTVVATEVSPDTRCALNKNGTYSLCANVQFGWLQARIFR

SEQ ID NO: 111739 - protein, 1119 aa, Oryza sativa
  unsure (1)..(1119): unsure at all Xaa locations
  Clone ID: PAT_MRT4530_1568C.1.pep
MPNVAYFRVFGCNCYIYRKGVRLTKFESWCDEGFLLGYASNSKAYRVYNKNKGIVEETADVQFDETNGSEEGHENLDDVGDEGLMSAMKNMSIGDIKPVEVEDKPSTSTQVEQTTSATPSQAQVDVEDEKAQDPPMPPRIHNALSKEHPIDQVLGDISKGVQTRSRVSSICEHYSFVSCLEPKHINEALGDPDWINTMHEELNNFARNKVCTLVERRRNHNVIRIKWVFRNKQDENGLVVRKKARLVAQSFTQVEGLDFGETFAPVARLEAIRILLAFASCFDIKLFHMDVKSAFLNGEIAELVFVEQPPGFEDPKNPNHGFKIGKVDTTLFTKIIGDDFFMCQIYVDDIIFGSTNEVFCKEFGDMMSREFKMSMIGELSFFLGLQINQLKDGTFVSQTXKDLLKRFVLEDAKPIKTPXATNSHLDHDEGDKPVDLKLYRSVIDSLLYLTASRPDIMFSICMCARFQATPKECHLMAVKRILRYLKNSSTIGLWYPKGSKFKLVGYSDSDYVGCKVDNKSTFGSCQLLSRSLLDPNHLLLLLHSFFSVASSTVPSDDVNPFAAGSVAISAATAQLIHIKSHVPVILDLGDSTFGTWRTFFTIAFRKFGLLDHIDSTTNARLKLDDAEWTQIDTCIVSWLYATLSPDLLSAVIQPDDDAYTAWNAISSQFLDNVVQRTVQTRQAFHALHQADMTITEYCGKIKVLADTLRDVGSPLTNQDLVVNLLSGLNDKFAHCVSTISAARPPMTFLQARSFLLQEEVWIANRAQKAATTALLAASRSAGASSNAPAPPATGATGSNGGTGGNGRPYKRKKQAGRADGTSGNSGPSGNSSAPMASWVNPWTGVVQAWPIAWFPLTSSAPGILGSRPGAAPQQSMVVQQAPAGTLPPALYQALTGLSLQSTPPSATDWVFDTGASTHMVGNSGMLSSTAPSTSRIIVGNGASLPVQCMGTATVPTSSSSPLYLRDVLFSPSLIKNLISVCRLTRDNSVSVEFDPLGFSIKDLRSKTVLLRSDSPGDLYPLRSAATPLVSGFHASVDLWHDRLGHPGRPALSRILNNFNFSCKPSSPHNCNSCRLGKHVRLPFTASSTVSPFLFSLLHCDIWTSPVLSCSGFSVLSRYT

SEQ ID NO: 111740 - protein, 95 aa, Oryza sativa
  Clone ID: PAT_MRT4530_15690C.1.pep
QTRAVQARERGHVGLVFVGGVGEPDSVSHRSLASLCLLSVSVIVGVHAQVSSISMPLNRKAIPSGETRKERARCIGISITGAVERQVVDQVGGVA

SEQ ID NO: 111741 - protein, 1044 aa, Oryza sativa
  Clone ID: PAT_MRT4530_15691C.1.pep
MEIDSSCLLAMLKFLDVLMQCSLEGSCGKGLSVRKTALDTVSECLQILRFLSKDFGGSTSLPENAHLLRVLISIVSCLQSELNLTDKPNGAGFSSHTFGPINNKNPNIWDMEISAFSMIEDALSKIASSLSEDLWQSIVEVLRKVMDFLTARNFIIESSTMSRFYTSFLRCLHSVLSDPKGPLSAHVPGFVANLQIFFMYGLRSSSPPVITPMEYKMDTKSNAGRYKPPHLRKRGGKGNDSFDGRNSDSESSRYDLSSSDSDMSDSDGYAKTGDRFRSSKARLAAILCIQDICRADPKLLTSLWPLLLPESDVLQQRKYQATLMTCLIFDPIIKVRIEAASTIASMLEGQALVLTQVAEYKESSRRGSFTTLSSSLGQILMQLHTGMLYLIQRETQTTLLSALFKVLILLISVTPYARMPKQLLPTVITDMRRRLLDRHSNKNEHYALLETDGPFTLHEYEQVNVLNCLEAAFSKEPLLQMFLKFSLKMDVQEIHVSVRFGALQVLRSAVHNYPSCANIIWAKVQYIVLDLLQMQSLEDQRDANFGLPKEESSIKGRCLVAAIKVIDECLRVSSGFKGTDDLKEYRLQDIQQISDCTINKTIKSAPHFETDVPGPSQNFTLDITLGTNRWIEVIERLLPQGLSHGSATVRTASLTCFAGMTYDVFFSLPENKRDYVTSSSIHAALSDTAPAVRSAACRAIGIVACFPSILSSPSLPGKFIDAIEFNTRNSSTPVRITASWALANLCSSIRFRALDTNPSAGVLDKSAISLLVEIALRLAKDGEKVKSNAVRALGYLLRFIRFNNHSDTVDDPSNSVLCGDPVWLERMVHALMSCVTTGNVKVQWNVCHALSNLFMNDTLRLPDMPWASSVYSILLLLLRDSNNYKIRMHAAVALAVPVSRLDYGSSFPDVVRGIEHVLESLSSNSLSSPSNFKHKGNLEKQVTFTALHLFSFVSPKDDQSLRDFLIKKASFLEDWLKSLFSLFNNVEDQPLANEAINDEDGFSPNVAQKAMLSSAVKSLLDIYTSENQHTVAQRFEQLARSLEL

SEQ ID NO: 111742 - protein, 105 aa, Oryza sativa
  unsure (1)..(105): unsure at all Xaa locations
  Clone ID: PAT_MRT4530_15692C.1.pep
MGHVDASAAAAAARDAKKKRGNRSSAKLKQCKLDARREQWLSQVKDGKEAKASTSPTGTEPNAGSMTVPSPHPPLPRRXLDVRSKGGDPEEDREERGAPPPEVGS

SEQ ID NO: 111743 - protein, 94 aa, Oryza sativa
  Clone ID: PAT_MRT4530_15693C.1.pep
MVRMAGVDREWLHSMAHALALDARTWLREDVPGLGLIDRDVSGPGLGEGGSLQIFINFSPNRWLTWKIGWMEDVTGSKSLYAIGPIRSRTRNGP

SEQ ID NO: 111744 - protein, 241 aa, Oryza sativa
  Clone ID: PAT_MRT4530_15694C.1.pep
DWTGFTFQEIMDDAEKIKTTGNRLFKEGKFELAKAKYEKVLREYNHVHPQDDDEGKIFANSRSSLHLNVAACYQKMGEYRKSIDTCNKVLEANPVHVKALYRRGMSYMLLGDFDDAKKDFEKMIAVDKSSEPDATAALNKLKQTIQETEKKARKQFKGLFDKKPGEISEVGVGEPEGNKTDTTGSGEAASTADRDTDAKEAIPRADSGLAFEEERPGLLARIWPSASRIFSSLGLNRCTIL

SEQ ID NO: 111745 - protein, 341 aa, Oryza sativa
  Clone ID: PAT_MRT4530_15695C.1.pep
MGHVDASAAAAAARDAKKKRGNRSSAKLKQCKLDARREQWLSQDCSNSDPPAFWIGIVKDGKEAKASTSPTGTEPNAGSMTVPSPHPPLPRRRLDVRSKGGDPEEDREERGAARQELGSSYLDSPVHSPSSDNSGSVGGMHRKHYNNGGGLNLSSSSSVWSSSRSVSEAEDDDTGGPEEENGVLDDWEAVADADALTVDDCHSHQSSGHVAPPAAPNVCTAPANQTGRQDPIQRTKAWAPDDIFRPQSLPSISRQVSFPASIGNGWMGAAQQANLSTPLTCPICCEDLDLTDSSFCPCPCKFCLCLFCHNKILEADGRCPGCRKEYVAARLSRSCSMGPRY

SEQ ID NO: 111746 - protein, 121 aa, Oryza sativa
  Clone ID: PAT_MRT4530_15696C.1.pep
MHTTSTIAAKAKGAFPYVRPFEAATRKMPHDDLFPRATKCVQHRIIPPKRTNNSSHLTPQKIDGAGAPQKEKQSKNNYIRANPAKSQFQKPQGTTRNAKARSKSALFRRHEPIPRCKCLIN

SEQ ID NO: 111747 - protein, 205 aa, Oryza sativa
  Clone ID: PAT_MRT4530_15697C.1.pep
QIPPLPPPPPPLPPLRNPPPPPRTAPRRNPAKTPTPRRRHHRRRPPTTSASTPKGDPTVRRRPMRGRPPRSRSASRRSPNLGSTRGPRARSRTGFPAKGRSPRPRRRRRRRRAARSPSARSSKRPRLCRLPRRRTRKPNATQEERGSPRPPRGSSATWIPHRSDRPVKARQALPRPPRSGRTRRRRRRRLPTTAPAASRWLGCGR

SEQ ID NO: 111748 - protein, 167 aa, Oryza sativa
  Clone ID: PAT_MRT4530_15698C.1.pep
GGVLRPNRRVNNIDLFRCRPPPPHNLRRSAGARHRGGASLVGEPHASRLRAPGDPVPAPCAGARRRRRRCEDPLHRGQDYRPPRHHHGEGAPPSCRPRQHGATGSGPARRPDGRHRRRWMLLERLNRAEEEEDAMEEPEEEKLEAMPQLASGMEDLSLLLRAFIALY

SEQ ID NO: 111749 - protein, 68 aa, Oryza sativa
  Clone ID: PAT_MRT4530_15699C.1.pep
ACSFTRSDNFHLFTFCYVKMIRDLLLWRAHTLEGKDEYGCHFWAWRVVLFSAVHLFSTGSLLTMVVAS

SEQ ID NO: 111750 - protein, 1473 aa, Oryza sativa
  unsure (1)..(1473): unsure at all Xaa locations
  Clone ID: PAT_MRT4530_1569C.1.pep
HKHIHWVRPDQGRSDRPHSGGLTGVPCPVTSPRRLWRRPGAGFAITGTPLMEIDHRNLQLNAQAMNALFNSLSQEEFDRVSNLETAYEIWNKLAEIHEGTSEYKDAKLHFLKIQYETFSMLPHESVNDMYGRLNVIVNDLKGLGANYTDLEVAQKMLRALPEKYETLVTMLINSDMSRMTPASLLGKINTNDMYKLKKKEMEEASPSKKFNDFLGRRKERGKGSNSNRRRNRRPNKTLSNLRCFECGEKGHFASKCPSKDDDGDKSSKKKSGGYKLMKKLKKEGKKIEAFIEEWDSNEESSPHPGSSKVTSLSDSESDDDCDDVSYDELVSMFEELHAYSEKEIVKFKALKKDHASLEVLYEELKTSHERLTISHEKLKEAHDNLLSTTQHGALIDVGISCDLLDDSATFHIAYVASSSISTSCDDLVDMSSSSSSSCVSICDASLVVENNELKEQVAKLNKRLERCFKGKNTLDKILSEQRCILNKEGLGFIPKKGKKPSHRATRFVKSNGRLMMVALFLDMWVPLYSVVNYHTGGSHWVLDSGCTQHMTGDRAMFTTFEVGRNEQEKVTFGDNSKGKVIGLGKIAISNDLSIDNVSLVKSLNFNLLSVAQICDLSLSCAFFPQEVIVSSLLDKSCVFKGFRYGNLYLVDFNSSEANLKTCLVAKTSLGWLWHRRLAHVGMNQLSKFSKRDLVMGLKDVKFEKDKLCSACQAGKQVACSHPTKSIMSTSKPLELLHMDLFDPTTYKSIGGNSHCLVIVDDYSRYTWVFFLHDKSIVADLFKKFAKRAQNEFSCTLVKIRSNIGSEFKNTNIEDYCDDLGIKHELFATYSPQQNGVVERKNRTLIEMARTMLDEYGVSDSFWAEAINTACHATNRLYLHRVLKKTSYEVIVGRKPNIAYFRVFGCKCYIHRKGVRLTKFESRCDEGFLLGYASKSKAYRVYNKNKGIVEETADVQFDETNGSQEGHENLDDVGDEGLMRVMKNMSIGDVKPIEVEDKPSTSTQDEPSTSAMPSQAQVEVEEEKAQEPPMPPRIHTALSKDHPIDQVLGDISKGVQTRSRVTSICEHYSFVSCLERKHVDEALCDPDWMNAMHEELKNFARNKVWTLVERPRDHNVIGTKWVFRNKQDENGLVVRNKARLVAQGFTQVEGLDFGETFAPVARLEAICILLAFASCFDIKLFQMDVKSAFLNDTKYPNHVYKLSKALYGLRQAPRAWYERLRDFLLSKDFKIGKVDITLFTKIIGDDFFVYQIYVDDIIFGSTNEVFCKEFGDMMSREFEMSMIGELSFFLGLQIKQLKNGTFVSQTKYIKDLLKRFGLEDAKPIKTPMATNGHLDLDEGGKPVDLKLYRSMIGSLLYLTVSRPDIMFSVCMCARFQAAPKECHLVAVKRILRYLKHSSTIGLWYPKGAKFKLVGYSDPDYAGCKVDRKSTSSSCQMLGRSLVSWSSKKQNSVALXTAETEYVSAGSCCAQLLWM

SEQ ID NO: 111751 - protein, 81 aa, Oryza sativa
  Clone ID: PAT_MRT4530_156C.1.pep
MAFSAVQLPQCPRHCSFDVGETKDGAICIVYAHQLNVSVLMHTKGDDGAAERWVMDRQVFVLAVRDSYATFDNDVQPYIMA

SEQ ID NO: 111752 - protein, 389 aa, Oryza sativa
  Clone ID: PAT_MRT4530_15700C.1.pep
MGAVASTVAARFAFFPPAPPSYGVEPPPSPSPAAAAEDGAVVELSGVPRRAGVEARRLPTGRGTEVVAMYVRQPGARLTLLYSHGNAADLGQMYELFVELSSHLNVNLMGYDYSGYGQSSGKPSEQNTYSDIEAAYRCLVETYGATEENIILYGQSVGSGPTLDLASRLPHLRAVVLHSPILSGLRVMYPVKHTYWFDIYKNIDKVPLVKCPVLVIHGTADEVVDCSHGRALWELSKIKYEPLWVKGGNHCNLELYPEYIKHLKKFVMAIEKLPPTKDESSGSSGPSDPCEIGSESMQSSRKSTDVKDKSRSSIDHRHSVDRREKPRGSIDRRDKSRKSIDHPDKPRASVDQPDRPRRSIDRFGGMMRSVTSVKLCNIDCFKVTYASGS

SEQ ID NO: 111753 - protein, 123 aa, Oryza sativa
  Clone ID: PAT_MRT4530_15701C.1.pep
MRSHLILSRNSVAPPPSRARATHAHSAPRASPPLHRTSTVVVLCCRLHSVPPPQGAVVEPISRYWLVLLRSGVEFVGRCFGGLWEPGTAAARATEGTSPDEGSDERSGTGRLRAQPQVPKQRD

SEQ ID NO: 111754 - protein, 96 aa, Oryza sativa
  unsure (1)..(96): unsure at all Xaa locations
  Clone ID: PAT_MRT4530_15702C.1.pep
SLYNEFVRNKYSIAASPFLQSGVFLVRDNQVLHXLRLVEKQFPYQVINHVMSKAHASSISTEWALRLKHNREDEFGAFTPLQPKSYRNVYNVAESS

SEQ ID NO: 111755 - protein, 95 aa, Oryza sativa
  Clone ID: PAT_MRT4530_15703C.1.pep
MAHEVKSLTDQGDLPKLRTSSTQQKGSTQLNRPHISTIIFQVRINMFKGTLAFTHEIVRRNLHLQQQPPQQQRLYDRRKEQTNKQKEKAEKNNIK

SEQ ID NO: 111756 - protein, 67 aa, Oryza sativa
  Clone ID: PAT_MRT4530_15704C.1.pep
MPWECGDAKHLNGIFTLLLPCVQLMTNIQVLTALNWYLTAVNIHQVLAASVEGTHDMPPTPISRTIT

SEQ ID NO: 111757 - protein, 453 aa, Oryza sativa
  unsure (1)..(453): unsure at all Xaa locations
  Clone ID: PAT_MRT4530_15705C.1.pep
MTTSPRDAYEVHDYNFAQVASKLPFYDGKYDFVAYIDXELAVDNEFDIYDFSDAQMIKAASNKFTSSALFWWSYVCNKPETLDEFKTIMRKCFVSSYYKCTLREKLEHLKXGDRTVKDYIHEFKVFQNIQQKEENGVLDKKEDEAPAVSEESLQGKLNCAEINECEYSQVEQPLVEPIVEMPLSQVDLLVVPCDKEELCDNASLISMPQLVNEHAISSVSLCADFKHVVHIANEVEEHEFLSYLNTLGYVWFDDFCELENLKEKLFAKFDLPCPTNAISHIFGEYNDRGIYLVHRVYICSDLEPSVHVDKTCKLERNVIANKIISSLSCFDWKKQVVLNRLREEHHMEKPMTFFHEEGEDDVTMATMDTTIAHIMDLQEDIKIKFSKSWNSIRPPATLLTSNGRQICIRAPFWVHEYLIESSRSCLYNGSNXIAKFHLSEPQLKKQGVASPVI

SEQ ID NO: 111758 - protein, 118 aa, Oryza sativa
  Clone ID: PAT_MRT4530_15706C.1.pep
MATTDKTIAHIMEEQDDIKIKSSKCWNQIRPTATLLTSNSRRIFIRPPFSAHEYLMESTRSPLSIGFGLITKFHPSHPQMKKQGAASPVMGLWACNFVWDPGPSGAHVGNMVDLHRPD

SEQ ID NO: 111759 - protein, 451 aa, Oryza sativa
  Clone ID: PAT_MRT4530_15707C.1.pep
MATTDKTIAHIMEEQDDIKIKSSKCWNQIRPTATLLTSNSRRIFIRPPFSAHEYLMESTRSPLSIGFGLITKFHPSHPQMKKQGIWLICTGKINNPQRGVSIARAQHNNVIRCVLVVIGTYEIGIVFPPEFHICSFQKFLSVSFEVASRGVQNIQQKEENGVLDKKEDEAPAVSEESLQGKLNCAEINECEYSQAELHVSTFHAIVEQPLVEPIVEMPLSQVDLLVVPCDKEELCDNASLISMPQLVNEHAISSVSLCADFKHVVHIANEVEEHEFLSYLNTLGYVWFDDFCELENLKEKLFAKFDLPCPTNAISHIFGEYNDRGIYLVHRVYICSDLEPSVHVDKTCKLERNVIANKIISSLSCFDWKKQVVLNRLREEHHMEKPMTIFHEEGEDDVTMATTDTTIAHIMKEQDDIKDQVLQVLESDSATCYTTDFKWPSNLHTTSVFGP

SEQ ID NO: 111760 - protein, 106 aa, Oryza sativa
  Clone ID: PAT_MRT4530_15708C.1.pep
MAVGEPAGNGFDGGSGGGGGGGGGGGGYGGDFDDGRRAQQAASTTAVAAASDGGDFDDGQRARRRRRQQRQQGKTTVTSMTVDEPDGSGFDGGGGDRGGCGQGSGD

SEQ ID NO: 111761 - protein, 158 aa, Oryza sativa
  unsure (1)..(158): unsure at all Xaa locations
  Clone ID: PAT_MRT4530_15709C.1.pep
FPSVTMATTDTTIAHIMEEQDDIKIKSSKCWNQIRPPATLLNSNGPRICVRPPFSAREYLMESSRSTLSNGSGLIAKFHPSHSQIKKRGVASPVMGLWVCNFVWNPGPSGAXMWGVPQXIGLICTGKINNPRRGVSIAKAQHNNVFHQLTKRSGQQQP

SEQ ID NO: 111762 - protein, 571 aa, Oryza sativa
  unsure (1)..(571): unsure at all Xaa locations
  Clone ID: PAT_MRT4530_1570C.1.pep
MLQLLLISTLPAFTLMLVAPAGCRXYSPYVERQRCVTLSERLRSPAALFLXIFLWGGEGGGSSNKERERERGVRIMPSKAKPEPALAAREEGEEGPEAELNAAALPLLDLPELALERVLEELEPPSLAAMACVCVALRDRCSADTLWGRHVNRKWGRVLGAAARKEWEAELAARRSSGALPRPARRRSLADSLACAWPFSWITCRWLKGNAVAAEPAAATPSPLPSPATDTVAAWYRAVECGEFSFPAQVYNREDGHVGFVLSCYDAHLRYDRRTDTFTARYPPHGRKPAKEESGVQWSRVRSPPVSTPAHDLHASGCLGDLRPGDHFEIQWRKNKDFPYGWWYGVVGHQETCNANEHLCRCHEDDMVVLEFKHYAAGSRWRQTTSICRVRSCFLLNVILFNLSRCLYRVSQGPHLVWRGVAESAGCVESVPLFAGIFLHGSEGHVPNFWQARIYADESAHLTWIGALVLDRVVPNSPVTTASGTETQLRDCWNGELLHGGKFLRGRRVETDMAPATPGGSSQLVENRRCQLPSSQITVRFSSFYGTTCPVSCRRREAVPTAMCPNNCEPL

SEQ ID NO: 111763 - protein, 112 aa, Oryza sativa
  Clone ID: PAT_MRT4530_15710C.1.pep
MRAAGGARRQSSGGRARQRSGDGRQAERTASEEAGTMTSGVTEMRATMASASSSAGAAFPRQTGHEVWDESHMLMHSWWNTCPQAEICLTFSPSSTARRQTTHLNDAAVSEI

SEQ ID NO: 111764 - protein, 48 aa, Oryza sativa
  Clone ID: PAT_MRT4530_15711C.1.pep
PLDKKAVHPLKRSILGLTCNLLCYLTAMLFFAWNMWPCFSVLSFCDIS

SEQ ID NO: 111765 - protein, 69 aa, Oryza sativa
  unsure (1)..(69): unsure at all Xaa locations
  Clone ID: PAT_MRT4530_15712C.1.pep
ELSGRCGXNRWMAAEXGSGSAPXPTRXXXRRRLGRVXGXVGGRXGSTFXGGXQDPXXPNKXAXXSXKVV

SEQ ID NO: 111766 - protein, 255 aa, Oryza sativa
  unsure (1)..(255): unsure at all Xaa locations
  Clone ID: PAT_MRT4530_15713C.1.pep
MASITIRPIVFFTVCLLPPCLAHRRSPQPPARSFTRHPRPPHPPHWGPRTLSLRLPXRAHAPPPPTRTRSPTLSHSRAFAKRPFSRTPPHSPAPRLARHAAXXPKRAPRGPHPTNPFGNAXSPLSPANFASXSPQQLXKIXRXXPTLRSPPAHAHXLASLPPPPTFLTPRNTPPPPPTPXPPLKPPPNHLQTPPPPPNFFPKPNPPLKKNFGRVWARTSLPLNDSNLIYLLTSSHHAARKRNAALKLYQPPPGGG

SEQ ID NO: 111767 - protein, 145 aa, Oryza sativa
  Clone ID: PAT_MRT4530_15714C.1.pep
MPSALSRHPSRQAASCRTSSPLCCCSRRAAAAPPAVPNARRPSRRRGGASGWACHVIEEFLDEIDIGTLINDFVRRNFLGRRMGRRSAGRGGRGGGLAVATGEKGTPHASYNSSQRKNRELRRFMALPMPTPPQQATTARRPELL

SEQ ID NO: 111768 - protein, 100 aa, Oryza sativa
  unsure (1)..(100): unsure at all Xaa locations
  Clone ID: PAT_MRT4530_15715C.1.pep
VKXHRRSARTXTHRGQCRSSSTGGHPAVLVRXSPPSLASASASHLPPTTXRXPERRAAVRALPAGXRRSLQQGEGGGRGCAVVCALPIGRCHTLQQGEGG

SEQ ID NO: 111769 - protein, 343 aa, Oryza sativa
  Clone ID: PAT_MRT4530_15716C.1.pep
MPQESRGSSGKAPVTVTVTAAGASSSGECSTPPFRLNVHAPEFVPRSPAASPMAAAAAGYYSPFLQLPGSSIGLGADWSIFADPDPTFFLPDFGHAKIGGGNGQPKGASPADIAQKIIKQVEYQFSDTNLVANDFLMKIMNKDPECYVPMSVISSWKKIKAMGVTNQLLVNALRTSSKLVVSDDGKKVRRAQPFTERHKEELQSRMVIAENLPEDSTRNSLEKIFGIIGSVKNIRICHPQEPSSARSSKSDALISNKLHALIEYETSQQADRAVDKLNDERNWRKGLRVRPVLRRSPKSAMRLKRPDFDHLMISDDDHSPQSQASSDSPMADHLPDHHVRNKF

SEQ ID NO: 111770 - protein, 653 aa, Oryza sativa
  Clone ID: PAT_MRT4530_15717C.1.pep
MATGGLDPAAREAELAHLPGPKLVDHLCTTHRRADYEAVARVLDARDRRLEAALAENEDLRRKCDALLVGQRRPREEEEEEAAGEKPPPGIIAAPEPARRDEEEVEGSSEEGEVRGVDFIDLSSSSSDDEEEKEVEAGRGAGSRVPIIKEAPDDAEGDEDDTLPLSQLWKRRRLGEPGAVKSEKGDGHNPVDSGGNDPPKCTSARTDVPEASTGEMVGAGSTMPRGPGEQDKGIGAVQRATVLHGTSGIGEQGGKLDSTPTKVRESNRREGGLQNKSIDSKSNDALKHQDKKDGRMVQKGDLSVQSCVPARPIVASVPSVTKNSEKGNSEKGVSQPPKGNDQMNKMSMVESSSKCGYEKVGADVQKCSPLPRQSEEGSVARGVVSFEETGIATVHPLSIRNLSGPELRNLNKGGGELSKKLVVEGSPKYGEKNNDARSEKNSSPLGQSEDVKIIREGASNEEPRVGRLSPSILSNYSTGEQIHSVSKNAELCSPTAKKALFEPGSSCTPLKHTVCPPSSGKSISIQAKGEINLLPSAMSRHWETAAHMIASLRGNMELSMQALCALYRQRKLVIMSTEGQQTGTTGLTKIDAVRAIRLLEFLLDGKLKGPLKRTAKELLSHDATGPTFLEKVALSFSKELFDIYKNKKDPYFC

SEQ ID NO: 111771 - protein, 186 aa, Oryza sativa
  unsure (1)..(186): unsure at all Xaa locations
  Clone ID: PAT_MRT4530_15718C.1.pep
MVAVCPCGGIQHTEGIKQKKINIINIRYIIPRLSRLAGHYCHRLCLSAPSRPPTPPIAAVQPGAAVCHALGXPSETAMPPPITITVTITAAAADRSHGQPPRRHPAARLHHYHRRPRLCCRRRASPPSPASASHQRRARVAMALIRRWRRRIQPRECQIHRWRRRIRRHNVSPLRSLPDGPRRPFA

SEQ ID NO: 111772 - protein, 224 aa, Oryza sativa
  Clone ID: PAT_MRT4530_15719C.1.pep
MNLRRLWEVWGEWEIRVLVLSSLSLEVLLLLTGGLRKRKAAWWLRMPLWLTYLLADYIAIYALGNLSKKQKLCDGSFDGEMHLLVFWAPFLILHLGGQDTITAFAVEDNELWLRHFLSLLSQVALAGSMVTQPDPGPNYAKFVEECQSRTESGLVAKIVIVQERPPDDEDHVEVKREEYGDLVYSAHRFFHTFRRLFVDLILSFQDRIDSLAFFRRLEMEQAYK

SEQ ID NO: 111773 - protein, 117 aa, Oryza sativa
  unsure (1)..(117): unsure at all Xaa locations
  Clone ID: PAT_MRT4530_1571C.1.pep
GRGRRRTGSGRWTPGQSKRGIRRRRPVVVDPAVGSRRRRGRRRGGGTSSXRHEKKVRGEGEGXRGRGLAGAVDLFRPAGEAGGGAVGRWRWWRWWIARGMGGRGWRRDLEPGEEETS

SEQ ID NO: 111774 - protein, 842 aa, Oryza sativa
  Clone ID: PAT_MRT4530_15720C.1.pep
MGLSTLALTQAPASLRGFGGEAVQVLGQVQLVVAFGTGENRREEQILFDVVDIPYNYNAIFGRATLNKFEAISHHNYLKLKMLGPTGVIVAKGLQPSTTSKGDMAAISMAVHNVEAEPHDHAKRMLKPVPHGKVIKMQVDDADPAKLVLLGGDLGEEEVENILEVFKKNIDIFAWNPDDLGAECQAKETEAVKDVRRSIHMNPADIPKTAFITPFSTFCHLRMPFGLRNAGATFARLVYKVAVNAALVQETESGQKLVYFVSEALQGAKTRYIEMEKLVYALVMASRKLKHDFQAHKVTVPSQYPLGEVLRGKEITGRLSKWAAELSPFDLRFVARTAIKSQGVGVAVVLTSPGGVPIRYAARLQFDTTNNTAEYEAVLLGLRKVKALGVRRLLIRTDTKLVASHVDKSFEVKEEGMKRYLEAVRSLEKCFAGVTVEHLPRGQNEEADTLAKSAACGGPHSPGIFFEVLYAPSVPTERLDVMAIDQAELGKDPEDWRTPFVKYLKNGWLPEDEAEAKRLQLRAVKYKLVSGQLYRSGVLQPLLRCISFTEGKEMTKEIHQGLCGAHQATRTVASKVFRQGVYWPTVLKVCVEQAKRCESCQRHGRSQTAPQHELQPIAPIWPFARWGLGIIGPFPVARNRVPKEFITNNGKQFDSDKFRETCEGLNLKISRTNKWLKKRLEGAAKGKWPDEMLSVLWALRTTPTRPTKFSLFMLLYGDEAMTPTELGANSPRVMFSGGEDGRDVSLELLEGVRVEALEHMHKYATSTSATYNKKIRPTELLPGHLVLRKKVNPMEVGKLESKWEGPYLIKHRSRTGSFRLATLKGEEFDHSWNTASLRRFYV

SEQ ID NO: 111775 - protein, 726 aa, Oryza sativa
  Clone ID: PAT_MRT4530_15721C.1.pep
MNLRRLWEVWGEWEIRVLVLSSLSLQVFLLFTGGLRKRKAAWWLRMPLWLAYLLADYIAIYALGNLSKKQKLCDGSFDGEMHLLVFWAPFLILHLGGQDTITAFAVEDNELWLRHFLSLLSQVALAGYVYWKSRPSMRLMSPAIIMFVAGVTKYGERTLALRAASMDCLRSSMVTQPDPGPNYAKFVEECQSRTESGLVAKIVIVQERPPDDEDHVEVKREEYGDLVYSAHRFFHTFRRLFVDLILSFQDRIDSLAFFRRLEMEQAYKVVEIELVLMYECLHSKALVIHGLLGRSLRLFSLAAPVVSLVLFTRALGDMREGYNQVDINISFVLLGGAIFLETYAILLIFISSWTYTDMRGREALRPVAAAVFWLIALFQPEKRPRWSNKISQYNLISYCVKDKSRRYKKPMEWLEWRWNFRVKTMWDSWRYKTSIGVSELLKSHIFEQLKSKASSISKDPKSYRKAGEHRGQWALQRKGLYQKLGWSVDCEFDESILLWHIATDLCFYANHPADKDDDGCCSCSSSSKCLRCLCSSSSGYPDAEARGRDSNKLATMSREISNYMLFLLVMRPFMMTASIGQIRFGDTCSEAKNFFRRDDEEIGDEERCAKRLTKVDTSIAEPRDVKGDRSKSVLFQACKLVRQLNELEGITEERRWRLIAGVWVEMLCYAAGKCSGNAHARQLSQGGEMLTVVWLLMAHFGMGDQYRVESGHARAKLIVHHNHSTM

SEQ ID NO: 111776 - protein, 474 aa, Oryza sativa
  Clone ID: PAT_MRT4530_15722C.1.pep
MDMLISAVASDLVSRFISYLVHKSEKQHTTTEQDLERLKSVLLRIYTIVEEAEARQIRNRGMILQLKGLMEGMFLGYYVLDSFQFQCVEEEGVDEDHQVSCKRLRFSTCTRSTSLLSLGTENTPVLKNVIESLETKICDVRELVVLLASCPRLPQQPYCTYLFMEKSLFGRHVEKEQVIDFILHDDQNLAVLPIIGPHRIGKRTLVHHACQDERVRGRFLNIVFFHGDDLGNISLMPSTKYLCIVEFSWDVDAEAWKIFRSSMKKAAISGSKVIIIGRTDEIAKWGTTPAIRLNRLSPEMYWYYFKALSFGSMNPDDHPKLASLGMQLATELQGSFLGANILGHILRGNPSAEIWSGFLMSLRMSRKRLSIFEEHPPEKNHPSHTAEVAFMNYRGCMLYDLREAGHFQSDIPRLTPAGVELEGKIPCDLGFDVLVWRSQIPPFCNYIATFLQPKPRRIVRRNKNPLAVSITYQS

SEQ ID NO: 111777 - protein, 827 aa, Oryza sativa
  Clone ID: PAT_MRT4530_15723C.1.pep
MAPFFSILPALSFLALLPIVMSRDKIPLKSSLSVDDYQNDVLQSADGTFSCGFLTIYSNAFAFSIWYTNSKNKTVVWTANRGRPVHARRSVVTLQKDGAMVLKDYDGTVVWQSDSNSIDVQYAQLLDTGNLVMKNSSGKVVWQSFDSPTDTLLPTQKITAATKLVSTTGLYVPGHYTFHFTDSSILSLMYDDADVHEIYWPDPDRGEYGNKRNRYNNTRMGFLDDNGDFVSSDFADQQPFSASDKGSGIKRRLTLDHDGNLRLYSLSNGEWLVSWVAISQPCNIHGLCGPNGICHYSPTPTCSCPPGYEMNSHGNWSQGCKAIVDISCSVAKVQFKFVHLPDTDFWGSDQQLVNHVSWQACMNICRSDCNCKGFQYLKGEGTCFPKSFLFNGRAYPSHFVSPRNMYLKIPISMNISGMPVSQSNVLDSRKHSLNCDQMDEKTRELFPDVHKTSQGETRWFYLYGFAGAIFILEVFFIGFAWFFVSRWDLDALEIQAVEQGYKVMASNFRRYNYKELAKATRKFKCELGRGGSGIVYKGTLDDGRVVAVKMLENVRQCEEEFQAELRIIGKINHMNLVRIWGFCSENSHRMLVTEYIENGSLANILFNENILLEWRQRFNIAVGVAKGLAYLHHECLEWVIHCDVKPENILLDGNFEPKIADFGLAKLLNRGGSNQNVSRVRGTIGYIAPEWISSLQITAKVDVYSYGVVLLELVSGKRVLDLATSANEEVHVVLRRLVKMFANNLSGNEPSWIAEFVDCRLSGQFNYTQQSHRFTDSAEMGLLSYLYNTAVAIQSWKNHRMNIIGYQQVLKDFLVDDIAQFENGKYV

SEQ ID NO: 111778 - protein, 268 aa, Oryza sativa
  Clone ID: PAT_MRT4530_15724C.1.pep
EGQGGCRSSCTPLPSLPSCAAAAPSVCQRRRRCPLRAPPSLPLPAAPSLPLRISAAVRIQTAFRGFLAKKALVKLQALVRGFLVRRQAAATLQSMQALIRAQATVRAHCTGAGAAAHLPHIHHAPFWPRRSLQERCATDDTRSEHGVAAYSRRLSTSIESSSYGYDRSPKIVEVDIGRPKSRSSSSRRASSPLLDAGCASGGEEWCANSMSSLLPCYLPGGAAAPPPRIAVPTSRHFPDYDWCTLEKARPATVQSTPRYAHAPPKQRP

SEQ ID NO: 111779 - protein, 497 aa, Oryza sativa
  Clone ID: PAT_MRT4530_15725C.1.pep
MGKAARWFRNMWGGGRKEQKGEAPASGGKRWSFGKSSRDSAEAAAAAAAAAAEASGGNAAIARAAEAAWLRSVYADTEREQSKHAIAVAAATAAAADAAVAAAQAAVAVVRLTSKGRSAPVLAATVAGDTRSLAAAAVRIQTAFRGFLAKKALRALKALVKLQALVRGYLVRRQAAATLQSMQALVRAQATVRAHRSGAGAAANLPHLHHAPFWPRRSLVRRWLNLADDIAMYMFDVDVVCWRWMQQERCAGDDTRSEHGVAAYSRRLSASIESSSYGYDRSPKIVEVDTGRPKSRSSSSRRASSPLLLDAAGCASGGEDWCANSMSSPLPCYLPGGAPPPRIAVPTSRHFPDYDWCALEKARPATAQSTPRYAHAPPTPTKSVCGGGGGGGIHSSPLNCPNYMSNTQSFEAKVRSQSAPKQRPETGGAGAGGGRKRVPLSEVVVVESRASLSGVGMQRSCNRVQEAFNFKTAVVGRLDRSSESGENDRHAFLQRRW

SEQ ID NO: 111780 - protein, 265 aa, Oryza sativa
  Clone ID: PAT_MRT4530_15726C.1.pep
MPEELDIVSGGFGERTKIMLEMPQDLPLTEDFIARHIAAYDTNDMCYLHLSLLSQQEQWQVKDFVQWLDEHPDKQAKYQYDLPLGREYLNNIAKYGASDWYHWCIKNWGTKWNAEMLDDSILEELFYDFITIFGLEFYLAIYSKHANEQLVKRYQTAVSHYTGKEKQQLSQLFVIYINALEQKTYDFLGTVFMALDLSDGYKGQYFTPPHIAQAMAAMTLMDCHSIIEKRGFMKLQEPTCGSGVMIIGSYNHLRQEHFNPNSNCG

SEQ ID NO: 111781 - protein, 70 aa, Oryza sativa
  unsure (1)..(70): unsure at all Xaa locations
  Clone ID: PAT_MRT4530_15727C.1.pep
KIVGYKDGVENILIREINILVRGINXILGRVVVVNGNFDEIGRGGNKMSKIKGNVGVKYGWSIIGIGCEV

SEQ ID NO: 111782 - protein, 63 aa, Oryza sativa
  Clone ID: PAT_MRT4530_15728C.1.pep
GNNLELEKHVYEIQRTYIGGLRCQWRAKNTHICCTNWMMEKVLHKLYERKGTNEDSVDLQQVP

SEQ ID NO: 111783 - protein, 467 aa, Oryza sativa
  Clone ID: PAT_MRT4530_15729C.1.pep
MAKSTPAAAAAAPEEATAAALRLRLRRLVAAVTAGGVGGEEAFDEAASALAALRDAELGPPPKDRPGAGAERRRSGHAEAAAVPEQFLCPISSEIMRDPVVLASGQTYDRRFIQEWLSAGNRTCPQTQQVLSNTILIPNHLVRSMIAQWCTENGIALSPLENQEEDLVTNNERKSFSELFDRISSSSNISEKRQAIKDLRLLTKRNSSFRAVIGENPDSISQMISAVSNPELESNSEVLEDTVTTILNLSIHESNKKIIGDDTKAITFLISALQSGTMEARSNAAAAIFSLSALDSNKAKIGESGAMRPLVDLLEHGSMTAKKDAASAIFSLCKLHENKSRATKSGVIDVVLKAISDESLTDESLTILALLSSDHETVEEIGETGGVPCMLHIIKDDQCKRNKENAVAVLFSICMYDRTKLREVVEDENLNGSLAWLAQNGTSRARRKAAGILDKLKRTIHKTHYSC

SEQ ID NO: 111784 - protein, 50 aa, Oryza sativa
  unsure (1)..(50): unsure at all Xaa locations
  Clone ID: PAT_MRT4530_1572C.1.pep
LISISSLPTSIMLLLPHFDMHKIPPLPPKCMXDFSPLITTXDDQRGXRTQ

SEQ ID NO: 111785 - protein, 32 aa, Oryza sativa
  Clone ID: PAT_MRT4530_15730C.1.pep
EDRKNSYLCNTMPIAATIMSYEEESPIVKDMM

SEQ ID NO: 111786 - protein, 91 aa, Oryza sativa
  unsure (1)..(91): unsure at all Xaa locations
  Clone ID: PAT_MRT4530_15731C.1.pep
MAAGSSLLLLXVVLCXXXSGTALXITXGXLXNXNFKRGPAPXQLXGTXXVGASAIPSWRTSGFLEYIPSGRKQGDMVLVVPXXSHAVAARK

SEQ ID NO: 111787 - protein, 37 aa, Oryza sativa
  Clone ID: PAT_MRT4530_15732C.1.pep
NSSPSSILTKFPILTFKPTYLNKSFYTLLYLSTIINN

SEQ ID NO: 111788 - protein, 193 aa, Oryza sativa
  unsure (1)..(193): unsure at all Xaa locations
  Clone ID: PAT_MRT4530_15733C.1.pep
PPPPPPPPRRASSPSPPPRPXLPPPXXXPPPPPAPPPPPXPPPPXXPPRPNPRAPPXAPPNXWYPPPPVLKXRTPCPPVRPPPXPWQGPLPGSALPGAGEAPPPGPVTPPPPFFSPGGGPESSLGGCLGCILGFFFSWAFGLGCSPSWGLVFSPNWVWFPCAFWPPPRGFGFSPVWPLGFCSKKPIVFVWEFS

SEQ ID NO: 111789 - protein, 104 aa, Oryza sativa
  unsure (1)..(104): unsure at all Xaa locations
  Clone ID: PAT_MRT4530_15734C.1.pep
GAPPRPHPSLPXPPAPLRLFRCPPPVPRHRGRPRPMGHKTPCRRAPPRTSAPPPPPSPRPPAPNANQAGRAPFPSPAYLQHSPLGRQSPAPLQGNPNPPPDNYE

SEQ ID NO: 111790 - protein, 77 aa, Oryza sativa
  Clone ID: PAT_MRT4530_15735C.1.pep
IGDFHFQHFIMHHPQGFHTWSHGQCHGMPSGTLHLFSHHCGTPPFHHSCHHNSRLHPRHNPPHSGWGQSGSPRADPS

SEQ ID NO: 111791 - protein, 99 aa, Oryza sativa
  Clone ID: PAT_MRT4530_15736C.1.pep
MGALTLTCGPGRVPRPQGEAEPFPGACKVFGHGPRRGLVDESVRNGDEGGGDEGCTQAAGDPTGGGCSQAAGTPFTKRRTTIHGAEMTPETNFAVAKTH

SEQ ID NO: 111792 - protein, 910 aa, Oryza sativa
  Clone ID: PAT_MRT4530_15737C.1.pep
MACNESIESRIILTDQSNLRLVSLALDEQKGSVILCTTKNQPQHMEAAAGAGGAIGGSGREAAAEEEDGGEQWLEEEAEAEAVYCAVGKEAVKEWKANLMWVLAAFPWRRRRSRIVLIHVHRPPSRVNMMGAWVPVSQLAEEEVNAYRQLEEERISKVLDDLLDICKSQKVNASKIIFSCDDIARGLLQLVDDHGITDLVMGAASDKAYSRKMRAPRSKKARKVQLKASPSCKIWFVCKGNLICTREVNEGLNRTGSSTTSTTPRSSTSDYSRSRSSPRVHSLSSEQFGMQDPAEPTTSSVDQTPIREDNAMDRGTEGFNHEAVAVASSSTVPVSENVEAVQRSAAAVVQSLQEIEEDSPTPSGHGSEDAGDVSDAYDKFKDAVIEAENLRHEAYEETRRRQKVERDLADATRIANEAESSQQREARHRKEVEERLARERAAMEQDRRELDDILEQTREVDARAAELELQITSSERMMRDLEAKLSESYDLLHQLRRERRRDDVPAEAMAGSEAGDQRLTFLRLGLPELEEATNHFDESVRIGGGDGSRGSVYRGDLRSMAVAVKMIGRDVAVDEVGFCREVEAVGRARHPNLVTLVGACPEARAVVHEFVPGGSLEDRLAGAAPALPWHELCGVAHRACSALAFLHSTQPRATVHGDVRPANILLGEECCSSKLAGLGMCRLVRSSGGVALSRPAVGYVDPRHLATGEMTPERDVYALGVVLLRLVTGKPPLMAKQEAREAAGGSKAWHEVFDASSGGWPLEVAREVALVGLKCCDVEEEPAGARRPGELLEEACGVLEAAMSAAPGRSWSSVSSSSDGGEGGAPSYFVCPILKEVMRDPQIAGDGFSYEAEAIREWLRSGRDTSPMTNLKLPRRELVPNHPLRDAIHHWRLRRAMRTNFTTGLDSYYY

SEQ ID NO: 111793 - protein, 57 aa, Oryza sativa
  Clone ID: PAT_MRT4530_15738C.1.pep
IPLARRQCCLVKHWDSVSERIQLVGQEGLVHYRGDYIGWPLYGTLAIRSIYDGRELQ

SEQ ID NO: 111794 - protein, 1323 aa, Oryza sativa
  unsure (1)..(1323): unsure at all Xaa locations
  Clone ID: PAT_MRT4530_15739C.1.pep
MGSRGRMLFDLNELPTEAEEEEAAVVVSQPQKTLPVPTAGPSLFPQQEVTQSQGILNNNAFKHAPSGSGFQPFVRSKDSQITKEPIKAEDNLNASIASTSMLINHSSDGVAKMIGSSNQVSQAVEREEGEWSDADVASDTAGSSVSNKEELAGTATTQVKRDSQESEPTAVKSGNMIKDEAAAEPSDTEMMDVPKDPVVRGPTGLESTKNLENKGNQLGDDSDLSNKSKDVRGVEANYALKFASNPSKRPKLDEHKEAMLGKKRARQTVFINVEDAKQAGTMKTSTPRRQSSFPAPIVTRTVKEAFRSGGGIAERAAERQSQPTIRDQRQSEMLGSERSNSADPIDQISESNGDAETGSQGRPKKMNAEEAPADGYQQPMPRQLKGRQISSQRSVVTGQNTVDQKPVNKRSLVSKKQTPANNMQYQDTSVERLIREVTSDKFWHNPEEAELQCVPKSFESAEEYIRVFEPLLFEECRAQLYSSYEESLESVSRDAHVMVRVKTVERRERGWYDVVVLPMHEYKWTFKEGEVAVLSFPRPGSASQSSRSNRRNVGSNEDTESECGRLVGTVRRHTPIDTRDPIGAIIHFYLGDSFDSSSETNVLRKLQPRSTWYLTSLGSLATTQREYVALHAFRRLNVQMQNAILQPSPEHFPKYEEQPPAMPDCFTPNFADHLHRTFNGPQLSAIHWAAMHTAAGTSNGAVKKQEPWPFTLVQGPPGTGKTHTVWGMLNVIHLVQYQHYYAALLKKLAPESYKQVSGNTSNSSETVAAGSIDEVLQSMDQNLFRTLPKLCPKPRMLVCAPSNAATDELLARVLDRGFIDGEMKVYRPDVARVGVDSQSRAAQAVSVERRTDQLLMKGRDEVIGWLQQLKCREQQLSQEIALLQRELTMVAAAGRSQGSVGVDPDVLAQRDRSRDFLLQKLAASVESRDKVLVEMSRLLILESRFRVGSNFNMEDARASLEASFANEAEIVFTTVSSSGRKLFSRLSHGFDMVVIDEAAQASEVAVLPPLSLGAARCVLVGDPQQLPAXSTEDGKDIYINTVDAFQGVQRDVIIMSCVRASNHGVGFVADIRRMNVALTRARRALWVVGNAGALMQSEDWALLIADAKARKCFMDLDTIPKDFLAMKISNTPGRNTSNNIRNMRTGGPRPRHLEMLPDSRVSMRPDEDERSNSVPRNGSYRNLDDLGRPGDRSRDNLPFGMPRRPNSSNGSRREPWTVLDGQGGVYSEDVHLALPVDGMVMGRCWYSQHQTIDYETKPLVTMGCKPQIYMHGHFHFENMPGEKQLSLALEQAWSISEFLLFGRMLVLSSILQAAWMLVSMVVI

SEQ ID NO: 111795 - protein, 1374 aa, Oryza sativa
  unsure (1)..(1374): unsure at all Xaa locations
  Clone ID: PAT_MRT4530_1573C.1.pep
MSNEVNHVGKAPMFNGTNYSTWKIKMSTHLKAMSFHIWSIVDVGFAITGTPLTEIDHCILQLNAQAMNALFNSLSQEEFDRVSNLETAYEIWNKLAEIHEGTSEYKDAKLHFLKIQYETFSMLPHESVNDMYGRLNVIMNDLKGLGANYTDLKVAQKMLRALPEKYETLVTMLINSDMSSMTPASLLGKINTNDMYKLKKKEMEEASPSKKCIALQAEVEDKGKGKVNEANEDLEEDIALLARRFNDLLGRRKERRRGSNSNRRRNRRPNKTLSNLRCFECGEKGHFASKCPSKDDDGDKSSKKKSGGYKLMKKLKKEGKKIEAFIGEWDSNEESSASSGSKEEGGDDASSKKKKMAIVAIKEAPSLFAPLCLMAKGYSKVTSLSDSESDDDCDDVSYDELVSMFEELHAYNEKEIVKFKALKKDHASLNVFSSFSSCVSICDASLVVENNELKEQVAKLNKSLERCFKGKNTLDKILSEQRCILNKEGLGFIPKKGKKPSHRATRFVKSNGXAHDGSIVPRYVGSPILGGELPHRWEPXVLDSGCTQHMTGDRAMFTTFEVGGNEQEKVTFGDNSKGKLFKKFVKRVQNEFNCTLVKIRSDNGSEFKNTNIEDYCDDLGIKHKLSATYSPQQNGVVERKNCTLIEMARTMLDEYGVSDSFWAETINTACHATNRLYLYRLLKKTSYELIVGRKPNVAYFRVFGCKCYIYRKGARLTKFESRCDEGFLLGYASNSKAYQVYNKNKGIVEETADVQFDETNGSQEGHKNLDDVGDEGLMRAMKNMSIGDVKPIEVEDKPSTSTQDEPSTSATPSQAQVEVEEEKAQEPPMPPRIHTALSKDHPIDQVLGDISKGVQTRSRVASICEHYSFVSCLEPKHMNAMHEELNNFARNKVWTLVERPRDHNVIGTKWVFRNKQDENGLVVRNKARLVAQGFTHVEGLDFGETFAPVARLEAIRILLAFASCFDIKLFQMDVKSAFLNGEIAELVFVEQPPGFEDTKNPNHVYKLSKALYALKQAPRAWYERLRDFLLSKDFKIEKVDTTLFTKIIGDDFFVCQIYVDDIIFGSTNEVFCKEFGDMISREFEMSMIGELSFFLGLQIKQLKDGTFVSQTKYIKDLLKRFGLEDAKPIKTPMATNGHLDLDDGGKPVDLKLYRSMIGSLLYLTASRPDIMISVCMCARFQAAPKECHLVAVKRILRYLNHSSTIGLWYPKGAKFKLVGNSDSDYAGCKVDRKSTSGSFQMLGRSLVSWSSKKQNSVALSTAGAEYVSAGSCCAQLLWMKQTLLDYGISFTKTPLLCDNDSAIKIANNPVQHSRTKHIDIRHHFLRDHVAKCDIVISHIRTENQLADIFTKPLDETRFCKLRNELNVIDFSNVA

SEQ ID NO: 111796 - protein, 79 aa, Oryza sativa
  Clone ID: PAT_MRT4530_15740C.1.pep
PRRCHTLINTSQLKNHFLKGTKEIIKSLKEISNTKSISNSLSTQLSKPKIGQISQKHYLTLQAIKPIHWPTLASLPGWL

SEQ ID NO: 111797 - protein, 256 aa, Oryza sativa
  unsure (1)..(256): unsure at all Xaa locations
  Clone ID: PAT_MRT4530_15741C.1.pep
PRVREVIGWLQQLKCREQQLSQEIALLQRELTMVAAAGRSQGSVGVDPDVLAQRDRSRDFLLQKLAASVESRDKVLVEMSRLLILESRFRVGSNFNMEDARASLEASFANEAEIVFTTVSSSGRKLFSRLSHGFDMVVIDEAAQASEVAVLPPLSLGALGVSWLGDPQQLPATVISKAAGTLMYSRSLFERFQLSGCPTIXLSVQYRMHPQXIREFPSRHFYQGRLTDSGKVFVKLPDEAYXXRDALMAPYIFYDI

SEQ ID NO: 111798 - protein, 137 aa, Oryza sativa
  unsure (1)..(137): unsure at all Xaa locations
  Clone ID: PAT_MRT4530_15742C.1.pep
LPFGMPRRPNSSNGSRREVXRMHCCNCTFAWSVQPWTVLDGQGGVYSEDVHLALPVDGMVMGRCWYSQHXQTIDYETKXPLVTMGCKPQVPVPRDGILLDGCLMEQSCFMSSVFRNITGFPYLVTRIEQGVSWTDYA

SEQ ID NO: 111799 - protein, 94 aa, Oryza sativa
  Clone ID: PAT_MRT4530_15743C.1.pep
NIYHYKQSHPRAVAPRLRHFGRLRPRLQRRPRPPQARPERPPRVLPKEANKEVAKDNNASLGTRAEAGIDALKDKGNEHKHDASATANKEAAKH

SEQ ID NO: 111800 - protein, 67 aa, Oryza sativa
  Clone ID: PAT_MRT4530_15744C.1.pep
MIKSDERQGRWLKGRLGKAMTAVNDGDEQIGSSGEMMTTYGDGGTNWAWRLRKGEDGREGLQRLKGW

SEQ ID NO: 111801 - protein, 112 aa, Oryza sativa
  Clone ID: PAT_MRT4530_15745C.1.pep
SLKRLGIAVSSAAEAAALVARVDANSDGLIDIHEFRELYDSIPKRRKSHQQHPLPSTAAADEEAAAADEEYEAEEEERDLREAFDVFDGNKDGLISAEELGTVLESLGLRQH

SEQ ID NO: 111802 - protein, 108 aa, Oryza sativa
  Clone ID: PAT_MRT4530_15746C.1.pep
EKSGGLPDPPGFGRTITAQCLFQDDGKAAAAPVERYVGTLFTKAGDEVLHKYTTPTATPSTPKGERFRIQGVRTPGGGYVGPKPSLSPRPKPAQSARSSHVRAPSDAD

SEQ ID NO: 111803 - protein, 84 aa, Oryza sativa
  Clone ID: PAT_MRT4530_15747C.1.pep
MGYARGTSVPQRDCSGHICLWAQPPAGYTQADSHPPWVVLGVHLASKHAPLWAVLGAHLTCAWRLSARGHKEHVERARSTSLRC

SEQ ID NO: 111804 - protein, 48 aa, Oryza sativa
  Clone ID: PAT_MRT4530_15748C.1.pep
DNTPSKHRTISLSFLPPTNLRIHHYKLTLTRPCPQHLLPSMMLPYPWR

SEQ ID NO: 111805 - protein, 75 aa, Oryza sativa
  unsure (1)..(75): unsure at all Xaa locations
  Clone ID: PAT_MRT4530_15749C.1.pep
MYSTVQLLFHKTFNLFKKKKKKKKKKKKKKKKKKKKKKKKKKKKKKKKKKKKKNKKKKKKXGGPFLKKQILLTGC

SEQ ID NO: 111806 - protein, 114 aa, Oryza sativa
  Clone ID: PAT_MRT4530_1574C.1.pep
HASDCLGDLRPGDHFDIQWRKNKDFPYGWWYGVVGHQETCNANEHLCRCHEDDMVVLEFKHYAAGSRWRQTTVSRKDHREKVDETDGFYGGIRKLQTSDEISTWRKFWPVDVLN

SEQ ID NO: 111807 - protein, 63 aa, Oryza sativa
  Clone ID: PAT_MRT4530_15750C.1.pep
KPLDLLGWAGDRGVFGGGVPQTGFARKAPQGAQLVQKHQRDGVRKTPMFILYKRSTSGLINCS

SEQ ID NO: 111808 - protein, 907 aa, Oryza sativa
  Clone ID: PAT_MRT4530_15751C.1.pep
MAPGWRCKYCHQRKGGGGATRLKIHLAGKGKGVTYCNSVPPDVREFFRRELDRIKDAGDTRQSERARRVEAAGVNYYDLSGDADEEEQMEAAMEASRQEASFRRGVEQRGGTYEHGGGSGSAQSEARKGRSNPIARFFTKKGRQAREAIGESWARFFYTSGIPARNADNSYFVSAVRETQKWGENIPSPSGSEIHGKYLDATEKDVKKQFDRFKRDWNEYGVTLMCDSWTGPAGMAVINFLIYCNGIMFFHNSVDATGHSQDANFVLKEIRKVVRELGPQHVVQIITDNGSNYKKACRLLRQEYPTIVWQPCVAHTINLMLKEVGKMPDHEMVIESARKICRWLYNHSKLHAMMVSAIGGELVKWNATRFGTNYMFLQSFLRRRDQFMQWMASSGFMQSKFSGTMDGRYAHACLSSMSWWENLQTVVNSVQPMYSFLRFADEDKNPNLSEVLLRYQLLRMEYDSLFASERDKFEAYMEIVNRRMHDLTNQTLINASAALNPMTHYQYSPSASVFQDLRQAFEWMTDIDTAAAALLEVEMYRRKTGEFGRALARKMATDGKTSPAQWWSMFASDTPNLKRLALRMVGQCCSSSGCERNWSTFAFVHTKQSNAQVRKEDDDPLQRLSDLSFYESNNQIKKWMDNARSNANPELDEDSTESDAPVPSPLVANLVDLTDLRRTTGASTIAEWADVNIADTHIGKRKTRQPPKKPTSKRAKGTGPQSRNVDSDEETEHSPDYQESNDSSSRTDTDDGDDGGEGGEGTTEVPSGGHHSPIQFTGEADFTHATQDRDHGAPSSQRTTVSPSDQQQRQHLDIPQDSYSSFSASSIESGYPRYAYNRPQPSDYPPPTWVYEWQEPQWYAQLYAQWQTTASWTGQSWEEYKAGLLQSHGLMLMSTEEYNMAYNQWNL

SEQ ID NO: 111809 - protein, 257 aa, Oryza sativa
  Clone ID: PAT_MRT4530_15752C.1.pep
MKPRPTGFGAAAAAAAEVLVGGGCGGWAWRPRPRPATVASTAAMSVRGPGTTQAAAAASAVHSERHRGGVHGLQLPPLRLQFTADLEARIEKVIYACRFMTFLAIRTRGIGSVPCFLKGCVYVMDAFIEYYLHGGGKVTLMLVEAIDMFLVGTVMFVFGTGLYELFISNMDIAKSSSYGSNLFGLFRLPERPEWLEIQSVNDLKTKLGHVIVMVLLVGIFEKSKRVTITSCTDLFCFAASIFLSSACLYLLSRLSSK

SEQ ID NO: 111810 - protein, 768 aa, Oryza sativa
  Clone ID: PAT_MRT4530_15753C.1.pep
MDYCDAWLKRKNESNLLSTVVPGASDNQKMQDTDEMSPKAICDSDAPESDMDFPPGFGPNQESAEHSHSACVEYVTEKTDGRSGSSITLFSGPLGRVQERIRTPVHAPEPSSPPGISVHETPSPAEMPRDEISDMAEMARDEISDMAVDTIPCPADMAASGTSTVPEVTTDKLIIPYVEHQSPSASHASIFEKLDAHEEAELDDSFDEVPPGTEAGLASLVIMEKNKYQPSKSVDSVLDIYRYTSWAFFRQILHESVMKEWASLFSGALSNCFDSWYARKNIVAKTMDDTLRPKEYTYYRKRKLRKNCEASSSEKPMDEQLSRPLRDLVECKVNMKNIHRSSKAGISQRVSVVEKPSKKRAKPSHNDNINLNIQQDLKLLSDKVPKRNRSSHPTSKPLVSSKVPTEDRTTSAMPAKKRKQKNLATESNLKTKAVILSPESHGCEAPTEKRTTAIMPVNKRKKNLSGESKLKAKPLTSPESYVCEAPIDNRTTSTMPAKKRKQKNLSNESNLKKKPLVLCPESYGCARASVSGWEWRDWARNATPSERAQVRGYRVRSILSAPENNVLKSSQVKGSSARTNRVKLRNLLAAAEGTDLLKIMQSKSRKKRLRFQRSKIHEWGLVALESIDAEDFVIEYVGELIRRQVSDIREDQYEKSGIGSSYLFRLDDDYVVDATKRGGLARFINHSCDVPRINELGSKVYKSGGNCNWVLPQYVCVMRACRLYWAEVHCRNVLGFTDRMVRWTNSGYPEEGQQHYYIDWIEDIEFTR

SEQ ID NO: 111811 - protein, 165 aa, Oryza sativa
  Clone ID: PAT_MRT4530_15754C.1.pep
PTRPAKEALFQHFEEVISEEITNCLCIGFEDDINQERIRTPVHAPEPSSPPGISVHETPSPAEMPRDEISDMAEMARDEISDMAVDTIPCPADMAASGTSTVPEVTTDKLIIPYVEHQSPSASHASIFEKLDAHEEAELDDSFDEEPPGTEAGLSSLVIMEKNKY

SEQ ID NO: 111812 - protein, 174 aa, Oryza sativa
  unsure (1)..(174): unsure at all Xaa locations
  Clone ID: PAT_MRT4530_15755C.1.pep
VKGSSARTNRVKLRNLLAAAEGTDLLKIMQSKSRKKRLRFQRSKIHEWGLVALESIDAEDFVIEYVGELIRRQVSDIREDQYEKSGIGSSYLFRLDDDYVVDATKRGGLARFINHSCDPNCYTKVITVEGQKKIVIYAKRRIYAGEELTXNYKFPLKEKKIPCHCGSTEVPRDQ

SEQ ID NO: 111813 - protein, 128 aa, Oryza sativa
  Clone ID: PAT_MRT4530_15756C.1.pep
LRSNTLLKRGNNSKTEYNYRTQQATPTMQTCKGIQGRVSPPLLARQRAVPSRATVNPEADQPDTPADPTPSRPPLPRVEGRSSIAGNFLGVVPSSQWAGSSFYSLKGYHMCPALPTLHKGDPTSLFGL

SEQ ID NO: 111814 - protein, 55 aa, Oryza sativa
  Clone ID: PAT_MRT4530_15757C.1.pep
VWDEQASELHSLDGSNYGGAGVNGAGRGNSIGGGENNINGGNNTNNVLCFTGAFS

SEQ ID NO: 111815 - protein, 75 aa, Oryza sativa
  Clone ID: PAT_MRT4530_15758C.1.pep
MPTKTSHQVFLFGDNSRYARRICMQCLGVVRWCVLIANRLTLSLYKLHFSQRKEMGMLVNFQVKPFIFISQKPLI

SEQ ID NO: 111816 - protein, 703 aa, Oryza sativa
  Clone ID: PAT_MRT4530_15759C.1.pep
MVHGDSRHSHRRGGASGGDPWIASDVVVPPGTVSSGGDFDHAAGETGHRGRPALADDAGASASRAAAGASDGSGLAGDNADEVMEGAAVTATGDDDEADGGSGALFFGASRKYPEQSCFIDASTVTAKDINELVATGKIPAADRARRPPADEATRTQSPTSPLFTVLSSPPALVFRSSRSSRGCWSTTASSFPNSRPMPSSAWPSMNLDNQHQSLRRVAARLSMRGIMEEFLMLRVILLREGWVHSLTSGDDNTAGAYEGPISSTTMLTPVSTAISDAEKLLGKPVLKEKQEQMEQIGAWERAIRVAARFNLRLLALPSLHEAEEVEVAKARATLHSQCGHRRGSRWDLLNLRWPGPWFGRVRHDLRGLRGICLDYRAPRFGGSLAGPEAEETSTHTTVIAPSASGAEPELHLGAAAAPEKPEAAIHPAAAPETSSGRAGLVADPSSTRDTHAGADAVMVAGAAAVEHGGRDTTDLHTEWLRVWDLQEQAAATLAEAEAARDSSRLAVARADSARRQAELDLTLVHAELARERDRAARLSDELAATKAALASREEEVQASQGRFEQARLILEELNVRAIYAAQALVRAFGSIGVQGPSPPPEDSSVAEKLQWVEKAGKFVAKASAGHGIWCSWATTRMLPLLLRGKGCAHIGPSARAAPSEVTALLASASGVNSSRRDADDFTQTVWPALGHDAAVPAMDSVT

SEQ ID NO: 111817 - protein, 42 aa, Oryza sativa
  Clone ID: PAT_MRT4530_1575C.1.pep
LFVDHWNCNNTCQTCPYRLTANCRIKERTLPNLVCPYLLYSK

SEQ ID NO: 111818 - protein, 54 aa, Oryza sativa
  Clone ID: PAT_MRT4530_15760C.1.pep
AVKKLDRLKDLVARKADHSRAVLADLLYGLLKFEPSERLTAQEALDHPFFRNTT

SEQ ID NO: 111819 - protein, 112 aa, Oryza sativa
  unsure (1)..(112): unsure at all Xaa locations
  Clone ID: PAT_MRT4530_15761C.1.pep
XPXXXGXXPXGGLXPXIPVXLFXXLXVLXXPIXGLXVXXRXYXSPDWTGXVFXRPXXIVXXASKVQCSXXGXWAXSVDXVKGXSXWGXFCXWVFXVGXCPVXXSXXXFXXXX

SEQ ID NO: 111820 - protein, 327 aa, Oryza sativa
  Clone ID: PAT_MRT4530_15762C.1.pep
MVLPSSNTRATSSMAYPVSLSSLHHHPNNHHAFFLPSKTNHDNTHKPIESSRISRRSLIFLPVLPSLLYASSSPALDDANIPSTSAIDTTITDRIFMDFSVCPSYFRSDRTLGAELATCPDSEPLGRVIFGLYGRLLPLTTANFKAACTSAAYRGTLVHKLLQGQFFVAGRQGPRRDRGEVQPPTGLVRNAETIDPKAFELKHARPGTLSLCLGQNDDDDDIKLNPNYHNVEFLVTTGPGPCPELDGQNIVFGTVLEGMNVITSIATIPTYKPAERIRFFNDFAQLIGDERAQTARALWDRPLKTVYISDCGELKVTKPSLSPPSLP

SEQ ID NO: 111821 - protein, 222 aa, Oryza sativa
  unsure (1)..(222): unsure at all Xaa locations
  Clone ID: PAT_MRT4530_15763C.1.pep
KKVGNFKIQLSMAKEILNRIKIARDCRPLTVGEEWLRMKLNLHCLGLASLERTIARSRSQITFLSEGDANNSYFLNQSCYCKKKXIISKLMVDDRVVTSQEEKHEVVFEFYEHILKSARDRDFLLDLPDFDDKKFDIXCLDEPFFDDEIWSTVKAFHLDEAYGLDGFTGCFYKVFGRLSGDILLALAAIQQRHISXIQIVQXAYITLLSEKVDAKQKKNQRQ

SEQ ID NO: 111822 - protein, 375 aa, Oryza sativa
  Clone ID: PAT_MRT4530_15764C.1.pep
MSLPARLLLARGKTTAAQHVAARHLDHTFEKLAAAHLPLVAAAPLVDALRASPAEPLALPGLARRLPLRLHRRGALHFLRLFPRVFDLRAPLPLSLSLTAPAAELLAVAASPAAAAHALHRLLAMSASRSLPLRAVFRVWRELALPDDFEVSVVADHPNLFHLAPNPAEPNTHILHLVADPATEEFTPAVDKTRPEKHAFKLQFPPGFRLTKEYRKKVKEWQQLPYISPYEVSIQKGVGSKRVSKMARKKMEKRAVGIAHEFLSLTVEKMVEVEKFSQFRKWFGIEVNVRDVFLDHPGIFYLSAKGKRHTVFLREAYDRGKLIEPNDVSEARRKLVELMLLRRRGLGNANSNANMASRACAGAKEDTSDFQEEEI

SEQ ID NO: 111823 - protein, 36 aa, Oryza sativa
  Clone ID: PAT_MRT4530_15765C.1.pep
HKPTLGHRISRMKSSTIYKNTSKAAKPLNRMQPTGQ

SEQ ID NO: 111824 - protein, 46 aa, Oryza sativa
  Clone ID: PAT_MRT4530_15766C.1.pep
SGNSPERTKAHLVLYHQLFCFKTFYFYFCWILFVHAHRTVDLLVMR

SEQ ID NO: 111825 - protein, 946 aa, Oryza sativa
  unsure (1)..(946): unsure at all Xaa locations
  Clone ID: PAT_MRT4530_15767C.1.pep
MAGCRTADGTGHPPPLPLRYGDVRGRVAGTDGERITSCLTLGPSNSGDVAVKDMWWVPCHVNAASGGLQVELGGKFIALEAWTRSSFYEPVMNWITGRRKQLELDPQTKAIFVEDLSELSTNISGPWLLFGDFNLTRYPYDKNNSNFDLHLANLFNEKNDDLALLEIPLFDWLFTWSSKREIPTLSRIDRAFINQAWNLSHPNTSLSSLPRTTSDHVPLKISISTSIPKTQVFRFDNHLLCSPNFLPTILWAWVGQLPTHHPTDAAGNLVANLKKSRFATKNWIKAHKLTNDNISDCSLLIDFLDSIEEARPLSTAEFTLRDLVQDKLADLHRCKAIYWKQRSKIKRIKASDENTKFFHAHASHRFRNNGIHSLLLQGSQVFDHDTKADALYEFFYETLGGSANTTWDFHLQDLYPENXSPQCELAADLGTFHSSRSKVCMDCMDNYNAPGPDGFGPSFYKAAWQQIKPYIQNLLTEFHNHSAQLERLNRAYIVLIHKPGKLNSPYCYRPISLQNCHLKLLSKVLANCLQSVLGSLIDWEQTGFMKRRSIXETFLYATEILQCCHKCKLPTAVLKLDFAKAFDSVQWSSLQAILRARNFPNXWQKWIQALLISSKSAVLLNGIPGRWINCTQGLRQGDPLSPYLFILVADILQXMIKNCSAIKHPIIHNLLGATLQYADDTLIICPAEASQLSALKTILNSFAQATGLXINFSKSTLVTLHTPPEASKELADILQCKLESFPQTYLGLPLSATKLPLTAFQPLIAKVNKYLAGWQASLLNYAGRAVLVNSVLDFLPTYAMXRRAFLWTGEESCHGSKCFIAWDLICIDKKQGGLGIKRLHTQNICLLIKMLYRLYTXNSPWTNWIWREHADSALGPHWRSLIALFPLLRSQTNLVVRDGRRNNFWHDIWLDDQPLASRFQALYTHSTKSNCTVQAIIQNGLLPPLS

SEQ ID NO: 111826 - protein, 47 aa, Oryza sativa
  Clone ID: PAT_MRT4530_15768C.1.pep
MELPWGVKAERKRKQICICELAGTSRLCAVDPYQEYNRVEAGTEMLR

SEQ ID NO: 111827 - protein, 335 aa, Oryza sativa
  Clone ID: PAT_MRT4530_15769C.1.pep
MVGRGIDPRIDPLAPGSPLVPVGSDRNPYVDLYGMTTKRRRQTSGTTYALCVSSAGRRRYMINAIIISSICVRTPCRAAARVFVLPGMQSSIIQSVVNCPAAVQQNRCHSQLATYYYASHLLHCCYACTAMQRDPISIDRSGQAKPARALAVASHALAASALIDRDPSPNPIIPGVVVGGGVYTLYSTMLDAADTRPPPPFPPKSLLMSTNAPSPIEHADDQAPNGTDQDRTMWACSYPSRPRKSMPGPMRMSSFAIDPLGIGDRSTQTTYRACQSRSFSNVYAPFAGMSVPRKAHTVLAELAVKFQCGLTRTLARHVVVLHRTYKDPFNAITTV

SEQ ID NO: 111828 - protein, 99 aa, Oryza sativa
  Clone ID: PAT_MRT4530_15770C.1.pep
DTMEYSPRYITGLLQGLMRRIPRRPREHRRTPGEKGLWRATMRMAKHIRKALRQLPRTAEQGEGNGWGKSGCEVQQDGHEPIVTRSEALYRRTLSYAGR

SEQ ID NO: 111829 - protein, 69 aa, Oryza sativa
  Clone ID: PAT_MRT4530_15771C.1.pep
RPEISALEYASQLFFNLFPPKFHMSHMMKSELIFNFRTTKLLKLNARPSRCRSLHPGPFPPLEVSRNEF

SEQ ID NO: 111830 - protein, 1802 aa, Oryza sativa
  Clone ID: PAT_MRT4530_15772C.1.pep
MEEVEAGWLEGGIRWLAETILDNLDADKLDEWIRQIRLAADTEKLRAEIEKVDGVVAAVKGRAIGNRSLARSLGRLRGLLYDADDAVDELDYFRLQQQVEGGVTTRFEAEETVGDGAEDEDDIPMDNTDVPEAVAAGSSKKRSKAWEHFTTVEFTADGKDSKARCKYCHKDLCCTSKNGTSALRNHLNVCKRKRVTSTDQPVNPSSAGEGASNATGNSVGRKRMRMDGTSTHHEAVSTHPWNKAELSNRIQCMTHQLEEAVNEVMRLCRSSSSNQSRQGTPPATNATTSSYLPEPIVYGRAAEMETIKQLIMSNRSNGITVLPIVGNGGIGKTTLAQLVCKDLVIKSQFNVKIWVYVSDKFDVVKITRQILDHVSNQSHEGISNLDTLQQDLEEQMKSKKFLIVLDDVWEIRTDDWKKLLAPLRPNDQVNSSQEEATGNMIILTTRIQSIAKSLGTVQSIKLEALKDDDIWSLFKVHAFGNDKHDSSPGLQVLGKQIASELKGNPLAAKTVGSLLGTNLTIDHWDSIIKSEEWKSLQQAYGIMQALKLSYDHLSNPLQQCVSYCSLFPKGYSFSKAQLIQIWIAQGFVEESSEKLEQKGWKYLAELVNSGFLQQVESTRFSSEYFVMHDLMHDLAQKVSQTEYATIDGSECTELAPSIRHLSIVTDSAYRKEKYRNISRNEVFEKRLMKVKSRSKLRSLVLIGQYDSHFFKYFKDAFKEAQHLRLLQITATYADSDSFLSSLVNSTHLRYLKIVTEESGRTLPRSLRKYYHLQVLDIGYRFGIPRISNDINNLLSLRHLVAYDEVCSSIANIGKMTSLQELGNFIVQNNLSGFEVTQLKSMNKLVQLSVSQLENVRTQEEACGAKLKDKQHLEKLHLSWKDAWNGYDSDESYEDEYGSDMNIETEGEELSVGDANGAQSLQHHSNISSELASSEVLEGLEPHHGLKYLRISGYNGSTSPTWLPSSLTCLQTLHLEKCGKWQILPLERLGLLVKLVLIKMRNATELSIPSLEELVLIALPSLNTCSCTSIRNLNSSLKVLKIKNCPVLKVFPLFEISQKFEIERTSSWLPHLSKLTIYNCPLSCVHSSLPPSAISGYGEYGRCTLPQSLEELYIHEYSQETLQPCFSGNLTLLRKLHVLGNSNLVSLQLHSCTALEELIIQSCESLSSLDGLQLLGNLRLLRAHRCLSGHGEDGRCILPQSLEELYIHEYSQETLQPCFSGNLTLLRKLHVLGNSNLVSLQLHSCTALEELIIQSCESLSSLDGLQLLGNLRLLRAHRCLSGHGEDGRCILPQSLEELYIHEYSQETLQPCFSGNLTLLRKLHVLGNSNFVSLQLHSCTALEELIIQSCESLSSLDGLQLLGNLRLLQAHRCLSGHGEDGRCILPQSLEELYIHEYSQETLQPCFSGNLTLLRKLHVLGNSNLVSLQLHSCTALEELIIQSCESLSSLDGLQLLGNLRLLQAHRCLSGHGEDGRCILPQSLEELYIHEYSQETLQPCFSGNLTLLRKLHVLGNSNLVSLQLHSCTSLEELKIQSCESLSSLDGLQLLGNLRLLQAHRCLSGHGEDGRCILPQSLEELFISEYSLETLQPCFLTNLTCLKQLEVSGTTSLKSLELQSCTALEHLKIQGCASLATLEGLQFLHALRHMKVFRCPGLPPYLGSSSEQGYELCPRLERLDIDDPSILTTSFCKHLTSLQRLELNYCGSEVARLTDEQERALQLLTSLQELRFKYCYNLIDLPAGLHSLPSLKRLEIRSCRSIARLPEKGLPPSFEELDIIACSNELAQQCRTLASTLKVKINGGYVN

SEQ ID NO: 111831 - protein, 347 aa, Oryza sativa
  Clone ID: PAT_MRT4530_15773C.1.pep
MAWPFLQRRGMDTLKSLITNSAADVYLSQMPERFAVADLGCSSGPNALCLAEDIIGSIGRICCRSSRPPPEFSVLLNDLPTNDFNTIFFSLPEFTDRLKAAAKSDEWGRPMVFLSGVPGSFYGRLFPAKSVHFVCSCSSLHWLSQVPSGLLDEMNRPINKGKMYISSTSPLAVPVAYLRQFQRDFSLFLKSRAAEVFSGGRMVLAMLGRQADGYIDRRTTFLWELLSESFASLVAQGLVEEDKVDAYNVPFYAPSIGEIEEEVRREGSFRMDYVQTYEINLSSSGDARRDGRTVSMAIRAIQESMLSHHFGPEIVDALFAKYTELVTASMEREEVKSVQIGVVLTRL

SEQ ID NO: 111832 - protein, 1885 aa, Oryza sativa
  Clone ID: PAT_MRT4530_15774C.1.pep
MEEVEAGWLEGGIRWLAETILDNLDADKLDEWIRQIRLAADTEKLRAEIEKVDGVVAAVKGRAIGNRSLARSLGRLRGLLYDADDAVDELDYFRLQQQVEGGVTTRFEAEETVGDGAEDEDDIPMDNTDVPEAVAAGSSKKRSKAWEHFTTVEFTADGKDSKARCKYCHKDLCCTSKNGTSALRNHLNVCKRKRVTSTDQPVNPSRLRYIADLSNRLTTITCSSSAGEGASNATGNSVGRKRMRMDGTSTHHEAVSTHPWNKAELSNRIQCMTHQLEEAVNEVMRLCRSSSSNQSRQGTPPATNATTSSYLPEPIVYGRAAEMETIKQLIMSNRSNGITVLPIVGNGGIGKTTLAQLVCKDLVIKSQFNVKIWVYVSDKFDVVKITRQILDHVSNQSHEGISNLDTLQQDLEEQMKSKKFLIVLDDVWEIRTDDWKKLLAPLRPNDQVNSSQEEATGNMIILTTRIQSIAKSLGTVQSIKLEALKDDDIWSLFKVHAFGNDKHDSSPGLQVLGKQIASELKGNPLAAKTVGSLLGTNLTIDHWDSIIKSEEWKSLQQAYGIMQALKLCYDHLSNPLQQCVSYCSLFPKGYSFSKAQLIQIWIAQGFVEESSEKLEQKGWKYLAELVNSGFLQQVESTRFSSEYFVVHDLMHDLAQKVSQTEYATIDGSECTELAPSIRHLSIVTDSAYRKEKYRNISRNEVFEKRLMKVKSRSKLRSLVLIGQYDSHFFKYFKDAFKEAQHLRLLQITATYADSDSFLSSLVNSTHLRYLKIVTEESGRTLPRSLRKYYHLQVLDIGYRFGIPRISNDINNLLSLRHLVAYDEVCSSIANIGKMTSLQELGNFIVQNNLSGFEVTQLKSMNKLVQLSVSQLENVRTQEEACGAKLKDKQHLEKLHLSWKDAWNGYDSDESYEDEYGSDMNIETEGEELSVGDANGAQSLQHHSNISSELASSEVLEGLEPHHGLKYLRISGYNGSTSPTWLPSSLTCLQTLHLEKCGKWQILPLERLGLLVKLVLIKMRNATELSIPSLEELVLIALPSLNTCSCTSIRNLNSSLKVLKIKNCPVLKVFPLFEICQKFEIERTSSWLPHLSKLTIYNCPLSCVHSSLPPSSIVSKLSIGKVSTLPTVRGSSSGTLIIGLHPDEVDDDDGLEDSDQLKTLDDKVLLFHNLRFLTSLAIYGCRNLATISIESLRQLVCLKSLELYGCPKLFSSDVPPELTCEYMSGANHSALPSLECLYIEDCGITGKWLSLMLQHVQALQELSLEDCQQITRLSIGEEENSQPNLMSAMEDPSLGYPDRDELLRLPLNLISSLKKVSITYCYDLTFYGSKVDFAGFTSLEELVISRCPKLVSFLAHNDGNDEQSNGRWLLPLSLGKLEINYVDSLKTLQLCFPGNLTRLKKLVVLGNQSLTSLQLHSCTALQELIIRSCESLNSLEGLQLLGNLRLLCAHRCLSGHEEDGMCILPQSLEEIYICEYSQERLQLCFPGSLTRLKKLVVLGNQSLTSLQLHSCTALQELIIQSCESLNSLEGLQWLGNLRLLQAHRCLSGYGENGRCILPQSLEELYIREYSQETLQPCFPGNLTSLKKLEVQGSQKLISLQLYSCTALQELMIESCVSLNSLEGLQWLVNLRLLRAHRCLSGYGENGRCILPQSLEGLYIREYSQEILQPCFQTNLTCLKRLEVSGTGSFKSLELQSCTALEHLKIEGCSSLATLEGLRFLHTLRHLKVHRCPRLPPYFESLSGQGYELCPRLERLEINYPSILTTSFCKNLTSLQYLELCNHGLEMERLTDEEERALQLLTSLQELRFNCCYNLVDLPTGLHNLPSLKRLEIWNCGSIARPLEKGLPPSLEELAIVDCSNELAQQCRLLASKRKCALKNCSHMQFS

SEQ ID NO: 111833 - protein, 155 aa, Oryza sativa
  unsure (1)..(155): unsure at all Xaa locations
  Clone ID: PAT_MRT4530_15775C.1.pep
RRLPPPPSADSPPPPPGALLSPRALLSFPHIARAPGAGPAPTALAPFPNRAHASGAGPPPAALAXPAPLLLQPSPPGASSPIHPPPALLLPLPPNLCFIRAFTSTRLCVLLWDSLPGDSLAASPPSVYLLGRVMDATGDLCSCFLSSVPACIVQN

SEQ ID NO: 111834 - protein, 110 aa, Oryza sativa
  Clone ID: PAT_MRT4530_15776C.1.pep
MIINACSRATFTMAALMRGQGGHLRRAPELVANNVLGQAPSPEWAGHAESPVRESTHTPHHRAGEVRLLSAARRRARQWEPVLADHSHAETQLQVARHPPCRAQHVRGVA

SEQ ID NO: 111835 - protein, 182 aa, Oryza sativa
  unsure (1)..(182): unsure at all Xaa locations
  Clone ID: PAT_MRT4530_15777C.1.pep
DCIFLREKKEETICDVTMSTTDTTISHIMDEQEDIKIKSSKCXNPIRPPTTLLTSNGRRICIRPPFSAHEYLMEGSRNPLSNRSSLAAKFHVVWPQSHKQARVSARPSVCLYSKPXLSCVFIPICNSDLFYLVLTCFFDLLAGIRLICTGKINNPRRVASIAKAQHNVLYGCSWVVNISPKS

SEQ ID NO: 111836 - protein, 108 aa, Oryza sativa
  Clone ID: PAT_MRT4530_15778C.1.pep
MHGLQLALGRGAANSCYASCPRRLKRGSKPLPAPAVGTTVPQSPTVGPPLRRRLLCRMPCRRLLSSRSSLPTAGRGATVGCYATCPRRLKRGSPLPPAPAPRRGSERY

SEQ ID NO: 111837 - protein, 94 aa, Oryza sativa
  unsure (1)..(94): unsure at all Xaa locations
  Clone ID: PAT_MRT4530_15779C.1.pep
MPEKKKKKLRHYTQGRGLDSTFLSNKRGTISKKLNLSHDGXTPAHVPCXXXNNXTLGEFCFTMXFXAEVAGSKSDVAXNKCXXSVSXPSSLQRR

SEQ ID NO: 111838 - protein, 693 aa, Oryza sativa
  Clone ID: PAT_MRT4530_1577C.1.pep
MAEKIVDPSRRRDIPRAARAAAVADLALAAGHRAAARRRRRTPYWGGEGFGEMPPKRQRSAAGPSGEAPVNSLDDGCLMHIFSFLSPIPDEDVTKHLLQGMIRRVCLSARNCEFMTPRVSNTPPDRYNTALVCHRWRFLACHPRLWLRVERPIRNTIEPGVYPNLESAVSAARPGDTILIAAGGTHVARNIQIKKPLCIQFFFVVDATLSLRLSFAYCQIGGGELPDDTVLTCSRGSDNALEFHSTCKIANLTIRAELGCCLLHRSGRLTIEECLLQCEQNPLDYLSFPIISTAIEYDSFSSLKEQGHGVTVVRTRIEGGAKAVRTNGTLALQHVRAIYSRSSVFFWFEVGERHLARDTVHFDIKLLWAQPDVPASSSEVSMMDSISIGLSMASVTYLDDAHSEVIDPPKNEEMLDVTELVDDHTQHSPKPNAMVSGNVRELLECPVCLNAMYPPIHQCSNGHTLCSGCKPRVHNRCPTCRHELGNIRCLALEKVAASLELPCKYQNFGCLGIYPYYCKLKHESQCQYRPYTCPYAGSECTVAGDIQYLVSHLKDDHKVDMHNGSTFNHRYVKSNPHEVENATWMLTVFSCFGQYFCLHFEAFQLGMAPVYIAFLRFMGDDAEAKNYSYSLEVGGSGRKMTWQGVPRSIRDSHRKVRDSYDGLIIQRNMALFFSGGDKKELKLRVTGRIWKEQ

SEQ ID NO: 111839 - protein, 53 aa, Oryza sativa
  Clone ID: PAT_MRT4530_15780C.1.pep
LGSCVCPISVVLLGHPILRKRNGIYTLRLKKKKEGAPLRGIQASWRVPWTSRL

SEQ ID NO: 111840 - protein, 56 aa, Oryza sativa
  Clone ID: PAT_MRT4530_15781C.1.pep
MTVCLRFQPTLSVSCRPTPKSLVVASPPCRFAFLARARPPPHQAGEAPGRREWGGD

SEQ ID NO: 111841 - protein, 188 aa, Oryza sativa
  unsure (1)..(188): unsure at all Xaa locations
  Clone ID: PAT_MRT4530_15782C.1.pep
LLLMRQSEXQEARLRLAGGLRIAHQQLGNIQLASQYLTILGTLALQLHDCGQAREILKSSLTLAKTLYDIPTQIWILSVFTELYRELKERENEMENSEYERKKEDDLQRRLSEAHSSPFHQELVEKTRIQVQQLHNFSREQQGMPGPTTAKADLDIPESVGLYAAQPSSVKRLIEPSSVRRSSRRRLS

SEQ ID NO: 111842 - protein, 1819 aa, Oryza sativa
  Clone ID: PAT_MRT4530_15783C.1.pep
MQKGQRVQELAAELGTVERTLAQPGLKERERSALTHKQRQLKYQLQTLCGYDKLNDVLDYGDKLLLAPPPMHGEWLPRAAVFVLVDLMVVMVSRPKGIFKECGKRIHSGLELIRGELSKLGIVDGVTEANLEHSTIWTAGLYLMLLLQFLENKVAVELTRSEFVEAQEALAQMINWFTRFPTILRGCENTIEMLRGQYAHSVGCFDEAAFHFLEAARLTDSRSMQSMCQVYASVSYICMGDAESTSQALELVGPAYRTMDSFVGVREKTCIIFVYGLLLMRQQNPQEARLRLAGGLRIAHQQLGNIQLVSQYLTILGTLALQLHDCGQAREILKSSLTLAKTLYDIPTQIWILSVFTELYRELKERENEMENSEYERKKEDDLQRRLSEAHSSPFHQELPRLTHEAPFQVEKTRIQVQQLHNFSREQQGMPGPTTAKADLDIPESVGLYAAQPSSVKRLIEPSSGAAANVYRHASYIGESQKLCAALVLKSFSNCQVPTAYFRRMESDGEDTPAAAARACGAGHRASHSLPTSAGGRVCLSCAAALLSSAASAPAHHVSHALAALSLALADPAFLAPLRAAHPRLLAAPLAEALAGAASRRDAALAAQASDLAADLAAAVGSPAASDLVARVARALSSGSLVKHLHTLHCLGILLNSTKDAATYIGDKQSLYLNLVNNLRLPRLIPLHIDTFLALRITLSDSILNLFWYSDEIRGEILFVLYKLSLLNATPWDDICDNDNVDLSAIGRSLLQFSLEVLLKTQNDDVRLNCIALLLTLAKKGAFDILLLSDPSLINSAEAEDNVPLNDSLVILFAEAVKGSLLSTNIEVQTGTLELIFHFLSSDANIFVLKTLIDQNVADYVFEVLRLSGNNDPLVISSIKVLSILANSEERFKEKLAIAVSTLLPVLHYVSEIPFHPVQSQVLRLVCISIINCSGILSLSQEEQIACTLSAILRRHGNGELGMSSETFALVCSMLVEILKLPSADDIQKLPSFIVEASKHAISLTFSHEYDCLFLIPHSLLLLKEALIFCLEGNKDQILRKKSLEDSIIETCETYLLPWLESAIVDGNDEETLSGILQIFQIILSRASDNKSFKFAEMLASSSWFSLSFGFMGLFPTDHVKSAVYLVISSIVDKVLGISYGETIRDACIYLPPDPAELLYLLGQCSSEDFNLASCQCAILVILYVCSFYNERLAADNQILASVEQYILLNGAKFPHEIPGSLMLTLLVHLYAFVRGISFRFGIPHSPEAEKTLFHAMTHKEWDLLLIRVHLIALKWLFQNEELMEPLSFHLLNFCKFFCEDRTVMLSSSTQLVDIQLIAELVYSGETCISSLLVSLLSQMIKESAEDEVLSVVNVITEILVSFPCTSDQFVSCGIVDALGSIYLSLCSSRIKSVCSLLIFNILHSASAMTFTCDDDAWLALTMKLLDCFNSSLAYTSNEQEWKILIGILCLILNHSANKVLIEPAKAIILNNCLALLMDGIVQEACAKGPSLFQHNQETTFGELLILMLLLIFFSLRSLQAILEASIDWQEFLQYSDDTESSSVLGIPCHDLCRLMHFGPSPVKLIASQCLLELLNRISDQRSCLNAELRCSAKYLKSMIAVTEGMVFDQDSRVAENCGACLTVILGWERFGSREKAVIRESKWSRLILEEFAVALTAPGLTSKSFSNQQKIAANIALSLLQLSQVPDWLTSLFSDSLISGIVANLSARNVTAEIVTLFSELMAKNYLNQEHIAGLHNLFQVCRRQAYEGGGGSKAQPSEQKAAAARCADDVRALLFGMMLEQRACSRATVEMEQQRLLREIDSFFFQESSLREQNSVK

SEQ ID NO: 111843 - protein, 46 aa, Oryza sativa
  Clone ID: PAT_MRT4530_15784C.1.pep
ADFEILAFPCNQFLRQEPGSDQQIKDFACTRFKAEYPVFQKVRTIR

SEQ ID NO: 111844 - protein, 151 aa, Oryza sativa
  unsure (1)..(151): unsure at all Xaa locations
  Clone ID: PAT_MRT4530_15785C.1.pep
MGRSAQQGPSTIGPVLRAVGPAQHDWHFVPCRANPRATHQAQAWPTSTRVVPCWPKGTIASCRPTVPREXPRHGPAIGPGQHRHDPSRAMPCLGRAKLPCLGRALPPLAGQGGGRRRGHDVERSDGEDVAHVARDVVERGALHSNSLGTDR

SEQ ID NO: 111845 - protein, 54 aa, Oryza sativa
  unsure (1)..(54): unsure at all Xaa locations
  Clone ID: PAT_MRT4530_15786C.1.pep
SVRQGVLADCATHNTPDVLCGGXTADMLGQCDPCYFTTTXGSPIFRILKKKKKK

SEQ ID NO: 111846 - protein, 80 aa, Oryza sativa
  Clone ID: PAT_MRT4530_15787C.1.pep
FFFFYKKLKLDIENKNTISTMMHFQTNVQIASASFFYTENAKIFILHTSSVQKKTQPSTWIGHNLIQRILDTPDYCLFNY

SEQ ID NO: 111847 - protein, 70 aa, Oryza sativa
  Clone ID: PAT_MRT4530_15788C.1.pep
LCCRTDQLAASYHKESYFGTTAEAWTTQHELYIYRVNFDTFWHLYGVKVLPHINSLTLQSGIFTGNFLVP

SEQ ID NO: 111848 - protein, 62 aa, Oryza sativa
  Clone ID: PAT_MRT4530_15789C.1.pep
CRHHRFLVNLVSSFKLFGLRPSLVWYHSLHASVTARVHQHLCKSVGKNSIRTGSYQGQSQQL

SEQ ID NO: 111849 - protein, 77 aa, Oryza sativa
  unsure (1)..(77): unsure at all Xaa locations
  Clone ID: PAT_MRT4530_1578C.1.pep
SQGSGGSSKRSRTSMWRRGNPRXSPGHRAARRWPTAAPPGGRSTAPAPARTPAPSLLRTPRARAPISRSTPGPGATN

SEQ ID NO: 111850 - protein, 56 aa, Oryza sativa
  Clone ID: PAT_MRT4530_15790C.1.pep
AFVLFFFFFFFFWHSQAHSLRQGPRLIDRGTGACFSHGAGCFNFTQYEGCKNVLHH

SEQ ID NO: 111851 - protein, 606 aa, Oryza sativa
  unsure (1)..(606): unsure at all Xaa locations
  Clone ID: PAT_MRT4530_15791C.1.pep
MAPREVAAAARGFSAMARIVGPDPKAVKMRRHAFHLHQSGSTTLSASALLLPPGSLAEPPPLLDRICAAHGHAGGVALTSASLVEPFLVEEQRNSPSQELQPRLVPEAHLDVLVEHEESRNIGGGKTGAPRWLSARLLAILYFSQQDSTVGLLVHCPMKNDKNFGKFGLFVRNVVDVQASADSVLSLLQHEGSLIRSSSWDVCWSLADVNQKQVDNDARYSLECNRKNAYAESTEPPMLAKSATRIAILGVSNLNSSNTRCINVSLMQQRGDSLLIMGSPFGILSPVHFFNSISVGVVANCLPPGTARSSLLMADVHCLPGMEGAPVFDKNSCLVGMLMKPLRQRGSSTEVQLVITWDAICNAWNSDKLERIGHPPSELVDDKSSDCKYKESCVADKHRRFVPNSANNLNQYDVSPSLTEAISSVVXCHGPLDVALLQMEKTPIELCAIRPEFVCPTAGSSVYVVGHGLLGPRXTTAAVHPGASGGVLLDSLGRMVGLITSNAKHGGGSTIPHLNFSIPCKSLEMVFKYSAKGDFKILEQLDKPNEVLSSVWALAPTSSPFFSTSPENGRGGKVLEFSKFLADKQEGLKSIKDIEAFLRDRIPSKI

SEQ ID NO: 111852 - protein, 132 aa, Oryza sativa
  unsure (1)..(132): unsure at all Xaa locations
  Clone ID: PAT_MRT4530_15792C.1.pep
IRHEGMSAGHWLMSTRSRLIMMPEYSLECNRKNAYAESTEPPMLAKSATRIAILRVSNLNSSVRLSLSFQFMIAGXTSEVQLILLFELYLVILVNDQNTRCINVSLMQQRGDSLLIMGSPFGILSPVHFFNR

SEQ ID NO: 111853 - protein, 103 aa, Oryza sativa
  unsure (1)..(103): unsure at all Xaa locations
  Clone ID: PAT_MRT4530_15793C.1.pep
TQLYTTTIGSCTLQTGPGFGSPRVRILVLCCGKTGLTFMSFAYPAQSLLAALGSIQFXVSNIAFAYFGLNKTISVKVMVATTFIVFGNIFLVSFGNHQSPGMS

SEQ ID NO: 111854 - protein, 100 aa, Oryza sativa
  Clone ID: PAT_MRT4530_15794C.1.pep
MVISAAETSSSRPDPSWTEADPAISSAAARGEAGSGGARVGGGGDVPVDSGGALVESFFSRMRNGNGAKFLAQELRKFRATHQCPEVLVFITRRFRALSI

SEQ ID NO: 111855 - protein, 79 aa, Oryza sativa
  Clone ID: PAT_MRT4530_15795C.1.pep
LQEFGTRAEEKLFYLPFRPPLLTPSLGDHFPGCALSGNTLVPPPSEAVPPYGAPAPLLSFSLLLHGKKKRRKKKTGGRR

SEQ ID NO: 111856 - protein, 59 aa, Oryza sativa
  Clone ID: PAT_MRT4530_15796C.1.pep
MRNNGPAADCRAVRHHKRRGALVARAGRHHCRGRPTMPPTDALTCSVTSAKAAAAQQVQ

SEQ ID NO: 111857 - protein, 88 aa, Oryza sativa
  Clone ID: PAT_MRT4530_15797C.1.pep
ARKAATHHPPSVPSHGLNNTSFFKGMMLANRVDAKRLQVKKQRDANCATKNLFGGQTDDIASTETAYSAHQVSMQSVRTKKFFAGSAE

SEQ ID NO: 111858 - protein, 99 aa, Oryza sativa
  Clone ID: PAT_MRT4530_15798C.1.pep
MLTVLAQVAEREGRYLAQIKIQQHAKPSIGTRGIRKLHTGMGIPISEGSHYCCSHVRIAGTFRDSDSHVGSSVERVGLYFLIELQDLQCQPRVLVRECF

SEQ ID NO: 111859 - protein, 116 aa, Oryza sativa
  unsure (1)..(116): unsure at all Xaa locations
  Clone ID: PAT_MRT4530_15799C.1.pep
HSSAHASGKVSVIINPTTRKTITEFGCSEELLTQVGXLLGKHAYSGQTESEGGFECYAPARENILNSSXPVVGGKQYYTVAVLTRTSRRTLGQRAXMFTGTVNDRRLGIWEAQAGY

SEQ ID NO: 111860 - protein, 106 aa, Oryza sativa
  Clone ID: PAT_MRT4530_1579C.1.pep
MEATLIIVLNFLLTGAIVFKGVDSELGLIKIVLHNGHETFYFSLEWSKLVAEFPIASSRKGSRLERTEPKLNSKLDVKLGSSLFRAQAYIGKFAQAWLVDSPIHAD

SEQ ID NO: 111861 - protein, 35 aa, Oryza sativa
  Clone ID: PAT_MRT4530_157C.1.pep
RACLFCGYHYLIVLLITAKPHTGGRIFNNRNRGDS

SEQ ID NO: 111862 - protein, 49 aa, Oryza sativa
  Clone ID: PAT_MRT4530_15800C.1.pep
MDEMRVGRAAVAAAAESLLEATSASRALDSVKDPRISPRFIFSTLLALE

SEQ ID NO: 111863 - protein, 106 aa, Oryza sativa
  Clone ID: PAT_MRT4530_15801C.1.pep
HGNNYNNPLYILYHESFLLLGNHESITVILVIKRLLMLSRPSTDLDNNSLVLFFSAVTLGKSPYFPEPQLPHLEDEYDNAYVTRLFCCSNGAQDKKALWKLKYYTN

SEQ ID NO: 111864 - protein, 155 aa, Oryza sativa
  Clone ID: PAT_MRT4530_15802C.1.pep
MDYPSGQRERVRRLGSQRSKRWWRGCGYGRCSGEIHTAAHQAHCGRWRSSGPQRRQRRDGGSLMKPGGGGRRRAMEAKAERDGWGGNGFEVALVVVRLYDDQFEKFCILLYDDQFEKEKQGAGSLVGFLQPRDIHQQSWAGKLRRFPSTIRFFLR

SEQ ID NO: 111865 - protein, 132 aa, Oryza sativa
  Clone ID: PAT_MRT4530_15803C.1.pep
KSAEKEERPKPPHRNSKKNNIDKEGPHTEAILKIRKRANKRNPARKKRNPTAAKKAGESITGKSREGRNTLGEEAPRTSGRRLKTSQITSPQTNGTRPGAHHKKARPACCEGTQARGSRTKGISKDRRTVKL

SEQ ID NO: 111866 - protein, 70 aa, Oryza sativa
  Clone ID: PAT_MRT4530_15804C.1.pep
MEMDAQINPILHVVGHLQDLPHPLHGLGVPHMMDHLQQAIRVNSDDLPLQGYPDYKGYRILWVLATPLEG

SEQ ID NO: 111867 - protein, 149 aa, Oryza sativa
  unsure (1)..(149): unsure at all Xaa locations
  Clone ID: PAT_MRT4530_15805C.1.pep
GHGHGHGHGHGHSHDHDHGGSDHDHHHHEDQEHGHVHHHEDGHXIGVMIGGAIIWYKPEWKIIDLICTLIFSVIVLFTTIKMLRNILEVLMESTPREIDATSLENGLRDMDGVVAAHELHIWAITVGKVLLACHVTITQDADADQMLNK

SEQ ID NO: 111868 - protein, 320 aa, Oryza sativa
  Clone ID: PAT_MRT4530_15806C.1.pep
MDRSSRTTVSTQRLATAAAALYDDLDDNPWSGGGGGNAGWPMRAAASDAARVGGGWRGGDSADNTLPLPLPSCPRRRWPRAGGLGDARRRAAPPALLLRLSTLLPTSDPQCCTDEQREMAKMKGENTGRAVAGPQLSVTAVRELGCVAAAAQRGVIVVLIVASALSIINRVQQSNERKGQARAQDLVVADSVELRSSCSLCSGGPRGPGRCRLTDRRWRKGDGRGVRERRRRQCSGRGWGGIEVCRERDTGKRNAAVEETTQRNGCWAGGGCGAGAVGERMRRRIWGKGSGPVERRTYPFAGDRKPMQPRVRCQVPPDDK

SEQ ID NO: 111869 - protein, 418 aa, Oryza sativa
  Clone ID: PAT_MRT4530_15807C.1.pep
MDSHNSAPPQIAEVRMDISSSTSVAAGNKVCRGAACDFSDSSNSSKDARERMASMRKLIIAVILCIIFMAVEVVGGIKANSLAILTDAAHLLSDVAAFAISLFSLWAAGWEATPQQSYGFFRIEILGALVSIQLIWLLAGILVYEAIVRLINESGEVQGSLMFAVSAFGLFVNIIMAVLLGHDHGHGHGHGHGHGHSHDHDHGGSDHDHHHHEDQEHGHVHHHEDGHGNSITVNLHHHPGTGHHHHDAEEPLLKSDAGCDSTQSGAKDAKKARRNINVHSAYLHVLGDSIQSIGVMIGGAIIWYKPEWKIIDLICTLIFSVIVLFTTIKMLRNILEVLMESTPREIDATSLENGLRDMDGVVAVHELHIWAITVGKVLLACHVTITQDADADQMLDKVIGYIKSEYNISHVTIQIERE

SEQ ID NO: 111870 - protein, 95 aa, Oryza sativa
  unsure (1)..(95): unsure at all Xaa locations
  Clone ID: PAT_MRT4530_15808C.1.pep
FPSAPKKKKTGYLSDRIILEXVGYRYKYVYFLSNTSTSMISKFPSDMDNNSDIRKFCCRIHVRSYSILIRIRDNSYLFPYSSYLYSFPYLAYKRI

SEQ ID NO: 111871 - protein, 856 aa, Oryza sativa
  Clone ID: PAT_MRT4530_15809C.1.pep
MAEAVDGGSWEDMLRRILPPGSPIPEAPPNLDYSIALEYDGPPVAYDLPRVDPVEIPTAEPVSGPQRLGNGGGLPVVEPIPLPVSRIARCAEPVSAQVGGGSSDSVNSVLQNEEFDDDDDDSRSLSHDSAQSSPGPQDRSRRTQEGRRGATVTFGFTPDSKCESKEFEEMSEQYVVVTKKEKRRRACYRCGKRKWESKEACIVCDARYCGYCVLRMMGSMPEGRKCVTCIGQPIDESKRSKLGKNSRTLSRLLSPLEVRQILKAEKECQANQLRPEQLIVNGCPLGPDELTDLLSCSRPPQKLKPGKYWYDKESGLWGKEGEKPERIISSNLSFTGKLQANASNGNTQVYINGREITKIELKILKVANVQCPRDTHFWVYDDGRYEEEGQNNIKGKIWESALTRFACALFSLPVPPGNSNETRDEVHYSARTVPDYLDQKRIQKLLLLGPDGAGTSTIFKQAKYLYGTRFTQEELENIKLIIQSNMFKYLGILLEGRERFEEEALSRSNCTISEDEETQQDENKANGSNSCIYSINPRLKKFSDWLLDIIAMGDLDAFFPAATREYAPFVDEMWKDPAIQATPAGKDELHFLPDVAEYFLSRAIEVSSNEYEPSEKDVIFAEGVTQGNGLAFIEFALDDRSPMSEPYIENPEAHSQPLTKYQLIRVSAKGMNDGCKWVEMFEDVRMVIFSVALSDYDQVGPPVYGSSRPLLNKMMQSKELFEATIRQPCFCDTPFVLVLNKYDLFEEKINRAPLTTCEWFNDFSPVRTHHNNQSLAQQAYYYVAVKFKDLYYEHTGRKLFVWQARARDRQTVDEAFKYVREILRWEDEKEENLYGGGEDSFYSTTEMSSSPFIRAE

SEQ ID NO: 111872 - protein, 177 aa, Oryza sativa
  Clone ID: PAT_MRT4530_1580C.1.pep
MAWAAAKQWRAGGTAGAMELETGNVQGWRPFPVTEATGSMRRRAVAPEDGRRWIRTPPSFPPAPDRSRGQRLPDPHAAVASEDGGRRICAPPSLPLHSPLPNDAGYGGGAVATQGWATENRERTDDVGGDEWRAGDNEGDWGSPVPAPALTAGREAWVGRWPRSGEDLKDLQVTELK

SEQ ID NO: 111873 - protein, 170 aa, Oryza sativa
  Clone ID: PAT_MRT4530_15810C.1.pep
MAIFTAHWRKAELVAPARPTPHEHKVLSDIDTQRGLQFYTAGVEFFRRRHHAAAVFSGGDDDNSGDLVGIIRAALAEALVSFYPLAGRLRELPVVAGGGGGGGKLVVECTAEGVVFVEADADVRLQELVHGQPLGPPYPCVEELLCSNLVGEPDVVLGKPLLFLPVVRGC

SEQ ID NO: 111874 - protein, 111 aa, Oryza sativa
  Clone ID: PAT_MRT4530_15811C.1.pep
HSAHTPFCQPVTFQLDTYKPSHPPQVFPTAQLVAQTSLNYQRTLVLFKRFVQQATSAKQILGVSNVCRSRLQAQSPKLWLEHIQTWPSNMVGYATLTIYSAPRDACATLFV

SEQ ID NO: 111875 - protein, 327 aa, Oryza sativa
  Clone ID: PAT_MRT4530_15812C.1.pep
MCLQLADSSIRYPAGIAEDVSVKIRDFFVPVDFVVLDMDTEKETPLILGRSFLSTAQANIDVGTGSIHFHINGMEEKFEFQPRTKKCSMVRIKYGPNPQNIQEVKVEPPKTVSLVKFMQNFLKRKQRFPGTVIGRCRILNFEEILSEQTKIKFSVKISCAMTTLTVGIQQPKMGPIAKGLGVINGQIAYISAVRPCIDESYLVQGHILKHRVHGSLIYFFPGCTNETPLPNAGYHLYNYHELTITLRTIKESRAGGTYRETRNMMYEAGWEPTGDASGWTQAPHQSIRVSSWASACEDRWRATHHIQWGDMSNQPPRSSGIPPSPGE

SEQ ID NO: 111876 - protein, 100 aa, Oryza sativa
  Clone ID: PAT_MRT4530_15813C.1.pep
WSILQLHTCNPKPKPKPAQHSLILCMFATNPMLTHAPAVISYNYNCIYKQINSMFMNPGCHLLQTKLKCSLIPCSSNKKPSLHFLRSSAHTPGTPLCQLH

SEQ ID NO: 111877 - protein, 190 aa, Oryza sativa
  Clone ID: PAT_MRT4530_15814C.1.pep
EGREYRQKKEGLITEAIHVANRLHIRRRGYLAKALLRDALQRRRPPAAAPSDDHISSRCHLLLRVLPLEHAHELLQRRRQREGAPSGDGRGHLLQLLLAQHDLDAHPAAGALGASRSGVGDGRARGLLDGSDRLGVHLQPRAPRQLPAVTPRHRRGSLHLHGSEILSALVRFSCSGFCCSFLRVLANWLS

SEQ ID NO: 111878 - protein, 271 aa, Oryza sativa
  Clone ID: PAT_MRT4530_15815C.1.pep
MKRRKRREKKKDSELAAQQQQQQPAGLALGPWPVHTSKTAAAAVKCSRSTAAAAALQYHRAREGEPDDGGRGLEWRQLGAAASEARGSLGWRDSDVQRRRDGGGIEAGRGPMSRRQRPLSQRHYSSSPKTTTVSTRPMLSSIWMCSTFHVGHRLLRVAGNERAREREGFAREATEAAAAAGPVPGGGGGGGGDRAVPSWGGSGRAHVGEGRPRPRPGRAHAGKGRRPGPCREGAAAAGPVLRGGGGGGRGRAVPSWGGGGRARAGATAARR

SEQ ID NO: 111879 - protein, 35 aa, Oryza sativa
  Clone ID: PAT_MRT4530_15816C.1.pep
CMVRPKANQMREGYQLMSPHVQGPSSVVLSKVLHE

SEQ ID NO: 111880 - protein, 233 aa, Oryza sativa
  Clone ID: PAT_MRT4530_15817C.1.pep
MYSCSCADVLLRRQLATRDDGVGGGGHGGGVRGGGCGFLPPSELTMAQDAGAAAAQDLSGASQFLAGLPRQMHSVTVGRDVEAGGDGEEGERQRAQPRQRRRHLRRPPRRRGGWPSHGLVSFRGGARGGRWGLVTRCGGACRPAPRWGGEGLASRSFARSPCAPRVGVGVGAGQAAVFGGGYGWVGRSPRRAVILLLRAFNAKPASLGEYFFCLGQNSTATEIRPMLDGLGLD

SEQ ID NO: 111881 - protein, 244 aa, Oryza sativa
  unsure (1)..(244): unsure at all Xaa locations
  Clone ID: PAT_MRT4530_15818C.1.pep
MVPKAGGGCRQCICKEKYEDQSLMFDFVMRLRSDFETIRDPQTRALVGTGHRHSSSNGKLYVLDHLSLPPSSFGSSTTSSAAMGYASSATFPQWHHRLGHLCGFRLSTLIHQDVLGHVSIDTTFDCTGCKLGKQIQLPYPISNSRTSCPFDLVHSDVWDPAPFASKGGHKYYVIFIDDYSRYTWIYYXRIFHSDSGGEYLSAAFRQLLSSECTLPQFSCPGAHPQNGVAERKHRHIIETAHTLL

SEQ ID NO: 111882 - protein, 68 aa, Oryza sativa
  Clone ID: PAT_MRT4530_15819C.1.pep
TLPVHKYDGPVWSRRLSMDFRSQNYSNLSHFIHFRDRVYDQIYLIDRHNRLIYTHLNADCCQVKPQNF

SEQ ID NO: 111883 - protein, 350 aa, Oryza sativa
  Clone ID: PAT_MRT4530_1581C.1.pep
MAFRRTLARGIWAGKNANAAAACPAAAAPKPPARRPLPAVDDCPTLAYLRPRPGTIRYTTASVPLPAHCFPALPVGDQLFNRLRLDGLVPPTTAVTRPPEEEGVGVTVEEARKVARAAEMEVARARLRSNAQSVVSGSEFAALCVDIAGGAEGGRRLARALDDSGVVIVLGDAVFLRPDMIAKAIGSMIPATAHATRAAASVVEVRKKREEEEELRAMEEEKAGIDAAAAAQVRRELWCGLGLLAAQTLGFMRLTSGELSWDVMEPVCFYVTSLYFMSGYAFFMRTSTEPSFEGFYRSRLASRQRRLMRARSFDVARYEALKEQVGGGARYGVAARDAIVLRQQHVTHVH

SEQ ID NO: 111884 - protein, 72 aa, Oryza sativa
  Clone ID: PAT_MRT4530_15820C.1.pep
MKVEDSSDREHRASQENYYGDGQYQRVLLSDDPARSKRMQAETHLMSYEKRLLSLTPMTEKYLVQGPKKLIH

SEQ ID NO: 111885 - protein, 1254 aa, Oryza sativa
  Clone ID: PAT_MRT4530_15821C.1.pep
MHVGQLISIILGSIENWGLRDKVFSVVLDDEFVDDSVASNVESHLQKWNSHCANQSLFVVRYGTHLLDQVIQVGLDELDKIVEKSMNCSESTEGLTSSEVKYANYNYAASGKDWSCARRICDTLEDFHRYMDIMHNFPCPVDLFEKVWQVKCNLQRKVDNPRDDAFATVVKKMQEKFKKCWKLCCLHFYMAMIVDPSYRLENIKLHVDLHTDTDYIRCMDDILLRLFDEYSGKVEDSNCTKETRNEINVSRDDDRLKYYRRYGYPICERPMTELDQYLQEPCLSGAAAAQCSSAVAAFQVQQQLSLSDCNHGIRSTWECHSFAFGYKTQWTKLPSYGVASHLNDDPPHEKEDEKKIAAWRRNDERVMAFLCMSAEVPIRMNFIDLSSAKKMWEYLQQRYSRYTWIYFMKHRSQLLSIYQSFIRMIHTQFSATIRIFRSDSGGEYLSAAFRQLLSSEGTLPQLSCPGAHPQNGVAERKHRHIIETARTLLIASFVPSHFWAEAVSTAVYLINIQPSSRLQGKCPGEVLFGSSPCYDHLRVFGCTCYVLLASRERTKLSAQSVECVFLGYSIEHKGYRCYDPSSRRIRISRDVTFIEDRPYFYSKISSSSSPQESISFLHLPPIPSQDLTTISETPSPSSIPSPSLDIPSSTLTPRSEMSPFPFHYSRRPRTPHESQPPSCLPSDVPTSTINAQSDDPPVAPLIDDPLVSSPQSATPRYGLRDRSKIMPHPRYMCAAIDGVQEPSTYQEAAAIPEWQLAMTEELAALERTRTWDIVPLPCHAIPITCKWVFKVKTRSDGSIERYKARLVARGFQQEHGRDYDETFAPVAHMTTVRTLVAVAAARSWTISQMDVKNAFLHGDLKEEVYMKPPPGVDAPANYVFRLNRALYGLKQAPRAWFERFSSVVCAAGFSPSDHDPALFIHVSDHGRTLLLLYVDDMLITGDDLEYIAFVKQCLSEQFMMSDLGPLSYFLGIEVTNTEDGYYLSQHRYIDDLITRSGLTDTKTATTPMELHVQLRSTEGVLLEDPSRYRQIVGSLVYLTITRPDIAHIVHVLSQFVSAPTSVHYSHLLRVLRYLRGTASRQLFYARSSQLHLHAYSDSTWASDPMDRRSITGYCIFLGTSLIAWKSKKQTAVSRSSTESELRALATTTSEIVWLRWLLSDLGVECKDPTPLLCDNTGAIQIANDPVKHELTKHIGVDASFTRSHCQQSTISLRYVPSELQVADFFTKAQTREQHRLYILKLNVIDPPNHSPNPP

SEQ ID NO: 111886 - protein, 1535 aa, Oryza sativa
  Clone ID: PAT_MRT4530_15822C.1.pep
MASDPLGNVILLPLDIKLNGQNYREWASSARMQLRSYGVASHLNDDPPHEKEDEKKIAAWRRNDERVMAFLCMSAEVPIRMNFIDLSSAKKMWEYLQQRYQQSSAALRFSLRKSLQSLEQGDMTIEEFHNAFTSLSRQLDSMVPKAGGGCRQCICKEKYEEQSLMFDFVMRLRLDFEPIRVQLLGRSTLPTMAEALADLIAEETRLQSLPNATTPQHTVLASSLMGTSLSGDHAFQHGSLATSSTQIVCSHCKRSGHRVEKCFKLHPELLAEFRAKRGASRRAPSTSVTLAAPAVTAASVSATSTNQPYMNAYQPNGSASLAPAPGTSQSWVLDSGASFHMTSDVSQLASCQPVINGTCVQTANGTSCLVTHQGTLSTSQLTVPNVSLVPQLSINLISVGQLTDMNYFVGFDNTSCFVQDRQTRALVGTGHRHSSSPGKLYVLDHLSLPPSSFGSTTTSSTALGYASSTTFPQWHHRLGHLCGSRLSTLIRQGVLGHVSIDTTFDCTGCKLGKQIQLPYPISNSRTSCPFDLVHSDVWGPAPFASKGGHKYYVIFIDDYSRYTWIYFMKHRSQLLSIYQSFIRMIHTQFSATIRIFRSDSGGEYLSAAFRQLLSSEGTLPQLSCPGAHPQNGVAERKHRHIIETARTLLIASFVPSHFWAEAVSTAVYLINIQPSSRLQGKCPGEVLFGSSPCYDHLRVFGCTCYVLLASRERTKLSAQSVECVFLGYSIEHKGYRCYDPSSRRIRISRDVTFIEDRPYFYSKISSSSSPQESISFLHLPPIPSQDLTTISETPSPSSIPSPSLDIPSSTLTPRSEMSPFPFHYSRRPRTPHESQPPSCLPSDVPTSTINAQSDDPPVAPLIDDPLVSSPQSATPRYGLRDRSKIMPHPRYMCAAIDGVQEPSTYQEAAAIPEWQLAMTEELAALERTRTWDIVPLPCHAIPITCKWVFKVKTRSDGSIERYKARLVARGFQQEHGRDYDETFAPVAHMTTVRTLVAVAAARSWTISQMDVKNAFLHGDLKEEVYMKPPPGVDAPANYVFRLNRALYGLKQAPRAWFERFSSVVCAAGFSPSDHDPALFIHVSDHGRTLLLLYVDDMLITGDDLEYIAFVKQCLSEQFMMSDLGPLSYFLGIEVTNTEDGYYLSQHRYIDDLITRSGLTDTKTATTPMELHVQLRSTEGVLLEDPSRYRQIVGSLVYLTITRPDIAHIVHVLSQFVSAPTSVHYSHLLRVLRYLRGTASRQLFYARSSQLHLHAYSDSTWASDPMDRRSITGYCIFLGTSLIAWKSKKQTAVSRSSTESELRALATTTSEIVWLRWLLSDLGVECKDPTPLLCDNTGAIQIANDPVKHELTKHIGVDASFTRSHCQQSTISLRYVPSELQVADFFTKAQTREQHRLYILKLNCSPGIHRTDFSTIHKVQKLKIVEKAEFMWDVPTKLVLWQVELPEWCSDLFPHEVSAPEGSFVMSDLNERSTWRSELLEAVFAVGALSMEASVVLGALDSKAAARRKLTAQDAPVVHLQGPSSIEPRMIKRQWV

SEQ ID NO: 111887 - protein, 97 aa, Oryza sativa
  Clone ID: PAT_MRT4530_15823C.1.pep
STCRSEGHLLQHHHDPASIFNLCPFVCNYTLSHHELLGTSGRHTTEAHQTLLFQAHTSSTNSHTQMVLRHSPERHTRELINSVCKHTTIFTTQRCWL

SEQ ID NO: 111888 - protein, 201 aa, Oryza sativa
  unsure (1)..(201): unsure at all Xaa locations
  Clone ID: PAT_MRT4530_15824C.1.pep
MLTELHSELVGEGSHRRLGKQEEGANCADGMEGKQENPEAEPVGVEKLPDGVLADPFELQQFGEREVYLDMGVFGDTNLELPSALSNRSSVEIHVDLAPLASMNCNLVIDLPLHARYPPLDASGYATVEFGXPDLLLRYRKKDTVPESCSWLLKDLDAAPVEKATWRIPCGDEAHIGFVSSITFLSALVCSILIVIAALFY

SEQ ID NO: 111889 - protein, 112 aa, Oryza sativa
  unsure (1)..(112): unsure at all Xaa locations
  Clone ID: PAT_MRT4530_15825C.1.pep
MTGKAKPKKHTAKEIAAKIDAATTNRGGGKAGQKDRLGQDKGGHAKLECPLCKTTAPDIKSMQIHHEARHPKLPFEPDKLNNLHGGRAGRXAGEAAASSSKPKPGVRGSLQK

SEQ ID NO: 111890 - protein, 433 aa, Oryza sativa
  unsure (1)..(433): unsure at all Xaa locations
  Clone ID: PAT_MRT4530_15826C.1.pep
MASPTSSASAPASHHLRLWWRRRGRGGAVGATFTVALLAAALLLALSLYASSLPRAPTTPSSSSNLVGLTLVRRAKEKGAVCLDGSAPGYHLQRGSGTGSQNWLLHLEGGGWCRNLRSCASRQKSVLGSSQYMECQIEFAGILSNDKFQNPDFYNWNKVKIRYCDGASFSGNVKNELQNGTKFFFRGQRIWEAVMSELLXKGTQACQTGCSAGGLATFIHCDNFRTLLPKDSRVKCLADGGFFLDVEDISGQRTMRAFYNDVVRLQDLRGRFPHCGPNMDLGQCFFPSEVVKDIITPVFVLNPAYDAWQVQHVLSPVASDPQHSWLECRLDISKCDSNQLEILQGFRKKLHDTISELKHKKDWGFFIDSCFIHCQSLNSLTWHSPSSLRVNNKTIAEAVGDWFFDRREVKEIDCEYPCNPTCHNLVFAKPFKA

SEQ ID NO: 111891 - protein, 92 aa, Oryza sativa
  unsure (1)..(92): unsure at all Xaa locations
  Clone ID: PAT_MRT4530_15827C.1.pep
MTVVTVGMVSNILQPSLGLHLNRAAKTWIQRRRGRFGRTRGRPNXPTFRLAASSVAPLCRLVNFGPMCRVISEFLAHPYXILDTVRLIYRLS

SEQ ID NO: 111892 - protein, 154 aa, Oryza sativa
  Clone ID: PAT_MRT4530_15829C.1.pep
MAACASLTAIFVASSADSPLHPLPSSYTTLHLPTTRGNRTEKTSSPPSPPPFCRKRLARKTITLVHKANEKFWKTGVFWNKPLFTTTIGLPRLNGYKPYRGHKEFSKIIPWNPPRKKIPRCSSSPSLYPTLTNLEDEIILKGVVCQRSRLNLIS

SEQ ID NO: 111893 - protein, 403 aa, Oryza sativa
  Clone ID: PAT_MRT4530_1582C.1.pep
MLRRAGKGEVADGFYQIRSDCTHKVPETKFKIKVGKTLSVRKWHAAFTREGRLDIASVLNRIQKGGVHPTIRGEVWEFLLGCFDPGSTFDEREQIREKRRIQYAIWKQECKDMDSHVGSGKIITAPIITEDGKPIKDPLVLLEATSDQHTMQGSSSSSRNENEVDKSENCVVVRGEVWEFLLGCFDPGSTFDEREQIREKRSLNIVTDDLCRIQYAIWKQECKDMDSHVGSGKIITAPIITEDGKPIKDPLVLLEATSDQHTMQGLDVLRTDRSMVFYENKENLSKLWDILAVYAWIDKEIGYCQGMSDLCSPMIVLLNDEADAFWCFERLMRRLRGNFRCTQQSVGVENQLQHLASIIQVLDPKLHDHLETLGGGDYLFAFRMFMVLFRRELSFGDSLYLWE

SEQ ID NO: 111894 - protein, 248 aa, Oryza sativa
  unsure (1)..(248): unsure at all Xaa locations
  Clone ID: PAT_MRT4530_15831C.1.pep
MAAKTLPPLARFDQSKSLANGGPHVLLPPAASLSASSLSYPLSPFVSARRPSVNAGAADPTGRRLPCQPSSPLQAAIAFLLRRRPSAQLDNEDDGAARRLSNNTGAELVMADAAVPLAAADFEQVDQFTCGGFSLTMAMNHLLAGGESVCAIDSEEGRARRSGWRAWRRGRPARIRSRRRLMRLSSSSGAGHRRVKRWHRRRLPIHPPPRLKPPPPHPPVGKRATGAGWVEVGKGKXCDCRGREGKKV

SEQ ID NO: 111895 - protein, 302 aa, Oryza sativa
  Clone ID: PAT_MRT4530_15832C.1.pep
MAAAMDEDFARAVEDDLKLSKRLVLPGGRPRPAPSLLTRPLLTAPMCPATSHTDTFVQRDGDGDGPVQPRWATGTPVATVGVARTYSTYRRKGMAVVVVVVTGCGGGGRQGRQASERNTETETPIRALRSMAGNEKTDQSPENVRSSSSPCYPYHNCSLSSVHHHEQVHRLGLCQYSFGDVQCPENRANVQTDAEYWQTWSSSHQSRVSASSGTKGAVRSFADRDRALRLQCNWPDLTTARRPLCVLGSGWLAGSASRGVPFGNLCSARARRGCSCMAADSSSGLGAAWRDLAPRGSRVGGT

SEQ ID NO: 111896 - protein, 120 aa, Oryza sativa
  Clone ID: PAT_MRT4530_15833C.1.pep
MGRASGLDADLLPPPLGVRMKRLEGNLVPLPLRATTAHRSATPTLRIDAGTWIRWPRDGRISFGRDGDDDDGGGGEDDCGLRQRERAAPTVRTMASAMMMTVVAATMMASGARVWDESGS

SEQ ID NO: 111897 - protein, 74 aa, Oryza sativa
  Clone ID: PAT_MRT4530_15834C.1.pep
ISLGKIFWIHRWTVSWTCISTVFCWIVLYHIAKLVPGVFLDDLLLALHANCWCTWLCMLTALMLYAVAVTLQAA

SEQ ID NO: 111898 - protein, 258 aa, Oryza sativa
  unsure (1)..(258): unsure at all Xaa locations
  Clone ID: PAT_MRT4530_15835C.1.pep
MVAGLGLAAELRGGGRGREEWSGQGDVPGRLLGTRGGGAIWRTNAQTTMSQCCLGVARGCRREDLDQELTDERERRRQXGWRRGETVATAGRHDTERARPGNKRGVLLVMCPRTHRFLRCSAADGDDEIRSSGDKAVTVVRRQWRVEECRFGRGNRHRAVERSAGGHGRCKSGGRRGCKERRRRWIGRLKSNHGSAGWRGQGGGGELACGVSGERDLREGVGVSTFVRTTLDLLNLALQLDLSDEVAQHELDNEAAMG

SEQ ID NO: 111899 - protein, 638 aa, Oryza sativa
  Clone ID: PAT_MRT4530_15836C.1.pep
MARGAAAATRWTGSGDGRQRYNSGNQKVLANGATDRDTNDLAMQTQVPTQTREGPTFTQLLLGEEDFDLPPYVPDEAEENNQFYHQTMNEFLNMNQLGNNGTRTTQLEPQEQMMMFGSSSGIGSQLSGSQAIEVVDVVGGLTSPWGTQLHEGHLAHLMSYIRAFRDLEQQTSPNLVMQQSIGPTYGHINTLNNRNSEFHFLLEQAKNPENNVMRLINIRSHVPAFSADPFGSRFIQHKLERATPTELLMVYKEIVPHTFMLAIDVFANYVIQKLLGYGPTLCGRELIGKLIGHVVALSLHMYGCRVTRSTCVYDMWVQWQKVKCGKWLNISGYFKAFEVSDMDQRIEMANERVLEWCDDLEILKELISEIVEGVLELVVDQFGNYVVQYVVEHGGESVRAMIVMRLKGLMVMLSCQKYGSNVMEKCLTIGRIHDRLIIAADIVGASEDQILMVMVNEHGNYVIQKMLETAAAEWVVDLIVIVVNRNFFRLIHYVHGRHVLAHLQILLAAREHNHRIENKINSIIRSRTKSISMNIFKEEATVATAINIIERAIPMLPAVDPAALLGVAEDRTTPMRAAADPAAPERRRGGDNRTSCQQGRGKSHRLPSKCKRRLHPRVVWERWKEEEEEEEARAVVEA

SEQ ID NO: 111900 - protein, 377 aa, Oryza sativa
  Clone ID: PAT_MRT4530_15837C.1.pep
MLEDEEDDSNKDNRKEGAMEVEKSVKPTSMPAMVDVSVHRGQLYANTRYGMVELLQPVVVVEEGFVVRVLDECGETWVKADNIGDVAVLVDTSGTVAASTRECLGLRPSTVYFAVNLVGETRVRAHSLATAGKGKHMRIERNREETVNRFNAALHWMACLLSGAGDTHHAPPPVPWEGGAGAWGGGSGGSGLERGSRRRRTGGGWRTRAGGAAAAGAAGSAAGGGPVMVAGAKGRRSAGRGHAGTLTPFGAGEAGAAACSRLVAAGVMRGSSENWAVKHDLFINIGFLRQQDLDILPSQARDLCDGTYGGKIGRLEERRRRRDVVVVDGDQTAVPEGATGDAAQRDVGVEFGGSSSGEVEPDSYAVGGVESDGCCNG

SEQ ID NO: 111901 - protein, 233 aa, Oryza sativa
  Clone ID: PAT_MRT4530_15838C.1.pep
MASTTATAAGNGSGSILPTHTTTAPPFRAHKDADLESTTRRRRRRCLCCCLLVTLVVLLVLAITLLVLFLTVLRVRDPTTHLVSTRLTGLSPRLSFPATSVQLNVTLLITVAVHNPNPASFTYATGGHTDLTYRGAHVGDAEIDPGRIPSRGDANVTMALTLQADRFAGDLTQLVSDVMGGSVALDASTRIPGRVAILGVFKRHAVAYSDCHFVFGVTEMAVRSQQCSDRTKL

SEQ ID NO: 111902 - protein, 80 aa, Oryza sativa
  unsure (1)..(80): unsure at all Xaa locations
  Clone ID: PAT_MRT4530_15839C.1.pep
GMYNRLTWWEQMDHGXQLTRXRKFLXVVPLVPILDRPRHTTDYQHPMARCLNTVGSCCAGCCKKLPNMHKVRIFGINAGN

SEQ ID NO: 111903 - protein, 172 aa, Oryza sativa
  unsure (1)..(172): unsure at all Xaa locations
  Clone ID: PAT_MRT4530_1583C.1.pep
GVHPTIRGEVWEFLLGCVEPGSTFDERAXTDEKRRIQYAIWKQECKDMDSHVGSGKIITAPIITEDGKPIKDPLVLLEATSDQHTMQGSSSSSRNENEVDKSENCVVDKQIIEWKLLLHQIGLXVLRTDRSMVXYENKENLSKLWDILAVYAWIDIXIGYCQGMSDLCSPMI

SEQ ID NO: 111904 - protein, 98 aa, Oryza sativa
  Clone ID: PAT_MRT4530_15840C.1.pep
KKNKYHQQRFPRFCLDAAADAMRPVADDGSRCRAQIKPANQSLGTRWGAALHKSPSMVGLALFTHKQKKKNLREHDHKNTDREGLTTMCLSGLVTSPP

SEQ ID NO: 111905 - protein, 593 aa, Oryza sativa
  Clone ID: PAT_MRT4530_15841C.1.pep
MLRMDGTDLSSPRCNVQHLQNAEELKDQNSTNKRLPRTTELPCSLIQEVQHLEKRLNDQFAMRRALEKALGYKPCAIHSSNESCIPKPTEELIKEIAVLELEVICLEQHLLALYRKAFDQQICSVSSSCDMEINKQSARSFSGILTGSSELDFSTPRKHQLLQSSGMVMARKSTPTTLTSETRTSHYNDKTGIGRSHSSLLQRSICSARVSPSANNLARALKPCHTLPLSFVEEGKCMDPGIVSLADILGTRIADHVPQTPNKISEDMIKCIASIYIRIRDFNAVQHPFFPSPCSSFSSASGLSSKYTGDIWSPRCRKEGYIEAWQDDALGTGESRYFSQQYDSVIEVSALCKGAQRSADVKDMLHKYKSLVQLLESADLNGMKNEEKIAFWINVHNAMMMHLSYLISGQRVNPELIEYHILCCRVHSPTQWLRLLLYPKWKSKEKEDLQGFAVDRPEPLVHFALSSGSHSDPVVRLYRPERLLQQLEAARDEFVRANVGVRGGRRGRGRRVLLLLPKLLEPYSRDAGLGAHDLLRAVESCLPEPLRPAAQQAARSRGGGGGVEWRPHNPAFRYLLARELVGPPAPTAHLSST

SEQ ID NO: 111906 - protein, 256 aa, Oryza sativa
  Clone ID: PAT_MRT4530_15842C.1.pep
MATTTTTTISSSLITPPAAALHHRSSSCRCPSRLTVGAARWWARRRQPAVVVRVVASSSVLEAPEEVAARKLYVGNIPRTVTNDELAAMFADHGTVERAEVMFDKYTGRSRRFGFVTMSTPEEANAAIESLNETDMRTDLFLLYQEVGGRKIKVNVTESFLPNIDRSAPEPEPVFVDSQYKVYVGNLAKSVTTEMLKNFFSEKGEVLSATVSRIPGTAKSKGYGFVTFSSEEEVQAAVSTFNNAELEGQPIRVNKA

SEQ ID NO: 111907 - protein, 254 aa, Oryza sativa
  unsure (1)..(254): unsure at all Xaa locations
  Clone ID: PAT_MRT4530_15843C.1.pep
PLRPRASTTAAAPAGAPPASPSGPRGGGRGAGSRRWWCGCSPPRRCSRRPRSVAARKLYVGNIPRPCTNDELAAMFADHGTVERAEXEAINYSNQLAMVMFDKYTGRSRRFGFVTMSTPEEANAAIESLNETEMLTDLFLLDQEVGGRKIKVNVTESFLPNIDRSAPEPEPVFVDSQYKVYVGNLAKSVTTEMLKNFFSEKGEVLSATVSRIPGTAKSKGYGFVTFSSEEEVQAAVSTFNNAELEGQPIRVNKA

SEQ ID NO: 111908 - protein, 66 aa, Oryza sativa
  Clone ID: PAT_MRT4530_15844C.1.pep
METKIFIQVRAPELSVDNRVAFLLEFVPGEIRDSAFVSPDDLGRTVIELKIRQGLIGSGHPQLKFP

SEQ ID NO: 111909 - protein, 136 aa, Oryza sativa
  unsure (1)..(136): unsure at all Xaa locations
  Clone ID: PAT_MRT4530_15845C.1.pep
MEHATCDDVHEHAINVSHGETASTSTSHQDLHSDSDDSHQDDRPSTSTQTPSPQSSASTSPTAYNTRNLSFPRRDSMYGHGRSIWNSGLWISFELVIYVVQIVAAIFVLVFSRDEHPYAPLFAWIIXYTIGCIAAF

SEQ ID NO: 111910 - protein, 58 aa, Oryza sativa
  Clone ID: PAT_MRT4530_15846C.1.pep
IRTYIIQIKRAMGLLKTVSRIIREHVAMHVTSTTNTRAVSNAAGKPGIMAGCLDVSLS

SEQ ID NO: 111911 - protein, 47 aa, Oryza sativa
  unsure (1)..(47): unsure at all Xaa locations
  Clone ID: PAT_MRT4530_15847C.1.pep
MGKIKIRINGFRRIGRLLATVALQNEDAXLVSVNDPFITPDYMTYMF

SEQ ID NO: 111912 - protein, 140 aa, Oryza sativa
  Clone ID: PAT_MRT4530_15848C.1.pep
MMNHQLGFVVTLLSVSATVLPVGVGVAHAQVSYVPLVGLVGVLAGASLIIAGVKSNATAAAGNPSVFSLPAAGAIASSYLRRRRDLSVVGLLTAASAVTAHVPGVGGGGPAVAFVLFLMLLLGVAMVMLRNPWRPPLTQT

SEQ ID NO: 111913 - protein, 162 aa, Oryza sativa
  Clone ID: PAT_MRT4530_15849C.1.pep
RCTRARGSEGEAAPACAGRRGRRHRRGRGSKAKAAPAAPPPASRPPTPSTPPSPPSVHQVPPPPSPPTVHLAPPPASRPPTPPMPPSPPPPTALAAGSDLHEAGDAQIPPPPSPPTGHLAVECLFETLRCLPGGCERGASTCISCSWFIMEDDELSASVPLL

SEQ ID NO: 111914 - protein, 146 aa, Oryza sativa
  Clone ID: PAT_MRT4530_1584C.1.pep
IQRAFKGKRSMQFPNAKRFPNLVLEIGLGDLVGAIQANLVEPICNLPFPRPSQHPPPLPLPPPLIAAWIARSCAPFLPPAAAAATNQEARNRRTIGGSRSQDSGEARKTLALGQLDGSEIGAKKRRRRVKVGLGPRVRPRVRPRVR

SEQ ID NO: 111915 - protein, 35 aa, Oryza sativa
  Clone ID: PAT_MRT4530_15850C.1.pep
SWAIEPRYRITAHKYMDSRQRAMVAIANESGMQAR

SEQ ID NO: 111916 - protein, 59 aa, Oryza sativa
  Clone ID: PAT_MRT4530_15851C.1.pep
SNFKSTILFDPFNNPGKSENRDEESEFIEEKRGFWWFYDSSHLRSLGTLTPSPTLFYVY

SEQ ID NO: 111917 - protein, 63 aa, Oryza sativa
  Clone ID: PAT_MRT4530_15852C.1.pep
YKGQIFIHYLKKCGVFYLSKKKKKKKKKKKKKKKKKKKKKKKKKKKKKKKKKKKKKKKKGRPF

SEQ ID NO: 111918 - protein, 92 aa, Oryza sativa
  Clone ID: PAT_MRT4530_15853C.1.pep
MAGIIHKIEEKLHMGGGEHKKEDEHKKEGEHHKKDGEHKEGVVEKIKDKITGDHGDGGEHKEKKDKKKKKEKKHGEEGHHHDGHSSSSSDSD

SEQ ID NO: 111919 - protein, 41 aa, Oryza sativa
  Clone ID: PAT_MRT4530_15854C.1.pep
GTSKKDIYSSIFKTTTRGRGEPKIRGDLGKFYKQQGSLGER

SEQ ID NO: 111920 - protein, 147 aa, Oryza sativa
  Clone ID: PAT_MRT4530_15855C.1.pep
IFQSSTLPLSLAHSLSFSLLARAHAYRNRGGERRLDPGGPRRSLSRGSCIGAGSPPFRGFLGLSPRGGGGGELGVLGEGIHQIRPRRRRRPRWSPTPRSTSRFSSSPRAARGEDFDWGGGGGWCSSCGCLLMVGCLRCRCELVVTGN

SEQ ID NO: 111921 - protein, 64 aa, Oryza sativa
  unsure (1)..(64): unsure at all Xaa locations
  Clone ID: PAT_MRT4530_15856C.1.pep
NXLLXNAPXFPXXPAPXIIPSXTSNPPAXNXRPXPPSKGGKWQRQNXGGXSSTGGRNRDGNLGF

SEQ ID NO: 111922 - protein, 133 aa, Oryza sativa
  Clone ID: PAT_MRT4530_15857C.1.pep
MASPPTQGSLDVPPPSNSDGDGGPTTASSGPPFDPASLAGNHIGPGCSARTQETAGSAANYISALPLPVYISSSDSITPQQEPASQAGYTEALHCARAWPAIPIDGPTGPGDAAPPAAALPWIVKETTIACES

SEQ ID NO: 111923 - protein, 66 aa, Oryza sativa
  unsure (1)..(66): unsure at all Xaa locations
  Clone ID: PAT_MRT4530_15858C.1.pep
GGRPARGGYFSDGTGRVXSEEERAAESVYIQKMEREKLEKERRKXDXDKADAAKRAAKVKKDGAPT

SEQ ID NO: 111924 - protein, 55 aa, Oryza sativa
  Clone ID: PAT_MRT4530_15859C.1.pep
IYFTCKKQQLNQKAPNQVHKPFSPHFFSSSILHYSNTYKYSKLKKKKKNTAGKTT

SEQ ID NO: 111925 - protein, 164 aa, Oryza sativa
  Clone ID: PAT_MRT4530_1585C.1.pep
MEVGNKENQNRRNATNNMVLIEREMTTATSDGRRGPTLCTEESAAAAVKLSSGRRLGLFAGVAGWTARGENDKRDKMVLFKGIKQSTNGMGMNKIKNKIQGCRHIVPGRPNMPVEGPRHGPVVGPGQHGPDLHRAVPCLGRAKMPCHGPGRRASGLLAIYRTIP

SEQ ID NO: 111926 - protein, 57 aa, Oryza sativa
  Clone ID: PAT_MRT4530_15860C.1.pep
PPFRTKGTRTKFQMVPCFPKVMGGKVYFIPKSLAVAFPLVNQGFLYQHLNLKRLLKA

SEQ ID NO: 111927 - protein, 154 aa, Oryza sativa
  Clone ID: PAT_MRT4530_15861C.1.pep
MTNMGMISPVRGDENVGGGDETTGGEDDKANQHWKNHAAMEVKKPVGGRRRQLALKTMTPISVGSGEGKPVSEDVDAQQRRYNRPAVQVETSVGGGEVKPAVKTPAVQAKTLVGGDEGKPVVEDVDAQQRWHNRLAVQAVTPVDGGEGKPAVKM

SEQ ID NO: 111928 - protein, 578 aa, Oryza sativa
  unsure (1)..(578): unsure at all Xaa locations
  Clone ID: PAT_MRT4530_15862C.1.pep
WRHCLHQPAASIAADWCPRLYGWLVIPPLIGIFIITTGLSPSPPTGVLAYTVGRSHHRSWASTSSPXPPCLCRPQLVSPPTRLAYYAVVVGRLRLHHQPAFVAADGCPRLYGWRIPPPLTGLVIYTTGLLPPLPTGVFIAIDGRLCSRCAGAMTSRAECLNVRXIRSGKSKLTIGEIHIYKHFXILEFSLSIRIYGFKLISXCSRNGSVRTSPPACRRHRRLVSSPIRLVXTPPLLGVYIFTAGLPSPPSTGVTACTASLXYATVVGHLRLQRPACLHRRRLMSSLARLAYYTAVVGRLRLHRXRLAFVAADWCFRLYGWLVTPPLLGVYVFTAGLTSPPPTDVSTCTAGLLYRRCWASTSSLTGLPSPLPTDVFAYTIGWXTSPLLGVYVFIAGLPLPPPTDVSSCTAGLLCRRCWASTSSPTGXPRPPPTSVSACTAGLLCRRCRTSTSSPTGRLIXRQLMLSSSRLXYVAVTANRRHRLQCKLSTSAADWFLHFHGCMILPVLIGLIVFTAGRLVSCQXCPRLHGYASPPLLMGDYVFASGCFRHSRLVISPSRLTYYANADERLRQYHRLLHRY

SEQ ID NO: 111929 - protein, 190 aa, Oryza sativa
  Clone ID: PAT_MRT4530_15863C.1.pep
MAGRVVRSCVQTGLKAVNSVLGLAGMAVILYALWMLRAWYRDVADLHYRLPVPWFIYTFIGLGVFMCLLTCSGAITTDVFLNSNWEEDFPDDPSGKFEEFKDFIRSNFEICEWIGLSVVAAQVLSIVLGMVLRALGPDRESDYDSDDDPSVPARLPLLRNQYQHGINYSEHTLPQSSDSWSLRILDKANK

SEQ ID NO: 111930 - protein, 461 aa, Oryza sativa
  Clone ID: PAT_MRT4530_15864C.1.pep
MQTRKKGATKNALGDPASTKTSRQPRRAAQAAASEKKVNDLITSSAKKKKSVGAPSKKNRASKGGRKLISACDAANSENEVSQVVSGIPHDQKQSDDNVDGRPCNSIFSPAYHLQKECGASNFAKGLEHKGDTLGSVSSVEERTTHAQGRKEVTTSRSESTSHAVKTCVGSDHHTLNAQSAFCNTPLEEDEFSELGNLSSEVSAIYLAMQQSKLECIDEHSQDSISTEGYVDPEDTEEYDDFDPYAFIKDLPDLSLVVPKFRPVLLPKQTRSCPTTTLVLDLDETLVHSTLEPCEDADFAFPVYFNFREHTIYVRCRPYLKEFLERVANLFETIIFTASQSIYAEQLLNVLDPKRKLFRHRVYRDSCVYVEGNYLKDLTVLGRDLTRIMIVDNSPQAFGFQLDNGIPIESWFDDPNDQELLKLLPFLESLVGVEDVRPYIARKFNLREKVVISINAEGLVW

SEQ ID NO: 111931 - protein, 109 aa, Oryza sativa
  Clone ID: PAT_MRT4530_15865C.1.pep
LSQIRRRRVFLPQIRRGRRRLWASAVAWRLLSSSIPHPVPSSAPKSGKCNDDLVDSAMPSTTASALEQPGGAGAGGGVPPAVAAPGRALLAHDHGAGRRHRRAPPLAPR

SEQ ID NO: 111932 - protein, 133 aa, Oryza sativa
  Clone ID: PAT_MRT4530_15866C.1.pep
MAMVEAVASEKLGGAGSRRRRRTTAARADTAAPSPSFHADLGGWTVSIFLLKLRFGRGRYRRGPGCDDSGKSNPVHGGALGQAAASGPKWFSAASWIGGEAGSSEARRSGINRCGAAGVRRRAWAERKENEGS

SEQ ID NO: 111933 - protein, 81 aa, Oryza sativa
  unsure (1)..(81): unsure at all Xaa locations
  Clone ID: PAT_MRT4530_15867C.1.pep
MGTTQNGCRASSIPNSSSPRQPSQHDKSLDAPPLCLPMLSSLPWLAGXDAQSGASTCGGEVRAMERAXGGVEGGGAPGRAA

SEQ ID NO: 111934 - protein, 119 aa, Oryza sativa
  Clone ID: PAT_MRT4530_15868C.1.pep
MTLVGAGAGGHTARAVAGRTGRHIAWGAIDSTPDEQRGIDSITSFASRGYSDDGDISGHYYKTVGSKVERASGGTGDGLHKQAEEDGGSGALHNRQSILLVSPLALVLHLPEGLSFAGS

SEQ ID NO: 111935 - protein, 65 aa, Oryza sativa
  Clone ID: PAT_MRT4530_15869C.1.pep
MWGAPQLGGERPYGPVGIGLICTGKINNPLRGMPPERDVEFCIDLVPAIEVEVGNCSGAYYAPTS

SEQ ID NO: 111936 - protein, 626 aa, Oryza sativa
  Clone ID: PAT_MRT4530_1586C.1.pep
GSRRRSLLVAGYSHPIPSSLLLPLRVWHGGAPDRRWELTPHPPAKMPQVMVVARNFMDMVAALPAAKLDMLYDSAFICEAVLRSLPPLAKKYALQMLYVSAPVAAAAMEEWVLDEYAAKHRVAIDRLLQLRVFVEVRDRRKEVSYKMNQKFQGNMQKYLVDGGSLPREPIPSSVTARLPTLAELESFALEQWEVRMTKAYNFSARSSEFKVHLISSLAFGIYLDGEAPRLTENGFQFLLMETNAQLWYIMREYISSAEERGVDPTELISFLLELSFHTLGEAYSLNTLTDVQRNAIRDLAELGLVKLQQGFVVVETNFRMYAYSTSRLHCEILRLFSRVEYQLPNLIVGSITKESLYGAFENGITAEQIISFLQQNAHPRVADKIPAVPENVTDQIRLWETDRNRVDMTLSHLYEDFPSKDMFDQCCDYARDHGCLLWEDAKKMRLIVRVEFHSEMPRVYKRGLHKESHASHPTPPTPPTRVDEQSKSRPPGMGKKKKNKNKKNKKSSAPQARGRGKNSDRRSFTRGMLQSINNMTVMRATPRDPFVVATVTGRCDGDPIDVGNPDIAAAATAAADPVVAAAPVVAPAAAGGPWDEEEVEPAPATTDLRAAATTGGEATETETAAV

SEQ ID NO: 111937 - protein, 139 aa, Oryza sativa
  Clone ID: PAT_MRT4530_15870C.1.pep
VIAPLVDFVGNTIQFPPTYRPVKYGFAGLPQANGEVSPSLLASYYNIESNTCQTDSSTMSVFEALAQSYSPTDLTSFQTKFSIPQQAVAKVVGPNSGNFCKSNPNNCVEAGLDVQWIIAVAQGCPLWFWSISGNGDIFL

SEQ ID NO: 111938 - protein, 25 aa, Oryza sativa
  Clone ID: PAT_MRT4530_15871C.1.pep
EDENKRGFNLCLQKNYSLYHTLTIE

SEQ ID NO: 111939 - protein, 62 aa, Oryza sativa
  Clone ID: PAT_MRT4530_15872C.1.pep
GIMLALIAVGAKLDYVMNCEDGVARTVSEGGFAASVVLDMMREGQKHRSTQWWAACCYIIRL

SEQ ID NO: 111940 - protein, 83 aa, Oryza sativa
  Clone ID: PAT_MRT4530_15873C.1.pep
MGLAGSGLGRWRRQWLDDGNDNDSGTSVYPLPLPRWIWLKLDNCGEEARRWQRLKIRRGPAHWDHLTISDERLGVRVTAGYKS

SEQ ID NO: 111941 - protein, 86 aa, Oryza sativa
  Clone ID: PAT_MRT4530_15874C.1.pep
MDAVPDGEDAHDGQMEQLDLGVWVADLALDLDVRRDEDLSVEGQRHELHDCKDDEEVDDIQANGSKLRDYTKGVENNIRQIELDSI

SEQ ID NO: 111942 - protein, 47 aa, Oryza sativa
  Clone ID: PAT_MRT4530_15875C.1.pep
MGEWELGGRPTLAHTTGGRWPATPVRREGRWPCRHLGCMGGGRPCPR

SEQ ID NO: 111943 - protein, 221 aa, Oryza sativa
  Clone ID: PAT_MRT4530_15876C.1.pep
MEERGADVSNTCRDSFGRSTTTVGITAVGIRLCRPVLSGGAWYQQGSGRAGTEGIGGTLGRASARSVASCQSSRAGVKDGGIPDVGQVSFAGSALALHTLVTSFAEGGSCSRSRCFGHRGGVGWWRSAARSAAVAAGPRAARRQYFRPGRGCHAVASPRAERGRDRRHWISVDGRRLRVGHGGLRAQRLGAQSIGQGGTRLGLALPAGIAGRGGLELVWEA

SEQ ID NO: 111944 - protein, 225 aa, Oryza sativa
  Clone ID: PAT_MRT4530_15877C.1.pep
MAAAAASAAAATAAEDGARLLRLEEQAGHGGGGAWEYLCLARRLRARRPEPVLRLGLALLNDSSARSRLASEQWTLYEQVAVAAMDCQRLDVAKDCIGVLSKQFPGSMRVGRLEALLFEAKGEWTDAERAYALILENNPFDQIVHKRKIAIAKAQGDMALAVEYLNKYLELFMADHDAWRELAETYVALQMYKQAAFCYEELILAQPTVPLYHLAYAEVLYTMGG

SEQ ID NO: 111945 - protein, 297 aa, Oryza sativa
  Clone ID: PAT_MRT4530_15878C.1.pep
MVNIRASGSGNNNNEGNPTLTQVLAQQTQLMNMMMQQMHNQLNQGYNNAPLPRSKLADFLRVRPPTFSKKQCTDQEKVVFASHQLQGSASEWWDHFRMNRAEGQPITWEEFTEGFKKTHIPAGVVALKKHEFRALKQKDRTVIEYLHEFNRLARYALEDVRTDEKRQEMFLEGLKDELSVTLISHDYADFQQLVDKAIRLEDKKTRMDNRKRRMTVFQEAQGSSQRQRIKPLQVGESGLTSQEQSQQMNIGGEINSETNASNEVNIEQATQSEPVQQDQSQEGNSSAREQRCSIPKF

SEQ ID NO: 111946 - protein, 366 aa, Oryza sativa
  Clone ID: PAT_MRT4530_15879C.1.pep
MVNTHASGSGNNNNEENPTLAQVLAQQTQLINMMMQQMQNHLNQGNNNAPPPQNKLADFLCVKPPTFSSTINLVEAGDWLHTIEKKLELLQCTDQEKVVFASHQLHGYASEWWDHFRMNRAEGQPITWEEFTEGLKKTHIPAGVVALKKREFRTLKQKDRTVTKFLYEFNRLARYAPEDVCTDEERQEKILEGLKDELSVTLISHDYADFHELVDKAIQLEDKKNRMDNRKRRMTVFQEAQGSSQRQHIKPSQVGESSLTSQEQSQQLNIGGEINSETNASNEVNIKQATLSEPVQQDQSQENNSSGREQQVCFNCYEPGHFARKCPKPKHQQPQGQVNNIVVTGANAVPVASSSVTAQPPVSKQQ

SEQ ID NO: 111947 - protein, 80 aa, Oryza sativa
  Clone ID: PAT_MRT4530_1587C.1.pep
RASGLAASLRYGGCAILTPNTTVQIAVVLRKGFDSDEETICTECFNLKTDNMLWKATDEHAEQRDLQGHYQLGSYRVEEK

SEQ ID NO: 111948 - protein, 206 aa, Oryza sativa
  Clone ID: PAT_MRT4530_15880C.1.pep
MERHGTIRTLMIESAADDHLCHLMVMAFMARGHSFKLSVFNQLAHLLVFSPLPRQAISNNGEVGLSRHTPSPFLTFPSSTLACNPNDGKARHEHKEDHGDEHWLKGAASKIKWSEQKIEFSEADHPKTTVTPVRYPIVVEPTIQNIKVARVLIDGGNSINLLFASTLDAMGIPRSELTPTDQPFHGITPESPSKPLGKITLPVTFS

SEQ ID NO: 111949 - protein, 295 aa, Oryza sativa
  Clone ID: PAT_MRT4530_15881C.1.pep
HEGDEFVWGGAGTSFATGNNTYLSVATAPGMAKHAGAYWLDSPNYGVFTWDDKLPGAQVLLSRLRLFLSPGYPYEEILRTFHNQTDNVMCSYLPMYNSFNFTKGGMIQLNHGRPQPLQYVVNAAFLASLYSDYLDAADTPGWYCGPTFYTTEVLRKFARSQLDYVLGKNPLKMSYVVGFGNKYPKRAHHRGASIPHNGVKYGCKGGFKWRETKKPNPNILIGALVAGPDRHDGFKDVRTNYNYTEPTLAANAGLVAALISLTNIHVKSGIDKNTIFSAVPPMFPTPPPPPSAWKP

SEQ ID NO: 111950 - protein, 272 aa, Oryza sativa
  unsure (1)..(272): unsure at all Xaa locations
  Clone ID: PAT_MRT4530_15882C.1.pep
LISTGLKVNYHKSCMIPLNVPSAKAESLAGLFGCSIGYLPFTNLGVPLGTTRPKVMEFAPLIHRIERRXFATTTFLSYGDRLTLVNSVLSSLPTYYMFSLSIPQPVIDAIDKSRRHCLWRGSDFNSTKKSLFFRSLVGQPKEKGGLGVIDLRMHNNALLMKNLHXFYNRYLLPWVKLIWEKYYVGKTPHAVIPMGSFWWRDVLXFVDVFREIAKCSVRDGKTCLFWDDFSNDDLRVXRACSFAISRKDTVFVVAQKDISHNFVLPMSEQAYH

SEQ ID NO: 111951 - protein, 171 aa, Oryza sativa
  unsure (1)..(171): unsure at all Xaa locations
  Clone ID: PAT_MRT4530_15883C.1.pep
EKKGEKKPQKTPQRRKKNGKKKGGKKGGKGGGKGAPPPPTPQNPPGDQAGKKLQNNRAPFGPPPGGGPLGGPLRPRKLGEKKKPPKGPPPGGKQDXSPELGGPPDRRPPPGMPPKTPPKPPPGAKTTPKKTLKKAPSRGGNPGDPKNPRNHGGPPGKNHRAIKGWVKEGPP

SEQ ID NO: 111952 - protein, 68 aa, Oryza sativa
  unsure (1)..(68): unsure at all Xaa locations
  Clone ID: PAT_MRT4530_15884C.1.pep
REVEEDGDHPEPHXTPQLQDTSTTTDTVAACIGAAVAVAGSNGAPSPLRATSTRPPPRAASVSRRYSL

SEQ ID NO: 111953 - protein, 555 aa, Oryza sativa
  Clone ID: PAT_MRT4530_15885C.1.pep
MASALLRKATVGGSAAAAAARWASRGLASVGSGSDIVSAAPGVSLQKARSWDEGVATNFSTTPLKDIFHGKKVVIFGLPGAYTGVCSQAHVPSYKNNIDKLKAKGVDSVICVSVNDPYALNGWAEKLQAKDAIEFYGDFDGSFHKSLDLEVDLSAALLGRRSHRWSAFVDDGKIKAFNVEVAPSDFKVSGAEVDAFAAEPFKGNPAAVCLLEGEDAAAAADERWMQSVAAEFNLSETAFLIRDPSSSAAAADAAPRFRLRWFTPVAEVASPFPPTLGFLLLVSPVFIRTRRRRCLQVNLCGHATLASAHFLFTTVLAKQQHAAAAMVEFVTRSGILTAKKVPAPPPPANDGGVPGEEKLFIELDFPMIDLVEYDSAETLSIPETLNGARVVSVWKSSTAGDLIIKMEVMNHGNATATIISLRERIANLLRMLILNEELVELSSGKEVADIIPNINEIKKCDGRGVIVTGPAPAGSDYDFFSRFFCPKFGIDEDPVCGSAHCVLAPYWGGKLGKQKLTAFQASPRSGTLYLELDGENRRVRIQGEAVTVMAGTLLA

SEQ ID NO: 111954 - protein, 39 aa, Oryza sativa
  Clone ID: PAT_MRT4530_15886C.1.pep
QTSHVGATSAKTAEGPCLPDFRKLGDGSYPVLRSRDENG

SEQ ID NO: 111955 - protein, 130 aa, Oryza sativa
  Clone ID: PAT_MRT4530_15887C.1.pep
EILQSKILNGRETGRSLGFGFLPFSSDQAMLYAMEGMNGKELAGRNITVIEAQSLRSGGGGVGAYAQSGVGGGCGVGGGSGGGGGGGCGQRREGGCGGAGGYGGGRGGGAGSAGVFFIRGGGNSVGHWRN

SEQ ID NO: 111956 - protein, 83 aa, Oryza sativa
  Clone ID: PAT_MRT4530_15888C.1.pep
KSAPSSGFSSPVQSPRRLSSVDFLSTATSTQGANLSSAQSVWSPDLYGSSPRCASPPSPMHPKLFPENHVSRPEGNGSVNFHP

SEQ ID NO: 111957 - protein, 90 aa, Oryza sativa
  Clone ID: PAT_MRT4530_15889C.1.pep
FFFFFFLSYKHELITSIQMNNPKPKPTKSRLVRPHNIHRSDGSQSQQPIFANYVQILKPIIVFPRKIKNKLSQKLTKIVVQSWTIIIKTH

SEQ ID NO: 111958 - protein, 169 aa, Oryza sativa
  unsure (1)..(169): unsure at all Xaa locations
  Clone ID: PAT_MRT4530_1588C.1.pep
IYLLIHHHAAPHSQQASTLLAPGSIPVHLFPNPKQSTHSTQVPAHHFPCSSIPPKILNHSTLNPHHHYSPHTPXAASHIHTHHSAHAPSFSLAHASHIYISLANITHQXIVSMVTPHTPXQANHKRTXTTHHAPNHTHAIPILAAHTHTAXHTPPSXYIPPHPKPQSPL

SEQ ID NO: 111959 - protein, 827 aa, Oryza sativa
  Clone ID: PAT_MRT4530_15890C.1.pep
MRWWKRSVSPSPSPSSSSASASTPASPARASTSRVGGGVPSRRRDVVGFGWGGGSDPQPRLTRQRRLRHVDDIEVGVSALGLDSSPSPAAPSSCPSSRDSVGFGLLTASSTPISRTASNMEVAPPRSSSSPVLLPHPLPLPDEGDSPCRGSGRSLPSPKLFEGDCNGSAVESNLLGVSEIGSDRASLFPSISEPNWDCCFASHLRRVMAKTVQKNPEHGDLRSNGTNGINCGQRRKAFKEKLQDKSSAETLTFRLNIPAKSAPSSGFSSPVQSPRRLSSVDFLSTATSTQGANLSSAQSVWSPDLYGSSPRCASPEKIMGSQERSPRSSPLRSPVLRSKNPSAPPSPMHPKLFPENHVSRPEGNGSVNFHPLPLPPASVSPKQTNFSHQPVPKVDAPSMAGQWQKGKLIGSGTFGCVYEAANRHTGALCAMKEVNIIPDDAKSAESLKQLEQEIKFLSQFKHENIVQYYGSEYIEDRFYIYLEYVHPGSINKYVNQHCGAMTESVIRSFTRHILKGLAFLHSQKIMHRDIKGANLLVDVNGVVKLADFGMAKHSASYSLWCLAAVAGGKRVECRGRRESQTRSEKADSDPGFSVAMVLVVATMNESKGELGSQAEGQVVEEGKLSTAAPNLSLKGTPYWMAPEVVQATLVKDVGYDLAVDIWSLGCTIIEMFTGKPPWSGLEGPAAMFKVLHKDPSIPDSLSPEGKEFLRCCFRRNPAERPTASKLLEHPFVHNSNNFNQHSALHSPTGLKSTDTGHNARDKKSCKIVSCMRGKNMITTGETSSARSPGSLSNRVAVGLTALPNLETRSLSPTPMSLRSSPGSAAHT

SEQ ID NO: 111960 - protein, 93 aa, Oryza sativa
  unsure (1)..(93): unsure at all Xaa locations
  Clone ID: PAT_MRT4530_15891C.1.pep
MPLLDLHLIIYHWRNRPPPPLPVSPSSSPTAPIRRASPIHAVASSPKPCRARRRSSPRXPPPTAPRSSPPRPSPPPASSSTLRASSPPHSLSP

SEQ ID NO: 111961 - protein, 179 aa, Oryza sativa
  unsure (1)..(179): unsure at all Xaa locations
  Clone ID: PAT_MRT4530_15892C.1.pep
ESDAPSLSPAFVLPRWYSRSAQPRLRPPPPPPGLHPRHQLPLRRPMELHRHWLAPYAVTHFLLFLRSRWRWSPPPPHVLPVQAEAEGSGLIQRADGRRCGSWPWIGSPSSTRRRXGTTVEEDGFAVAVVHVDLLLIPFLSSNMWIEGGGTSPPAANXGGLPQHFLMKGGSGSGGPIPVL

SEQ ID NO: 111962 - protein, 63 aa, Oryza sativa
  Clone ID: PAT_MRT4530_15893C.1.pep
MAVDGDAVRRRPPQPPPRSGGSRRDASTGFAESALRVPGSNVRNSRIHPAFEAQSVLHVYIYT

SEQ ID NO: 111963 - protein, 386 aa, Oryza sativa
  Clone ID: PAT_MRT4530_15894C.1.pep
MASSTSLAALPSQLASPARRAALSRSATARPRHHHHPLLRAPPKGCRLVVTCNAQTAVPTSIAQGTPVRPTSILVVGATGTLGRQVVRRALDEGYDVRCLVRPRPAPADFLRDWGATVVNADLSKPETIPATLVGIHTVIDCATGRPEEPIRTVDWEGKVALIQCAKAMGIQKYVFYSIHNCDKHPEVPLMEIKHCTEKFIQDAGLDYLIIRLCGFMQGLIGQYAVPILEEKSVWGTDAPTRIAYMDTQDVARLTFIAMRNEKASKKLLTFAGPRAWTTQEVITLCERLAGQDANVTTVPVAVLRFTRQLTRFFQWTNDVADRLAFSEVLSSDTIFSVPMNDTYQLLGVDSKDILTLEKYLQDYFTNILKKLKDLKAQSKQTDIFF

SEQ ID NO: 111964 - protein, 179 aa, Oryza sativa
  Clone ID: PAT_MRT4530_15895C.1.pep
MAALMIGTLLRAYYVLYIYGLLTGQQAWPDPWRKGPQAHGCPLGLLRPGPILATPICFVKCPSPYTLRPCGLSDGEARSQALDLRPGLAEGPRGGRGGGVAGGGNDVVDGKEEEGKGRCPLRPAAGACGKQLRQLLKFDELASSFAELIVGSCRQDTAVELAPAPLAPSSPTPPRKRGR

SEQ ID NO: 111965 - protein, 72 aa, Oryza sativa
  unsure (1)..(72): unsure at all Xaa locations
  Clone ID: PAT_MRT4530_15896C.1.pep
IINSQHHISLIKFXTXTEIQTTXTDLTLSPILDIHPRGPHEYVHLYGTRTYIYCTGYTHAHSXAETRIVVNL

SEQ ID NO: 111966 - protein, 124 aa, Oryza sativa
  Clone ID: PAT_MRT4530_15897C.1.pep
LYFHNIFVLDQKILLFFSIKLVKLRVKSQNVSQPSWSNKKKMYGTLSHFEISQKRDMSKASYAGGGVLDADVCSGELAYGFEQRPHRPGVGDPVAAAALGARLPYPLPSPQYPVTPCRPALLLF

SEQ ID NO: 111967 - protein, 708 aa, Oryza sativa
  Clone ID: PAT_MRT4530_15898C.1.pep
MDLPKRVLPHGSPRGSPMATRRRDAEADENVRAWSENPGRLGAVAEWTASLERKKVLGERNGGGDGSGEAASPPQFFSQAKPATSPPSLSCRGEGPYDPKTNYTTPRPEFLRYNPEKRREILLRLEREAEDESSSATSATPTPTPSECVSSGSSVRGGEAELDRADAKEEEIEIPSPRGLDRADAEEEEIEIPSPRGGWARRLLLLLVAAACSCCYIYCMSSSPFPTSQMGLDFAGTTGSVHDASAHQVGSLELRAPTEMMGSHHVFEEATDQTVPNGSENAAQLYGPMGGSRKNFMAIAAMGLADSCPNVPFGEFTCQIGDRAVEDVQNSKEDFQLSELMVATSENAEQLGEVVSLNENVTADSIGSTYTADMVEGESGLVHQEEAGEDHSQHSQQLASMEKTIEQENNEVGYDGEGLENDRLDQATELLEYENPAAAAKAIVAMVKSLWPSIKLHLMEILACFSVAAFAIAAAMLKCFQRSPKGASVSTRRLEQSPLAPNPRLPVLPSPQSVLQPVQLTVPKVEPPVNLKIPTLSPLHKPDLFASFREQVPLPEPIPVSSVNLNNAVQFPLPKQIDSGNRPQKVHQDDAGSARIPDSYSVGRRDIDSSRPPVVALLGEFSLVDASSSRGSSRKGSNEHAGDVAVQEPSVTLRKDVVKMQKETTAIKSPSARKTKKEENAAKVEKKDVTTPTPLRRSNRLLNRVTSP

SEQ ID NO: 111968 - protein, 198 aa, Oryza sativa
  Clone ID: PAT_MRT4530_15899C.1.pep
TYDQEESAVVHAEMGPHSLLTRSDAVPAGRKDGKAPAVGDQPQKERRVRPAISPHHLTPSSFPPGHGRRRDATPRLRRAKRGRRGCGAGSRGGTNPTTQPDQDNTAESEKGQKRVCAFCLCALALRNSTTPNYTLDSRWMFLWASRCCQCAQWPYTTHICTVTVLFFPCTSFVSLYGVVVQLFRPMLPKIYSSFLLYC

SEQ ID NO: 111969 - protein, 66 aa, Oryza sativa
  unsure (1)..(66): unsure at all Xaa locations
  Clone ID: PAT_MRT4530_1589C.1.pep
ARYQRKTCASYNISPYGMTFVYPSASMSASQQPQGSWADDEQMKYACSLXMMSMSASGMSGRSRSR

SEQ ID NO: 111970 - protein, 198 aa, Oryza sativa
  unsure (1)..(198): unsure at all Xaa locations
  Clone ID: PAT_MRT4530_158C.1.pep
MTHSSSFLRLPATSSPHPPPADDASAAYAVVVLNQRLPRFAPLLWDRARLRVCADGGANRVFDGIXRSLLPAEDPDQVRIEVQARLLIQGDLDSIRPEVKGFYSXSLGAEIVDESHDQDTTDLHKCVSFITRNPPGSEESNLYILVLGALGGRFDHEMGNINVLYRFSNIRIVLLSDDCSIFLLPKTHSHEIHIERSI

SEQ ID NO: 111971 - protein, 85 aa, Oryza sativa
  unsure (1)..(85): unsure at all Xaa locations
  Clone ID: PAT_MRT4530_15900C.1.pep
MSFVIIFTLLTIIKDAITGNKLFSSWFGMVYSWFGDRSVQPGXWLFRMVGPEQXGVLFSVXLKLMINYSTVLXNSQMFAKCCFCK

SEQ ID NO: 111972 - protein, 71 aa, Oryza sativa
  Clone ID: PAT_MRT4530_15901C.1.pep
IRSILDCKLKHQLRNILTVLINKYGNELRPIGCSRFHSLYQTPPLIRSSSYLLCGARTRRRRRRRPRHDAP

SEQ ID NO: 111973 - protein, 351 aa, Oryza sativa
  Clone ID: PAT_MRT4530_15902C.1.pep
MAVRPGREAAPGQARPTAQVRRHGRAAGRRATLAAKGCGRRRRQRRPVSGDAHAAAGLLVGPGRVRRRRGEPAGATSGSAGIRARATSQEEGPAAGLRQQTAAAASAQEGSSSSSCWKFLSEDEPNWKFVGCVQLFYCIQDHCFKFPNAWLLLESCVAISSRIIPKIVKHLEGSSVIGLKPSVITVQVGEDVVSRVMSFTKNGWAVCVLSANGAVSNMTLRQAGSSGATTVNYEGHFEILSLSGSYLLSESVGLSSRAGGLSVSLAGPDGRVLGGGVAGPLNAATPVQVVIGSFLADVKKGHKQAMPSGAPYPGPSAKVIGGSDEGIGVCSYWTSRDQLYYCKKIEETRTR

SEQ ID NO: 111974 - protein, 86 aa, Oryza sativa
  Clone ID: PAT_MRT4530_15903C.1.pep
IATTVMNEAQDTLRLQYGSWEAELRKKLDAAQGWAVLSHGPKSTSWTTPVPHAVATKSASPAALAPSRPAPRFFQDLGSKEAVFVL

SEQ ID NO: 111975 - protein, 325 aa, Oryza sativa
  Clone ID: PAT_MRT4530_15904C.1.pep
SKPSLRVEEHTILSLLLRPSRSLSTSTTPATRAPATPGAVLWDLAASRPPSTLPLYDAAVRLHLAATSFGRVRLSAAFVHPGHRLPAPSPSAAAAAVHLCRVCGRRFRARDTLLRHFDAIHAREHAKRLARIDSSRGDRRVRLAAALSLKLSKYEKAARELTAAADPCSPADDLRRARVAVELSPTPSVSLLERAHEVLDGGSVRCLMLVSARDELAPLLRLAREKGVRSVVVGGESGPARWADVGFSWAEVIAGKARKAAPSVSGKWRDRDVLKRLEWRYDDDDEEVVFEEDGDEDGIDELTRNSKGKPWWKLESDGEDSSACR

SEQ ID NO: 111976 - protein, 44 aa, Oryza sativa
  Clone ID: PAT_MRT4530_15905C.1.pep
MMKHLQVLNSLLNAWIIFIFRKIRTFIFKLRGQKDFRFFFAIHI

SEQ ID NO: 111977 - protein, 131 aa, Oryza sativa
  unsure (1)..(131): unsure at all Xaa locations
  Clone ID: PAT_MRT4530_15906C.1.pep
LSREEPGLPSPNSPIPPPDXPPPPPPPPAPRASFTEYPPPPSSPPPPPSPPSRTRXPSPPSSRRRTTPPPPPSRSRRKPPPPPPPPPPPPRSTRRRPVGRRRSRSPSSPTAISVRISIVSIETILFSSPGA

SEQ ID NO: 111978 - protein, 90 aa, Oryza sativa
  unsure (1)..(90): unsure at all Xaa locations
  Clone ID: PAT_MRT4530_15907C.1.pep
YRTRFHPHSSQGGGQSPLMPRXIKKPHRPSQGPSELHHAHPCLDITICLALRLEEPQRLSQSTPERRESPKEGGRRHAGPHVIDTEEACH

SEQ ID NO: 111979 - protein, 130 aa, Oryza sativa
  unsure (1)..(130): unsure at all Xaa locations
  Clone ID: PAT_MRT4530_15908C.1.pep
TNLDVLTPHPAPPPLTTPPAPPLTPAPVPXKRPAPAATPTPPPLSCLPLPLRRPSHACCRCSAAPLTPPPFVPLGRSCGGVEPLIADYPSPLAAAVVACVVVTRHQRSPFPLCRLAVRPYYTSAAEQPPS

SEQ ID NO: 111980 - protein, 853 aa, Oryza sativa
  Clone ID: PAT_MRT4530_15909C.1.pep
MSAAQQQKHEVDRATVAGAVAALFKWMRARAAEAPPNLLADERDDLLLLQLSLRRIPPSPTTKPRLLPLPHPVIVPGESASICVISDDRPKSRSPAASDLLDASRSHHLPVSEVIPLSALRTDYRPYESRRRLAASHDLFIADRAVLPLLPRVLGKAFYSTKKAPVAVDFARTGWLEQVRKVMNSTFLYLRTGTCSGIKVGRLDMKEEDTVENVMAAVEAAVENVPKKWANVRSLHLKAVDSVALPIYQAVPELGMKIEVRFAQLEGEVGSGEVIDASEAGAALKGVGKKKAKKALKHVEEENAGEEAAQESGKRKRGKKQLAEDLMEQDIQDVSEKRKKVKEGTPAAETPKISKKGKEKSKRALDKEGEDASVEEASNKKKKGKKEVVSDVGEKNSKVKKSNGDKEKRRTRLRIADAKRPQEEHVFGYIDWIPEHHGFQFSPCYKRSLPATERYIRGEAPLLSVSNSTEDQTPNGLSEAIVVRKGLSSICQRFPSFLHDFRLGQQLAFHLRELCSAVASEIHAKLARFLHRFWTTLQGSSKDIGWLKRTKTLPCSVDGLFSNHSPLYFVNTKRIFSKMGLTCHIARIHSEASVEKNARELKLYIEELYWGSGKQVLLLGHSKGGVDAAAALSLYWSELKGKVAGLALVQSPYGGTPIASDILRKGQIADKETRRIMELIICKLIKGDIRALEDLTYDKRRDFISKHKLPVDELPIISFHTEASTAPTMLVTLSRVAQAELLPWLPLPRFLSSSEYAESLLASLKLPVVVPASAAMAVSALHLRLRYGERSDGLVTRRDAEVPGSVVVRPERRLDHAWMVHSTLRKDHAEADATQMCEALMAMLVEIGRKKCC

SEQ ID NO: 111981 - protein, 1791 aa, Oryza sativa
  unsure (1)..(1791): unsure at all Xaa locations
  Clone ID: PAT_MRT4530_1590C.1.pep
ELVWHLIDHLHAGSLLVTLGGCRLLDGLWRSCLVISPRRLWRRPGAGFAITGTPLTEIDHRNLQLNAQXMNALFNSLSQEEFDRVSNLETAYEIWNKLAEIHEGTSEYKNAKLHFLKIXYETFSMLPHESVNDMYGRLNVIVNDLKGLGANYTDFEVAQKMLRALPENYETLFTMLINSDMSRMTPASLLGKINTNDMYKLKKKEMEEASPSKKCIALQAEVEDKGKGKERGRGSNSNRRRNRRPNKTFSNLRCFECGEKGHFASKCPSKDDDGDKSSKKKSGGYKLMKKLKKEGKKIEAFIGEWDSNEESSASSGSEEEGGDDXSSKKKKMAVVAIKEAPHSLLKGSSKVTSLSDSEGDDDCDDVSYDEFVSMFEELQAYNEKEIVKFKALKKDHASLDVLYEELKTSHERLTISHEKLKEAHDNLLSTTQHGAHIDVGISCDLLDDSATCHIAHVASSSIPTSCDDLVDMPSSSSSSCVSICDASLVVENNELKEQVANXDKSLERCFKGRLMMVALLLDMWVPLYSVVNYRTGGSHWVLDSGCTQHMTGDRAMFTTFEVGGNEQEKVTFGDNSKGKVIGLVVKTSLGWLWHRRLAHVSMNQLSKLSKRDLVVGLKDVKFEKDKLCSACQAGKQVACSHPTKSIMSTSRPLELLHMDLFGPTTYKSIGVERKNRTLIEMARTMLDEYGVSDSFWAEAINTACYATNRLYLHHLLKKTSYELIVGRKPNVAYFRVFGCKCYIYRKGVRLTKFASRCDEGFLLGYASNSKAYRVYNKNKGIVEETANVHFDETNGSQEGHENLDDVGDEGLMRAMKNMSIRDVKPIKVEDKPSTFTQDEPSTSATPSQAQVEVEEEKAQDPPMPQRIHTALSKDHPIDQVLGDISKGVQTRSRVASICEYYSFVSCLEPKHVDEALCDSDWINAMHEELNNFARNKVWTLVKRPRDHNVIGRKWVFRNKQDENGLVVXNNARLVAQGFTQVEGLDFGETFAPVARLEAIRILLAFASCFDIKLFQMDVKSAFLNGEIAELVFVEQPPGFEDPKNPNHVYKLSKALYGLKQAPRAWYERLKDFLLSKDFKIGKVDTTLFTKIIGDDFFVCQIYVDDIIFGFTNEVFCKXFGDLMSRGFEMSMIGELSFFLGLQIKQLKDGTFVSQTKYIKDLLKRFGLEDAKPIKTPMATNGHLDLDEGGKPVDLKLYRSMIGSLLYLTASRPDIMFSVCMCARFQAAPKECHLVAVKRILRYLKHFSTIGLWYPKGAKFKLVGYSDSDYAGCKVDRKSTSVSCQMLGISLVSWSSKKQNSVXPLYRRGGICFGGNXILSFGQNEIYPQNEIEKEFEKIFKTKLGAWQSDRRYMRGLTGQVRRSDRPHRAGLTGRGGPMMPPRTRHGCRAPTLDPMSEPEESSGEDYAQSDEEVEANVEGASEEASGDDVSGSGEDEDEQSDEMNIDPSIQFVVNMRNPSQYTILRHHDQFLRPRDTPDPHFHTAFQKMWVAGDXSEMKWMSDTLQCSISRRQFRQLLNIRLDFGDDLHEEHTHNPLSIDYLSQFYEDGVRYTHGKVAGLRTIPSVVKRIMRATILPRLGNNDDIRGVAWHVIDAIIQGRQFDIVSLMMPEIAIFKRTFTQGIYYAPYIMRLIQXKLGAAGQNLKKHKQYKPRLQPRAPRAPRTVPSSHPGASSSPAPPPPHGYDPNXFFHPHYAYFGMQPNEYFNPVLGAINTLSESIQRLSTRHEALHEDVRGLRTDVGDLNASMGRLHTRVGALDSRVQMLESTQAFVYHRRRDTPNPSSLALPPSPPQ

SEQ ID NO: 111982 - protein, 94 aa, Oryza sativa
  Clone ID: PAT_MRT4530_15910C.1.pep
MTMMTSAVTSSPATARTVHARRRTTVRQHFGLTMTAVLRRPTATTEGWTRSATAWRSRRRPSRATTTTGATAAHGWTNNGDGGAPLNAEAMLAV

SEQ ID NO: 111983 - protein, 295 aa, Oryza sativa
  unsure (1)..(295): unsure at all Xaa locations
  Clone ID: PAT_MRT4530_15911C.1.pep
LFLKRKRGLLRQRLGFTVDRVHGGGLRERTAEITLTKSDGRDRXVHGGSRHDDDDVSGDVITGDGSXVHARRRTTVRQHXRRAPTGCGRRGELITGDQRRSGGDLRLDDDGGAPATYGNDGGVDEVGDGLAITTAXSRATTTTGATAAHGWTNNGDGGAPLNAEAMLQAAASXGEGGDGGLAAAVEAHDDRQRXEGRFRVRXRKTNPIRDRIHRFPNGISQXFQKGKDRMDRGDHFPSINFTGDGKTRWAPTCQRARARARAVARLRADLGRERERXLGRLSAQSQKRILKTFFN

SEQ ID NO: 111984 - protein, 54 aa, Oryza sativa
  Clone ID: PAT_MRT4530_15912C.1.pep
EEPAAPPRARPPSGGATWVWGRPNPKLGGGSRRNTLGSTPLGESHVSLRAASSL

SEQ ID NO: 111985 - protein, 70 aa, Oryza sativa
  Clone ID: PAT_MRT4530_15913C.1.pep
MDTHRMDAWSPNPDRVRSFGVPSHTTWLRRPLLRAPARRCVSRVERGRGRCDVRHGRLFLRNGWAWTGLG

SEQ ID NO: 111986 - protein, 540 aa, Oryza sativa
  Clone ID: PAT_MRT4530_15914C.1.pep
MGPLLRKLDSLPVAPEIRLPEPLKDGIELLKEDLEEIGAALVEQSMVDSPSHRARYWMDEVRDLSYHIEDCIDTMFSMRCGGDDGKPRSVRRHKVGRVKVDGFSKTQKPCTRLARIAELRALVREASERHERYQLGDGRASSSSSSSHRVFTAHGQVPAPCRNLVGMDEPKTKLTNMLTDEAELHMKVVCILGSAGIGKTTLAEQVYRKLRWQFDCHAFVRASRKPDMRRLLGAILSQVQLRIRISDTSTVQSLIDNLWEYLQKKRYFIVIDELYETATWDIITSAFPEDNNCSRIMTTAGIEGVALECCSYHSVNIFKMIPLGLDDSAKLFFNRVFGSEQQCPYELNEVSYRITAKCGGLPLAVIIIAGLLASLPCKTELWYNIDGCLCSSVTTDIDLDEILKEIISLGYDNLPHYLKTCLLYLSLYSEGFIIWTADLLKQWISEGFIAVIDGEDIEEVAESYFYNLVNRGMIQSVKTKYNNQVLCTVHHTVFDLIIHKSKEEKFISAIDYSQTMPGNSLEARRLSFHFSNTRYATEVA

SEQ ID NO: 111987 - protein, 80 aa, Oryza sativa
  Clone ID: PAT_MRT4530_15915C.1.pep
MAPSRRMVASAFLLLAILVATEMGTTKVAEARHCLSQSHRFKGMCVSSNNCANVCRTESFPDGECKSHGLERKCFCKKVC

SEQ ID NO: 111988 - protein, 638 aa, Oryza sativa
  Clone ID: PAT_MRT4530_15916C.1.pep
MDAMIGDPMSATSVEAVFEKQPSPEFRELVTPRAMAVAVVLSVVICFVGMRIQMTAGIVPALNMPASILSFFLLKWLIRLLQSCGFPMLPFTRQENMFLLTCIITCLNLALTSGFATNIIGMTSTVARSLADDPDPRDIMDHVPIGKWIVYLFLVGMTGVLINVPFNQVMIIDYKLLFPTGTVIAQLINSFHTPEGAYVAKFYFDFSATYIGLGMICPHIVNFGLFFGAIISWGFLYPFLETKRGQWYQTDSPTSLNGQNGYKVFISVTLIITDGMINFLTLITTASINFYQLRKEHDLGLANYFKKHPSLNYDDRKRIEVFLANRIPIPVPVAAYITCAAISTIAIPAMFNQIKFYHLAVLYMVIPVVTFCNTYATGLTDWSVAPTYAKFTTFVFAAWIAKPGAVVASLLASGVIVAALHISSQAMQDLKSGHMTLTSPRAMVTGQIFGVAVGSILCPCVFLAFQSTTKPNAPVGSKQSDYPCPFAGLYRAIGVIGTGGVKELPKHCMTFCVVAFCVTVIIDAVVLVSQKRGWSIHRYIPSMTVIALPFFAGSYFTIDMCVGSLLLLAWTRMNAKSAEMLSSAVAAGLICGEGLFTLPSALLNMFKVQPPMCMKFLSGGEEVEAADSFLNNLGTSRT

SEQ ID NO: 111989 - protein, 55 aa, Oryza sativa
  Clone ID: PAT_MRT4530_15917C.1.pep
VLNQHGLANSKFLTVKQGNSRPTRLRGRKYIALGFDMHKQREDTNYKATQIQFQT

SEQ ID NO: 111990 - protein, 69 aa, Oryza sativa
  Clone ID: PAT_MRT4530_15918C.1.pep
LARNSLAGLSVISLVLVSMSVFSLVCFGIRHDAILSRLYKTPYLFYAKCLYSSASVPWCLHIMPWNATL

SEQ ID NO: 111991 - protein, 662 aa, Oryza sativa
  Clone ID: PAT_MRT4530_15919C.1.pep
MFHLDCHSRISTSCTANWRMGLVETWARETRGQDSGREKRGAGHSVGKEGTGRAVKWAIELSEFDLHFEPRHAIKSQALADFVAEWTPAPEPVSVPEASSGPSQLPDTAHWVMQFDGSLSLQGAGAGVMLTSPNGDVLRYLVRLDFRATNNMAEYEGLVAGLRVAAGLGIRRLLVLGDSQLVVNQVCKEYRCSDPQMDAYVRQVRRMERHFDGIELRHVPRRDNTVADELSRLASSRAQTPPGAFEERLAQPSARPDPLGETDAPDRPPMPVGVQASGPEGSAPSSLRLIAWIAEIQAYLTDKTLPEDREGSERVQHISKRYVLVEGTLYRRAANGILLKCIPREQGVELLADIHEGECGSHSASRTLVGKAFRQGFYWPIALNDAVDLVRRAPGGFEYLYVAIDKFTKWPEAYPVVKIDKHSALKFIKGITARFGVPNRIITDNGTQFTSELFGDYCEDMGIKLCFASPAHPRSNGQVERANAEILRGLKTKTFNILKKHGDSWIEELPAVLWANRTTPSRATGETPFFLVYGAEAVLPSELTLRSPRATMYCEADQDQLRRDDLDYLEERRRRAALRAARYQQSLRRYHQRHVRARSLCVDDLVLRRVQTCAGLSKLSPMWEGPYRVIGVPQPGSVRLATGDGTELPNPWNIEHLRRFYP

SEQ ID NO: 111992 - protein, 137 aa, Oryza sativa
  Clone ID: PAT_MRT4530_1591C.1.pep
MEDHRGEGNDGGIHMISDDRLKHPIDKLRTTQILPPIQLRIQDGGRAHQDGVDHDEAEEEEEGPKLEHDKHERHCMAGSAATSNLGSEGRGGKRPKILVVCSPQAPSPPHPVGGGGSAGGGWQRICRRREETRRWTR

SEQ ID NO: 111993 - protein, 1872 aa, Oryza sativa
  Clone ID: PAT_MRT4530_15920C.1.pep
MAERAKAHNLSPSASGDDSEQNPRRRARTPPPPSRRSLRREEALEGVERSATSPPTSDGEGRRDGERRLLVYGDGSTPQGVLQAAGALLRHPPVVPDPETPTRRWLDDVANLVMTAQQRLGAGGRSSATKATGAATAGSVSSRRRARRAAAVARRSSAIPSSMPPTQEDVREGPDARLNIERRRNDRRAAHASEGASSSGAPLRSGHGGQPPVSPVGGAGCRAFVASLRNVRWPPRFRPTITEKYDGSVNPAEFLQIYTTGIKAAGGDDRVMANFFPMALRGQARGWLMNLPPASVHSWEDLCQQFTMNFQGTYPRPGEEADLHAVQRRDDESLRSYIQRFCQVRNTIPCIPAHAVIYAFRGDVRHNRMLEKIASKEPQTTAELFQLADRVARKEEAWTWNSTGSGVAASAAPGSAARSGRRDRRRKKRSAHSDDEGHVLAVEGASRATRKGRPASDKEKEAGAPSRERPTGKWCTVHNTSLHDLADCRAVKSLAERTRKWEEERRQERREGKSPAAPSGNRRSEAKQKAPAEDIDDGDDDLGFQEPGATIATVDGGACAHVSRRSLKAMKRELLAAAPTHEAMRRARWSEVALTFDQTDHPPCVARGGQIAMVVSPTVCNVKLGRVLIDGGAALNILSPTAFDAIKAPGMVLRPSQPIIGVTPGHTWPLGHIDLPVTFGGSANFRTERVNFDVADLSLPYNAVLGRPALVKFMAAVHYAYLQMKMPGPGGPISVHGDLKVALACMEQRADHLAAASKPEGGDERLGTSVPAAPRQRMITCDEVPEDALVSFLRANADVFAWRPADMPGVPREVIEHRLAVRPGARPVRQKVRRQAPERQAFIREEVARLLEAGFIREVIHPEWLANPVVVPKANGKLRMCIDYTDLNKACPKDPYPLPRIDQIVDSTAGCDLLCFLDAYSGYHQIRMAREDEEKTAFITPIGTYCYMTMPFGLKNAGPTFQRTTRISLGSQIGRNVEAYVDDLVVKTRNQETLLSDLAETFESLRTARIKLNPDKCVFGVPAGKLLGFLVSARGIEANPEKVVSAALVVERDEDDPRSAHPHPVSTRPGREQGGEAPEPNGGPRPPTTGAGPPPACPTVPGAPDPQDGHGATAGRPRLSPSDPEVVGTEAECAPRGLSDEERPGDVAPSEEDRPRRKVQRPVYFVSEALRDAKTRYPQAQKMLYAILMASRKLRHYFQAHRVTVVTSYPLGQILHNREGTGRVVKWAIELSEFDLRFEPRHAVKSQALADFVAEWTPAPEPISVPEASSGPSQLPHTAYWVMQFDGSLSLQGAGAGVTLTSPSGDVLKYLVRLDFRATNNMAEYEGLLAGLRVAAGLGIRRLLVLGDSQLVVNQVSKEYQCFDPQMDAYVRHVRRMERHFDGIELRHVPRRDNTVADELSRLASSRAQTPPGAFEERLAQPSARPDPLGETDAPERPPRPVGVQASGPEGSAPSSLRLIAWIAEIQAYLADKTLPEDREGSERVQRISKRYVLVGGTLYRRAANGVLLKCIPREQGVELLADIHEGECGAHSASRTLVGKAFRQGFYWSTALNDAVDLVRRCRACQFHAKQTHQPAQALQTIPLSWPFAVWGLDILGPFRRAPGRFEYLYVAIDKFTKWPEAYPVIKIDKHSTLKFIKGITARFGVPNRIITDNGTQFTSELFGDYCEDMGIKLCFASPAHPRSNGQVERANTEILKGLKTKTFNILKKHGDSWIEELPAVLWANRTTPSRATRETPFFLVYGAEAVLPSELTLRSPRATMYCEADQDQLRRDDLDYLEERRRRAALRAARYQQSLRRYHQRHVRARSLCVDDLVLRRVQTRAGLSKLSPMWEGPYRVIGVPRPGSVRLATGDGTELPNPWNIKHLRRFYP

SEQ ID NO: 111994 - protein, 107 aa, Oryza sativa
  Clone ID: PAT_MRT4530_15921C.1.pep
SIYEFIFPHYLCSYSNPVLSSVFQKKKKRDRIRDELSIHGSMPCDPPSATPGVHHHKFAEANQTPELVWQKSNIKQTFALASWIIRATVDASDCMHMEPWRLRFSRI

SEQ ID NO: 111995 - protein, 672 aa, Oryza sativa
  Clone ID: PAT_MRT4530_15922C.1.pep
VVSAALVVERDEDNPHPAHPHPVSTRPGREQAGEAPESNGGPRPPTAGVGPPPACPTVPGTPDPQDGPGATAGRPRLSPSDPEVVGTEAECAPRGLSDEERPRDAAPSEEDRPRRKAHRVTVVTSYPLGQILHNREGTGRVVKWAIEFSEFDLHFEPRHAIKSQALADFVAEWTPAPEPISVPEASSGPSQLPHTAYWVMQFDGSLSLQGAGAGVMLTSPNGDVLRYLVRLDFRATNNMAEYEGLLAGLRVAAGLGIRRLLVLGDSQLVVNQVSKEYQCSDPQMDAYVRQVRRMERHFDGIELRHVPRRDNAVADELSRLASSRAQTPPGAFEERLAQPSARPDPLGETDTPERPPRPVGVQASGPEGSVPGSPRLIAWIAEVQAYLTDKTLPEDREGSERVQRISKRYVLVEGTLYRRAANGVLLKCIPREQGVELLADIHEGECGAHSASRTLVGKAFRQGFYWPTALNDAVDLVRRCRACQFHAKQTHQPAQALQTIPLSWPFAVWGLDILGPFRRAPGGFEYLYVAVDKFTKWPEAYPVIKIDKHSALKFIRGITARFGVPNRIITDNGTQFTSELFGDYCEDMGIKLCFASPAHPRSNGQVERANAEILKGLKTKTFNILNMEELPAVLWANRTTPSRATGETPFFLVYGAEAVLPSELTLKSPRAT

SEQ ID NO: 111996 - protein, 130 aa, Oryza sativa
  unsure (1)..(130): unsure at all Xaa locations
  Clone ID: PAT_MRT4530_15923C.1.pep
GCEKLRTNQQGIPSILGYTLYADTVYLCVYGYFLYILRKSIXEIETESTDGGSSTRTRLGRYHIVRGPISPSPTWRSTDPRYKRDPXGQDLRHRISLPTHTPQPTKPEPTGAKSPGDLVEPTXLRSRRYH

SEQ ID NO: 111997 - protein, 768 aa, Oryza sativa
  unsure (1)..(768): unsure at all Xaa locations
  Clone ID: PAT_MRT4530_15924C.1.pep
PVTDREQNPRRRARTPPPPXRRSLRREEALEGVERSATSPSTSDGEGRRDGERRLLIYGDGTTPQGALQAAGALLRHPPVVPDPETPTRRWLDDVANLVMTAQQRLGAGGRSSATKATGAATAGSVSSRRRARRAAAVARRSSAIPSSMPPTQEDVREGPDARLNIERRRNDRRAAHASEGASSSGAPLRSGHGGQPPVSPVGGAGCRAFVASLRNVRWPPRFRPTITEIYDGSVNPAEFLQIYMTGIEAARGDDRVMANFFPMALRGQARGWLMNLPPASVHSWEDLCQQFTMNFQGTYPRPVRNTIPCIPAHAVIYAFRGGVRHNRMLEKIASKEPQTTAELFQLADRVARKEEAWTWNSTGSGVAASAAPGSAARSGRRDGRRKKRSAHSDDEGHVLAIEGASRATRKGRPASDKKKEAGAPSRERPTGKWCTVHNTSLHDLVDCRAVKSLAERTRKWEEERRQERREGKAPAAPSGNRRSEAKQKAPAEDIDDGDDDLGFQEPGATIATVDGGACAHVSRRSLKAMKRELLAAAPTHEAMRRARWSEVALTFDQTDHPPCVARGGQIAMVVSPTVCNVKLGRVLIDGGAALNILSPTAFDAIKAPGMVLRPSQPIIGVTPGHTWPLGHIDLPVTFGGSANFRTERVNFDVADLSLPYNAVLGRPALVKFMAAVHYAYLQMKMPGPVGPISVHGDLKVALACMEQRADHLAAASKPEGGDERLGTSVPAAPRQRMATCDEVPVKEVALGDGPSKTTRIGGLLDGK

SEQ ID NO: 111998 - protein, 158 aa, Oryza sativa
  unsure (1)..(158): unsure at all Xaa locations
  Clone ID: PAT_MRT4530_15925C.1.pep
MTSATFAXTDSSTASSSTSTVAPVFINPYATVAVKSHXPISLELRXPNYNKXKGFFRSMCGXFGLLDHLDAAPPANXDAAWEQPDCCLRSWLFGSVADDVLDLAMKPDQSAWDLWISIDTLFQATKELRAIYLHHEFHSMTQGDLSVADYCQCMKTAV

SEQ ID NO: 111999 - protein, 1897 aa, Oryza sativa
  Clone ID: PAT_MRT4530_15926C.1.pep
MAERAGAHSLSPNASGDDGEQNPRRRARTPPSPSRRNLGRGEALGEAGGSATSPPAGDGGGRRDGARRRLVYGNGGTPQGALQAAGALLRHPPVVPDPETPARRWLDDVADLVMTAQQRLGAGGRSSATETSGAPAAGSTSSRRRARRAAAVTRRSSAIPSSTPPTQGDMRGGPDARLDIERRRDARHAAHAMEGASSSGAPLRSGHGGRPPVSPVGGAGCRAFVASLRNVRWPPRFRPTVTEKYDGSVNPAEFLQIYTTGIEAAGGDDRVMANFFPMALKGQARGWLMNLPPASVHSWEDLCQQFTTNFQGIYPRPGEEADLHAVQRRDDESLRSYIQRFCQVRNTIPCIPAHAVIYAFRGGVRHNRMLEKIASKEPQTTAQLFELADRVARKEEAWTWNSSGSGVTAPAAPGSATRSERRNRRRKKGPARSDDEGHVLAVEGASWAPRKGRPASDKKKEAGAPSRERPTGKWCTVHNTSLHDLADCRAVKSLAERTRKWEEEKRQERREGKTPAAPAGNRRGEAKQKATAEDINDGDDDLGFQEPEATVATVDGGACAHASRRSLKAMKRELLAAAPTHEATRRARWSEVALTFDQTDHPPCVARGGQIAMVVSPTVCNVKLGRVLIDGGAALNILSPAAFDAIKAPGMVLRPSQPIIGVTPGHTWPLGHIDLPVTFGGSANFRTERVDFDVADLSLPYNAVLGRPALVKFMAAVHYAYLQMKMPGPGGPITVHGDLKVALACMEQRADHLAAASKPAGGDERLTTSVPAAPRQRMVTCDEVPEDALVSFLRANADVFAWRPADMPGVPREVIEHRLAVRPGARPVRQKVRRQAPERQAFIREEVARLLEAGFIREVIHPEWLANPVVVPKANGKLRMCIDYTDLNKARPKDPYPLPRIDQIVDSTAGCDLLCFLDAYSGYHQIRMAREDEEKTAFITPIETYCYTTMPFGLKNAGPTFQRTTRISLGSQIGRNVEAYVDDLVVKTRNQETLLSDLAETFESLRSARIKLNPNKCVFGVPAGKLLGKLRDVQCVTGCMAALSRFISRLGEKALPLFKLLKCSGPFTWTEEAERALTQLKAYLSSPPVLVAPEPDEPLLLYLAATPQVVSAALVVERDEDNPHSAHPHPASTRPGREQAGEAPEPNGGPRPPTAGAGPPPACPTVPGAPDPQDGPGATAGRPRLSPSDPEVVGTEAECAPRGLSDEERPGDAAPGEEDRPRRKAHRVTVVTSYPLGQILHNREGTGRVVKWAIELSEFDLRFEPRHAIKSQALADFVAEWTPAPEPVSAPEASSGPSQLPHTAYLVMQFDGSLSLQGAGAGVMLTSPSGDVLRYLVRLDFRATNNMAEYEGLLAGLRVAAGLGIRRLLVLGDSQLVVNQVCKEYRCSDPQMDAYVRQVRRMERHFDGIELRHVPRRDNAVADELSRLASSRAQTPPGAFEERLAQPSARPDPLGETDAPERPPRPVGVQASGSEGSAPSSPRLIAWITEIQAYLADKTLPEDREGSERVRRISKRYVLVEGTLYRRAANGVLLKCIPREQGVEFLADVHEGECGAHSASRTSDGKAFRQGFYWPTALNDAVDLVRRCRACQFHARQTHQPAQALQTIPLSWPFAVWGLDILGPFRRAPGGFEYLYVAVDKFTKWPEAYPVIKIDKHSALKFIRGITARFGVPNRIITDNGTQFTSELFGDYCEDMGIKLCFASPAHPRSNGQVERANAEILKGLKTKTFNIPKKHGDSWIEELPAVLWANRTTPSRATGETPFFLVYGAEAVLPSELTLRSPRVTMYCEADQDQLRRDDLDYLEERRRRAALRAARYQQILRRYHQRHVRARSLCVDDLVLRRVQTRAGLSKLSPMWEGPYRVIGVPRPGSVRLATGDGTELPNPWNIEHLRRFYP

SEQ ID NO: 112000 - protein, 652 aa, Oryza sativa
  Clone ID: PAT_MRT4530_15927C.1.pep
MAALSRFISRLGEKALPLFKLVKRSGPFIWTEEAERALTQLKAYLSSPPVLVAPEPDEPLLLYLAGTPQVVSAALVMERDEDDPRFAHPHPVSTRPGREQGGEAPEPNGGPRPPTAGAGPPPACPKVPGAPDPQDGHGATAGRPRLSPSDPEVIGTEAECAPRGLSERDEDDPRSARPHPVSIRPGREQGGEAPEPNGGLRPPTAGAGPPPACPTVLGAPDPQDGPGATAGRPRLSPSDPEVVGTEAECAPRGLSDEERPGNAAPSEEDRPRRKAHQVTVVTSYPLGQILHNREGTGRVVKWAIELSEFDLHFEPRHAVKSQALADFVAEWTPAPEPVSIPEASSGPSQLPHTAYWVMQFDGSLSLQGAGAGVTLTSPSGDVLRYLVRLDFRATNNMAEYEGLLAGLRVAAGLGIRRLLVLGDSQLVVNQVCKEYQCSDPQMDAYVRQVRRMERHFDEIELRHVPRRDNAVADELSRLASSRAQTPPGAFEERLAQPSARPDPLGGTDAPERPPRPVGVQASGPEGSAPSSPRLIAWITEIQAYLADKTLPEDREGSERVRRISKRYVLVEGTLYRRAANGVLLKCIPREQGVELLADVHEGECGAHSASRTLVGKAFRQGFYWPTALNDAVDLVRRCRACQFHARQTHQPA

SEQ ID NO: 112001 - protein, 106 aa, Oryza sativa
  Clone ID: PAT_MRT4530_15928C.1.pep
QSENSTCSVQADPIFCSLTSSMFIHQNPVLSKDPKWRHCSLLTLHYVNQLSDVPRRSHPCRCCTVTCTCFLANICDHSLQCPIVHHLPDSIHLSFTALHCIGLYIL

SEQ ID NO: 112002 - protein, 81 aa, Oryza sativa
  Clone ID: PAT_MRT4530_15929C.1.pep
RWPDAKPSVYPSLVSPNKPQPSKRYAGLCNSALSSKGLNRFMGTFYHFSGNVALRALLPSPPFYEFLGTRVDLGDPPQGAW

SEQ ID NO: 112003 - protein, 102 aa, Oryza sativa
  unsure (1)..(102): unsure at all Xaa locations
  Clone ID: PAT_MRT4530_1592C.1.pep
FIILEVIARLQLMKQTVQSSIYYACYYWRLPPPRRLVEELPGDLSEKIVEEARRRFVSGLEFTTFGVKEELPXVIEAWVVLSVGRLPPYPPLDEGGVRWLRG

SEQ ID NO: 112004 - protein, 1726 aa, Oryza sativa
  unsure (1)..(1726): unsure at all Xaa locations
  Clone ID: PAT_MRT4530_15930C.1.pep
MAERAKAHNLSPSASGDDSEQNPRRRACTPPPPSRRSLRREEALEGVERSATSPPMSDGEGRRDGERRLLVYGDGSTPQGALQAAGALLRHPPVVPDQETPTRRWLDDVANLVMTAQQRLGAGGRSSATKATGAATAGSVSSRRRARRAAAVARRSSAIPSSMPPTQEDVREGPDARLNIERRRNDRRAAHASEGASSSGAPLRSGHGGQPPVSPVGGAGCRDFVASLQNVRWPPRFRPTITEKYDGSVNPAEFLQIYTTGIEAAGGDDRVMANFFPMALRGQARGWLMNLPPASVHSWEDLCQQFTMNFQGTYPRPGEEADLHAVQRGDDESLRSYIQRFCQVRNTIPCIPAHAVIYAFRGGVRHNRMLEKIASKEPQTTAELFQLADRVARKEEAWTWNSTGSGVAASAAPGSAARSGRRDRRRKKRSAHSDDEGHVLAVEGASRATRKGRPASDKKKEAGAPSRERPTGKWCTVHNTSLHDLADCRAVKSLAERTRKWEEERRQERREGKAPAAPSGNRRXPGATIATVDGXACAHVSRRSLKAMKRELLAAAPTHEAMRRAWWSEVALTFDQTDHPPCVARGGQIAMVVSPTVCNVKLGRVLIDGRAALNILSPTAFDAIKAPGMVLRPSQPIIGVTPGHTWPLGHIDLPVTFGGSANFRTERVNFDVADLSLPYNAVLGRPALVKFMAAVHYAYLQMKMPGPGGPISVHGDLKVALACMEQRADHLAAASKPEGGDERLGTSVPAAPRQRMITCDEVPVKEVALGDGPSKTTRIGGPTFQRTTRISLGSQIGRNVEAYVDDLVVKTRNQETLLSDLAETFESLRTARIKLNPDKCVFGVPAGKLLGFLVSARGIEANPEKVRAIERMRPPSKLRDVQCVTGCMAALSRFISRLGEKALPLFKLLKRSGPFIWTEEAERALTQLKAYLSSPPVLVAPEPDEPLLLYLAATPQVVSAALVVERDEDDPRSAHPHPVSTRPGREQGGEAPEPNGGPRPPTAGAGPPPACPKVPGAPDPRDGHGATAGRPRLSPSDPEVVSTEAECAPRGLSERDEDDPRSAHPHPVSTRPGREQGGEAPEPNGGPRPPTTGAGPPPACPTVPGAPDPQDGPGATAGRPRLSPSDPEVVGTEAECAPRGLSDEERPGDAAPSEEDRPRRKVQRPVYFVSEALRDAKTRYPQAQKMLYAILMASRKLRHYFQAHRVTVVTSYPLGQILYNREGTGRVVKWAIELSEFDLRFEPRHAVKSQALADFVAEWTPAAEPISVPEASSGPSQLPHTAYWVMQFDGSLSLQGAGAGVTLTSPSGDVLKYLVRLDFRATNNMAEYEGLLAGLRVAAGLGIRRLLVLGDSQLVVNQVSKEYQCSDPQMDAYVRRVRRMERHFDGIELRHVPRRDNTVADELSRLASSRAQTPPGAFEERLAQPSARPDLLGETDAPERPPRPVGVQASGPEGSDPSSLRLIAWIAEIQAYLADKTLPEDREGSERVQRISKRYVLVEGTLYRRAANGVLLKCIPREQGVELLADIHEGECGAHSASRTLVGKAFRQGFYWPTALNDAVDLVRRCRACQFHAKQTHQPAQALQTIPLSWPFAVRGLDILGPFRWAPGGFEYLYVAIDKFTKWPEAYPVIKIDKHSALKFIKGITARFGVPNRIITDNGTQFTSELFGDYCEDMGIKLCFASPAHPRSNGQVERANAEILKGLKTKTFNILKKHGDSWIEELPAVL

SEQ ID NO: 112005 - protein, 326 aa, Oryza sativa
  Clone ID: PAT_MRT4530_15931C.1.pep
MDWMPPPKPTSPRSPPLLWDWADAAVPGSSSGEVSAAAAAAAAHPGRRRKEKRGRAEEGGGGGGEVRCQVEGCGVELVGVKDYHRKHRVCEAHSKFPRVVVAGQERRFCQQCSRFHALSEFDQKKRSCRRRLYDHNARRRKPQTDVFSYASARPPSSLLFDDNRQISFVWNKAPLSHVRPFAISPWESSSEVGTTDGHIYLDKSHISKSLPAFNTDIDELLPMKGPDASLTASKFDGAPDLQRALSLLSSSSCGLPDPVQQASRVIQFTGASQNNRELPPLNGGNSASASCANVQTIAQPAQLVRFTMNASSNACQSNFFGLNQIN

SEQ ID NO: 112006 - protein, 72 aa, Oryza sativa
  Clone ID: PAT_MRT4530_15932C.1.pep
PLGGLLGSRSPLCRAPAPLRFTHGYFWLGEQFPFCAQELETGNHILLGYVFAQQVWLRVLSLSEHLHAGFDS

SEQ ID NO: 112007 - protein, 102 aa, Oryza sativa
  Clone ID: PAT_MRT4530_15933C.1.pep
IEEGDVSGSEEAMGEEQLTNHRRLAGRCSTGGEPGDSQNHRRRQKSSQPAPDRDYSPLERRRPGNPWTNTYEEEQPWNRAGQSTIESRRWLGCLGSGSRKAA

SEQ ID NO: 112008 - protein, 66 aa, Oryza sativa
  Clone ID: PAT_MRT4530_15934C.1.pep
MGWFRYKSNLFISQKKNIVLKKNKNFKKKNKIKKKKKKKKKKKKKKKKKKKKKKKKKKKKKKKKKK

SEQ ID NO: 112009 - protein, 52 aa, Oryza sativa
  Clone ID: PAT_MRT4530_15935C.1.pep
TLGFYGLHNANYADDYRYICYWQVSATPPIMKATLSCFCASAFEYLCQYLKD

SEQ ID NO: 112010 - protein, 75 aa, Oryza sativa
  Clone ID: PAT_MRT4530_15936C.1.pep
MAGSVATGSGTAGDGVEEVSGGHRPAWGQHGGGQWRTAADGVEVCPDLYHTSDFICHHGNHSTFSSLKYQVVIGA

SEQ ID NO: 112011 - protein, 74 aa, Oryza sativa
  unsure (1)..(74): unsure at all Xaa locations
  Clone ID: PAT_MRT4530_15937C.1.pep
KPPSHIFHLHXTSPNIIYPYQHPLLHQVTYTSFQTKTKSNLGLQNKNTINKLITHQTTIKTSFHHKSTLKQPYI

SEQ ID NO: 112012 - protein, 117 aa, Oryza sativa
  Clone ID: PAT_MRT4530_15938C.1.pep
FRKRWAAWGFWSDISGSPPASKSFAFLLRPPQVWPPPGLVAPPSPSRGFSFFRPKGGQLPPPRFGGLSFFWSLVPAPAFLAFSVPSRFGAPPWCFGAPRPFSPLGGFFFSVFPVLGS

SEQ ID NO: 112013 - protein, 125 aa, Oryza sativa
  unsure (1)..(125): unsure at all Xaa locations
  Clone ID: PAT_MRT4530_15939C.1.pep
MGNLLDMKVVAMVAALVVMSLAGVSMAARRVPALLKSHVGDGISYHGGAVRXGDIPVTLVWYGKFKPAQKAIVVDFLLSLTATPPNATTPSAAQWWGAIAAGYLSSNATNVTTAARVVLANQTFD

SEQ ID NO: 112014 - protein, 59 aa, Oryza sativa
  Clone ID: PAT_MRT4530_1593C.1.pep
DTELIFNMNVHILFHSTTYMFRSFIGWMFFLLKFHRSLPVCLLIFCMNRYIMLTFSYIC

SEQ ID NO: 112015 - protein, 435 aa, Oryza sativa
  Clone ID: PAT_MRT4530_15940C.1.pep
MVFKKNAMSSSVLFLAALLLLSSSSMSSAARWLEEEYPPHPTVPELPKPEVPPHPAVPELPKHEEPPHPVVPELPKHEEPPHPVVPELPKPELPPHPVVPELPKHEEPPHPAVVPELPKHEEPPHPAVVPEFPKHEEPPHPAVPELPHPAVPEIPHPAVPELPKHEEPPHPVVPELPKPEVPHAAVPELPKPELPPHPAVPELPKHEEPPHPVVPELPKHEEPPHPVVPELPKPEEPPHPAVPELPKPELPPHPVVPELPKHEEPPPHPHPAVPELPKPELPPPHPAVPELPKHEEPPHPVVPELPKPEVPHPAVPELPKHEEPPHPVVPELPKHEEPPHPVVPELPKPEVPHPAVPELPKHEEPPHPVVPELPKPEVPHPVVPELPKPEVPHPTVPEHEQPPKLAIAAWLAGEPFPTNVFSPFNASPWLWSFLP

SEQ ID NO: 112016 - protein, 43 aa, Oryza sativa
  Clone ID: PAT_MRT4530_15941C.1.pep
MKSKITQIGVGMKALGVILGDFFSHSSLARSSFKAAAVRVTDK

SEQ ID NO: 112017 - protein, 76 aa, Oryza sativa
  Clone ID: PAT_MRT4530_15942C.1.pep
MGANENGFNGMVKCWKTSGFGADMDRQQGTSIRMKTYDLGISSTQIDTCHDTITRFPIRTVVACYIEQENDLQKNY

SEQ ID NO: 112018 - protein, 202 aa, Oryza sativa
  Clone ID: PAT_MRT4530_15943C.1.pep
MAFAASPPLSSLAAAAAVISSSSPSKPLSRAKTPPPALLQAILPTAPPKHHSLSCSGSQAPRATTGEGSAVGDRGSGSGGNNGKGGGGDGDGGDNDYEEAEFGPLLGFDEVLRLTAACGVSLPADMMGAAKDASIREVMLLHHFDLQVVIDSCCATFAEVFELYDPWTDMHATGFMDTAITPSFHSLILHSSLDDIFVIPKE

SEQ ID NO: 112019 - protein, 114 aa, Oryza sativa
  Clone ID: PAT_MRT4530_15944C.1.pep
MELAEAKKKLVARTYAISALKRPEHRLRRNDLQQGKQAFSARLATAGALTRRNKKSNGGAAYLVAKSGGGGGVRVFARRGWSEPRGRRCSYISRSLSGPDGPRSSPIGPHNVQS

SEQ ID NO: 112020 - protein, 49 aa, Oryza sativa
  Clone ID: PAT_MRT4530_15945C.1.pep
LLNVAGERLNAIPVRGALALASIMVGSALANWVGQFDWVTNLLAIITTM

SEQ ID NO: 112021 - protein, 114 aa, Oryza sativa
  Clone ID: PAT_MRT4530_15946C.1.pep
GPRMCGGPAPESGRDGVLVGVLGFTNFFNPGPQRVFPAPSLISGGLVRPVCPVGGSLGGPRGSRELAPAPGWVFFVLPELGGFLSPWAWNLRGNWGFPGGRGFFGRPRLVLWGG

SEQ ID NO: 112022 - protein, 101 aa, Oryza sativa
  Clone ID: PAT_MRT4530_15947C.1.pep
LLPSQGGPATTSVTVGNRIWDDVRGHLLAVGTRRRSLAGSNDGAGLLHPHADGYQCWLLNPWEVPYSVCIGPATPVGAPPHQKAEMGVADVAASPFFEVLQ

SEQ ID NO: 112023 - protein, 218 aa, Oryza sativa
  unsure (1)..(218): unsure at all Xaa locations
  Clone ID: PAT_MRT4530_15948C.1.pep
QLRSAHPKLGMASTVAINLIGAQAGIISKLRNCDITSYSGLKARSSISFESRSSFLGQNASLRSSISPRIVPKANSGSHISPEASYKVAVLGAAGGIGQPLGLLIKMSPLVSALHLYDIANVKGVAADLSHCNTPSQVLDFTGPSELANCLKGVDVVVIPAGVPRKPGMTRDDLFXINASIVKTLVEAVADNCPEAFIHIISNPVNSTVXPIAAXVLK

SEQ ID NO: 112024 - protein, 386 aa, Oryza sativa
  Clone ID: PAT_MRT4530_15949C.1.pep
MDGDAWWYPGGGGGGGSNNWDLGAVVRFGCGGGRVSPAAALLGEAWEYDDDPFSSFLAPPMTAQQAALPAVWEEGDDGDAAWMAPLPGLQTGGGWGDQAPMVVDELCGALVVAPPPPPKQQEVLQVQQQPPPADNTQPTTYQQGSGGDGESTRAGGSRSARRKYAASAIYIVSVCFSDSCIMWIRSLADDRGVRHACRKKQTRKEVVRVAASGPAPDLWAWRKYGQKPIKGSPYPRGYYRCSSNKNCAARKQVERCRFDPSFLLLTYTGAHSGHDVPLHRNSLAGTTRHKPPPPPPLPSAADKSPATAAEAATASQSPGLSPTTPLRASSMELHGEDDAEAELQVEEDDMAIDDEDDDDVADETISTVPWGTPISDAIIAASYEWR

SEQ ID NO: 112025 - protein, 692 aa, Oryza sativa
  Clone ID: PAT_MRT4530_1594C.1.pep
MSNEVNHVGKAHMLNGTTTPLGKLKCFAITGTPLTEIDHHNLQLNAQAMNALFNSLSQEEFDRVSNLETAYEIWNKLAKIHEGASEYKDAKLHFLKIQYETFSILPHESVNDMYGRLNVIVNDLKGLGATYTDLEDAQKMLRALPEKYETLVTMLINSDMLRMTPASLLVKINTNDIYKLKKKEMEEASPSKKCIALQAEVEDKGKTKVNVANEDLEEEIALLARRFNDLLGKRNERGRGSNSNRRRNRRPNKTLTNLRCFECGEKGHFASKCPSKDDDGDKSSKKKSGGYKLMKKLKKEGKKIEAVIREWDSNEESSASSGSEEEGGDDASSKKKKMAVVAIKEAPSLFAPLCLMAKGSSKVTSLSDSESDDVSYHELVSMFEELHAYSEKEIVKFKALKKDHASLEDHRCLLYPPPPSPSSLAVGSALAPCDLEPPSPPSLQPCAAVAPVVVVARGGRHRGRRRVAVLVRPFAAAVDRRSTAVVVKPKTAAASSSSPPPSVAFPPWSCVSICDASLVVENNELKEQVAKLNKSLERCFKGKNTLDKILSEQRCILNKKGLGFIPKKGKKPSHRAIHFVKSNGKYCSKCRDVGHLVNDCPGGYASNSKAYHVYNKNKGIVEETADVQFDETNGSQEGHENLDNVGDEGLMRAMKNMSIGDVKPIEVEDKPSTSTQDEPYRLPLRQVKLKLK

SEQ ID NO: 112026 - protein, 111 aa, Oryza sativa
  Clone ID: PAT_MRT4530_15950C.1.pep
MAAYRPLTLCLPTNEGIGTLLTAQKSGLKDYDAHPPLIEQELCAGMDIFDSNSLSKRSEEYGTMEGTRRHLENDLESWRIIEDIQVKVEAQTKSTSSAIRSLGPVCTKTGT

SEQ ID NO: 112027 - protein, 85 aa, Oryza sativa
  unsure (1)..(85): unsure at all Xaa locations
  Clone ID: PAT_MRT4530_15951C.1.pep
MAQSRDESAISDLAGHGFEEEGYPVVDYESDRQTAMSTTDFDEMGSKDGFSNNKLLDDFSXGRSNPTGTTMVQHADHPDDLWQRN

SEQ ID NO: 112028 - protein, 410 aa, Oryza sativa
  unsure (1)..(410): unsure at all Xaa locations
  Clone ID: PAT_MRT4530_15952C.1.pep
MGVWRVQFEEAVRDALSMSPDTQLFLKRYESAISDLAGHGFKEEGYPVVDYESDRQTAMSTTDFDEMGLRDGLSDNKLLGDFGCGEIQPNQIRTIIVIDNLVYRDHPSLKIRGVPKDVRSYDVQRVRNKEQLSTRVGRGRVHRIIENDLDKCRVVAPNLSKKTDDLSHSAGHRWTTREKDVNXDNSSRTSXLITRHDCERTSGYAISWVIKRLLLLVLEPWSSYDYXWSSTSDVAFLPLLPLXVVELRLXLVLDQRYSVSPTTSTLSGRATTTAWSSTNDVAFLPLFPLQVVELRLLPGPRPAWSGYGYYPVLDQGCSDSPITXASTKLILGAQDRQVFYPEIPYHKRHLALKPIVLSLYAVLTRPPRNLRELRLGTPRADKALSDPSETKDHVRSGRVRVLAVRINQAV

SEQ ID NO: 112029 - protein, 45 aa, Oryza sativa
  Clone ID: PAT_MRT4530_15953C.1.pep
KMHKNIHLVMRTVAREVYAKPLAASSVLKGSTQYQAAMGHMGFNS

SEQ ID NO: 112030 - protein, 142 aa, Oryza sativa
  Clone ID: PAT_MRT4530_15954C.1.pep
MACMSRGNLASGSTLAGDSQSLGQSYFKVRNEGTAAVAKCAAANGQDEERPVVGSFNSDATRERRRWPPPAPPRAWISYNFHTAASSPSPGVAARMEDEDDGEGHRQALLALEGGRRAKGISVHDGILANVLIENGILAKPI

SEQ ID NO: 112031 - protein, 151 aa, Oryza sativa
  unsure (1)..(151): unsure at all Xaa locations
  Clone ID: PAT_MRT4530_15955C.1.pep
SSRYFCSSIPRSPPESSPSPFSGHRPPPPPPXPAATTRRRRRPHHPHPPEPEXRPPRSRAAAARAPPATAPRGPGTAPPTPPPPPSTTAATAPRRPSPPPAAAAARRGSSLICSSDLDLFSRQKIFCSFPFYERLVRFAPKAGESDDSCLN

SEQ ID NO: 112032 - protein, 74 aa, Oryza sativa
  Clone ID: PAT_MRT4530_15956C.1.pep
SASPLPSPPPHSQSLILFLSLRARRNRHRLGESALAGRVNRRLLVSAGLSFHVVLGEIAGVDAIAPVRPSVHHH

SEQ ID NO: 112033 - protein, 773 aa, Oryza sativa
  Clone ID: PAT_MRT4530_15957C.1.pep
MESSSEEELEEDFPGHEWITPQSSIRAAYQSQTEKGIRKICSELLELKDAIENLCGNMQSKYHAFLRISEEVVEAEQELIELQKHVSAQGILVQDLMSGVCRELEMWQKHCKDEHVEEKDLQTELDEILSYDTQDSKVSFLDKLDTLLAEHKIEEALLALETEEKKCMATDDPGKELDAEISTYKTALSKRKSILEDQLVRYSEQPSLSITELRKSLSGLIKIGKGSLAHQVLLKAYGSRLQKNVEAFLPTCSIYTETYSATLSKIVFSAISKVSKESSSLFGDSPMNLNRIIQWAEYEIETFARLVKENSPLPESVSALCSACICIQTSLTHCSYLESYGLKFSNLLMVLLHPYVEEVLELNFRRLRRKIVDSAKNDDILLPSPQEGSRLSSSVAPNIMLTSSGKKFMSIVNDVLDQITPMTIVHFGGTILNKFVQLFDKYVEALIEVLPGASEDDHLVESKEPIEFKAESDAQQIQLIGTAYTVADELLPAAVSKFFDIQTEKKRIGGTGEGLGSGSIYSIEYKEWKRSLQHSLDKLRDHFCLQYVLSFIYLEGKSRLDARMYLELKTDDLLWECDPSPSLPFQALFVKLRQLASVAGDVLLGKEKIQKVLLSRLTETVVMWLSNEQEFWDVFEDQSIQLRPSGLQQLILDMHFVVEIAVCGRYPHRPVQQLVSVIITRAIAAFSVRNVDPQSSLPEDEWFLDMAKVAINKQLGTSGSESELEEPVVVHDEISDSEESSISSPSTIGSEDSFASANNDDLETPVYFTDPEA

SEQ ID NO: 112034 - protein, 452 aa, Oryza sativa
  Clone ID: PAT_MRT4530_15958C.1.pep
MGDGEVERAGMETDGGGEDRISALPDDLLCSILLRLGSTPAAGQTSLLSRRWRRLPSKLPRLLFPFPSTPPCVGPGIAANTAPVLRHVDVVCCDSPAGATATWLHLLAPRLAHDGVVYFRNTMSRRRLMAPHRGLGLASPSPTFELPCFATAAKLWLRLEFLNLELPRSGVFAHLTEMFLEHVDFNHRGRGDFGHTFSTPRCPLLRRLRIAMCTGIDTMGIYSDSLHHFELEFVPGLMELTLMAPGLRTLELLSCFYYIQEWNCSIHAPDLESLRWGDRFNIGSVRFVGFARLQQLAAFTIPVFGRPDNTIIQEFALLLGRFSAVYRLDLLLSYERANSPCHSNCECDEHPDWNEWEAIVHGLEEAEIRSFRGTEHDFNFVALLFLVSPALKKMTITLDCMADASEESCQKLREIVAGHPGACLEIHQNTSGVFYEFRQSNFTKTPDDHYYG

SEQ ID NO: 112035 - protein, 171 aa, Oryza sativa
  Clone ID: PAT_MRT4530_15959C.1.pep
MAAAAAVCGTERVAEVSASASAAAFVAFSAAAAERFLAVLALAMEAVNGGADIFNEDQHAIYKLLGRIKSESTPENKDGSDDDDDDDEDDDEDDEGGDDDDAEEDFSGDEGGEDEDDDDDDPEANGDGGSDDEDDDDDDGGDEDGEDDDDEDDDDEEDDDDEDQPPSKKKK

SEQ ID NO: 112036 - protein, 1378 aa, Oryza sativa
  unsure (1)..(1378): unsure at all Xaa locations
  Clone ID: PAT_MRT4530_1595C.1.pep
MRAQVSTRMPSFTSSRSNMRHSPCCLMSVNDMYGRLNVIVDDLKGLGANYTDLEVAQKMLRALPEKYETLVTMLINSDMSRMTPASLLGKINTNDMYKLKKKEMEETSPSKKCIARQAEVEDKGNGKVNEANENLEEEIALLARRFNDLLGRRKERGRGSNSNRRRNRRPNKTLSNLRCFECGEKGHFALKCPSKDDDGDKSSKKKSGGYKLMKKLKNSASSGSEEEDGDDTSSKKKKMAVVAIKEAPSLFAPLCLMAKGSSKVTSLSDSESDDDCDDVSYDELVSMFEELYAYSEKEIVKFKALKKDHASLEVLYEELKTSHERLTISHEKLKEAQDNLISTTQHGALIDVGISCDLLGDSATCHIAHVASSSISTSCDDLVDMSSSSSTSCVSICDASLVVENNELKEQVAKLNKSLERCFKDKNTLDKILSEQRCILNKEGLGFIPKKGKKPSHCATRFVKSNGRLMMVALLLDMWVPLYSVVNYRTGGSHWVFDSGCTQHMTGDRAMFTTFEVGGNKQEKVTFGDNSKGKVIGLGKIAISNDLSIDNVSLVKSLNFNLLSVARICDLGLSCAFLPQEVIVSSLLDKSCVFKGFRYGNLYLVDFNSSEANLKTCLVAKTSLGWLWHRRLAHVGMNQLSKLSKRDLVVDLKDVKFEKDKLCSACQAGKQVACSHPTQSIMSTSRPLELLHMDLFGPTTYKSIGGNSHCLVIVDDYSRYTWVFFLHDKSIVAELFKKFAKRAQNEFSCTLVKIRSDNGSEFKNTNIEDYCDDLGYASNSKAYQVYNKNKGIVEETADVQFDETNGSQEGHENLDDVGDEGLMRAMKNMSIGDVKPIEVEDKPSTSTQDKSSTSATPSQAQVEVEEEKAQDPPIPPRIHTALSKDHPIDQVLGDISKGVQTRSRVASICEHYSFVSCLEPKHVDEALCDLDWMNAMHEELNNFARNKVWTLVERPRDHNVIGTKWVFRNKQDENGLVVRNKARLVAQGFTQVEGLDFGETFAPVARLKAILILLAFASCFDIKLFQMDVKSAFLNDFKIGKVDTTLFTKIIGDDFFVCQIYVDDIIFGSTNEVFCKEFGDMMSREFDMSMIGELSFFLGLQIKQLQDGTFVSQTKYIKDLLKRFGLEDAKPIKTHMATNGHLDLDEGGKPVDLKLYRSMIVSLLYLTASRPDIMFSVCMCARFQAAPKECHLVAVKRILRYLKHSSTIGLWYPKGAKFKLVGYSDSDYAGCKVDRKSTSCSFQMLGRSLVSWSSKKQNSVALSTAEAEYVSAGSCCAQLLWMKQILLDYGISFTKTPLLCDNDSAIKIANNPVQHSRSKHIDXIRHHFLRDHVAKCDIVISHIRTKDQLADIFTKPLDETRFCKLRNELIVIDFSNVA

SEQ ID NO: 112037 - protein, 249 aa, Oryza sativa
  Clone ID: PAT_MRT4530_15960C.1.pep
MFEGCYGGVGSAAAAAARDPKPRLRWTPDLHERFVDAVTRLGGPDKATPKSVLRLMGMKGLTLYHLKSHLQKYRLGRQSKKSAGLELAVADSGDALKYQVEVQRKLQEQLEVQKKLQMRIEAQGRYLKEILEKAQKNISLDANGSANLSSTRSQITDINLALSGFMDNATQVQEENNELMKPISDDNLKVNNLGFQLYHLGSQESKDVKCTPKTEELLLLDLNIQGGYELSSRGMQGCELDLKINQQRR

SEQ ID NO: 112038 - protein, 257 aa, Oryza sativa
  Clone ID: PAT_MRT4530_15961C.1.pep
MAAWRRAVVGEGERRKVRRQWGRGGLGAAALGTASLGAWRGGASLGGTEAGASATGHVQAAESMAGDDASASAAVHAQSVASTAGDGASARAAKGRAFVSAVRSNVAAVAAPNPPPNLAGHLAAVRRQVCPAGYHLAVIKLSHLVGARCSSLVSGPSRVVRGPAHPPGPLRGRGRGMFSTRPPLRGRGRAKKSGSGGGGVLAQPVPDPPCCQPYPRDCDLGTHVFAYAYTYQPKFEFFTLNLELILRFFRRSLFISI

SEQ ID NO: 112039 - protein, 531 aa, Oryza sativa
  Clone ID: PAT_MRT4530_15962C.1.pep
MDIEAPNSEVAAGGRRPAADHWRSAMDALICNCLRPPPQPSPADLAILKLMADDWPMEKLKLADQQGTPCYEEGVGVQICDRFHTHVTNDTSDNEIQVTPVKVTICSEGGDNYRCRLFGVPEHISRTDRAEHEPSYISIGPYHCRREGLHVRSNQWKRDCKKHVIDRLESPKGEASLLEAMKEIEGEVRKYYDEIISSHVLHESGITFREMMVNDGCFLLITLQGLQVPGTDGIVWDNQLWWHDIFLYGNQLPFVVLRKIYQQLNLPADIENGQEDCPLGRISKVIESGLTSYTNRTVSNPGNADHILHLCHELLKPTSSAEMPPPPASDNQQVRVWRRATEYSELLVEFKKREFGSEPGDAQCISDVRIVGRVVEIPKLELQPETWRLLRNLMLLEETNKQLGGHVTAYCTFISQLASTPADVGLLTKKGILVHLENSDEMAAKKLSMLCEQIDYATEDYLIKSVWYKLDSHCSSRWWLWRAKLRRYRDWNNPLVWLGVLAAFVLFLCAILQAAYSMLAYYKQGSQSRST

SEQ ID NO: 112040 - protein, 57 aa, Oryza sativa
  Clone ID: PAT_MRT4530_15963C.1.pep
TMFLETLNIVTTAYNATLFVQFKNNRAIIIHAFLKQHWIDDVWHDLSMGFLTEYFGI

SEQ ID NO: 112041 - protein, 58 aa, Oryza sativa
  Clone ID: PAT_MRT4530_15964C.1.pep
PGGLCRGHLPVREPRRVPGNHCRRRPHGRCRSGRAVVVTVSSEARPRGVAALPEVSPV

SEQ ID NO: 112042 - protein, 189 aa, Oryza sativa
  unsure (1)..(189): unsure at all Xaa locations
  Clone ID: PAT_MRT4530_15965C.1.pep
MKMTTKRRQRDWRRGFDGSELKIATMLWIDGEKAALVIFGLDEEVDDKGLGAADLTTMMGSSSSWQEQRPEGDNGDGSDVLGSSGSEEMTTTEMERWLSRVDGEEGAPLLAEFGEGVDAVPSLEQGHKGDGQGPSPNEGPNPVYVTAYLVWLQLIGEMPTCRVMRWCENGANNVHEDQXAQLHVECCEK

SEQ ID NO: 112043 - protein, 63 aa, Oryza sativa
  Clone ID: PAT_MRT4530_15966C.1.pep
NVLNLFGYSKCSGLALGVVVKLIDKSGNETGVMTFGRTRGGCFLELCMQLCSYRLHVINSISR

SEQ ID NO: 112044 - protein, 78 aa, Oryza sativa
  Clone ID: PAT_MRT4530_15967C.1.pep
PFIYVTLTIYSLFKNGPRHISSSNSKLSRDLFVNMKSKKKQSLLDKMTSKRNLFISLDDDKQNEGFRLQGLSCDYLLV

SEQ ID NO: 112045 - protein, 387 aa, Oryza sativa
  Clone ID: PAT_MRT4530_15968C.1.pep
MSSFAHHHHGSLVEKDGRMSALRSSLRPYEAAEEMAAAAAAGGPAAAWGAVERGAGMMGDGFSVEDLLDLEELCEVDRDGGEQGEAAAAAAAAVEKERSSDSHGSSVVSYEPMPLLPPVMDLPAHDVEELEWVSRIMDDSLAELPLPQLPAAAAALAACGKPQHRRPHEGAASALLDPMRTPTICALSTEALVPVKSRRSKRSRASVWSLSGAPLSDSTSSSSTATTSSCSSSASFSPFLQYVDFPALVASDLLDEQPRSKKSKHGKNGKQKPKKRGRKPKHQQPPHLAAAAGGGAALPATGDRRCSHCGVQKTPQWRAGPEGAKTLCNACGVRYKSGRLLPEYRPACSPTFVSSLHSNSHRKVLEMRRKKETPVIVAAAAPAVASF

SEQ ID NO: 112046 - protein, 73 aa, Oryza sativa
  Clone ID: PAT_MRT4530_15969C.1.pep
MDFIAYQLGQREEKKMGRVGRSSLISRPIEVESYLNHLMSWCKHRYAIAVVVPRPLEVKAREIASSYWFENQE

SEQ ID NO: 112047 - protein, 160 aa, Oryza sativa
  Clone ID: PAT_MRT4530_1596C.1.pep
MRRFLISTPFSRRRGERKAEAGRMARSVSYVSAAKLLAMARGNPRVAIIDVRDEERSYQAHIGGSHHFSSRSFAARLPELARATGDKDTVVFHCALSKVRGPSCAKMFSDYLSETKEESGTKNIMVLERGFNGWELSGQPVCRCTDAPCKGTCSPEEPEL

SEQ ID NO: 112048 - protein, 1550 aa, Oryza sativa
  Clone ID: PAT_MRT4530_15970C.1.pep
MVGNLPPVHPHAGSRAVHEYQFLPEQPSDRYEGASRSHEGASRSHYYDTPVEASNSRMSSHTPGSHLLRGSDEAAPGYAFQGQMSGSGHLPQSGRREVLPAVPTDYEMIQSNSDLNSVPVEGQYGISQVAGIENSLLPSERRAYHDEDGSRVDRKRKHNEEAKIAKEVEAHERRIRKELEKQDMMKRKREEQMRKEMERHDRERRKEEERLLRERQREQERFLREQRREHERMEKFMQKQSRRAEKQRQKEELRKEKEAARQKAANERATARRIAREYMELVEDECLELMELAAQSKGLPSMLSLDSDTLQQLDSFRGMLTPFPPEPVRLKEPFSIKPWTVSEDNVGNLLMMDKQIDLFDTLASLHQVWKFSITFADVLGLSSVTFDEFVQSLHDYDSRLLGELHIALLKSIIKDIEDVSRTPSVALAVNPAGGHPQIVEGAYAWGFNIRSWQRHLNVLTWPEILRQFALSAGFGPQLKKRNAEDVYYRDDNEGHDGQDVISTLRNGSAAVHAAALMKERGYTHRRRSRHRLTPGTVKFAAFHVLSLEGSKGLTILEVAERIQKSGLRDLTTSKTPEASIAAALSRDTKLFERTAPSTYCVKSPYRKDPADSEVVLSSAREKIRAFQNVISDSEAEKEANDAERDEDSECDDADDDPDGDDVNIDVGDGKDPLIGVKEQDGVPITTIVDSTKREKEKVDALTQSSDLTTSGKEAPKPSLGKPSSANTSSDSPVRASSEYHEVPPTDAEDKEIDESNQGESWVHGLAEGDYCDLSVEERLNALVALVSVANEGNFIRAVLEERLESANALKKQMLAEAQLDKRRSKEEFAGRVQYNSNMNLKADVNQENATESTPTPFHNVDKHNDGNTGVVDNNNNEIIDHNSNAANASYERNGLGQDIAATPDTLSVQQYAYADKTRSQLRAYIGHRAEQLFVYRSLPLGQDRRRNRYWQFSTSASPNDPGSGRIFFECRDGYWRVLDTEEAFDSLVASLDTRGSREAQLHSMLQRIEPTFKEAIKRKKSAVVEQSAGRYLKNGATEMIRASYRSDFGSPSSNLSGVTSDSAIAYSDSFKIELGRNDVEKTAISKRADVFIRWMWRECNDCKLTCAMEYGKKRCSELMHSCNYCYQIYLAEERHCSSCHKNFKSIHNFSDHASQCKDKLRTDHNWKMQTADHSVPIGVRLLKLQLSTIEASIPPEAIQPFWTDGYRKSWGVKLHSTTSLEEIFQMLTLLEAAIKRDHLSSEFETTSELLNLNTQDNPSQNHVGLSGSAAVLPWVPDTTAAIALRMLDLDSAVSYMQNQKMERNGGDFMKPPSRFVAVKNAQELDPLETTGLDLFDGRWATGSGRRGRGRGSRGGSRGGRGRSRGGRVPRGISISSRIGFKDENEASRKNTRRGRTRGRGRGRGRRTVRSRQPSEGKGRSIPKENLLGSFSMLSNAKAATVEESPRSSGADEWGLENRRPYIDGDENSSGSQPHGMIDDDVSEEEDEDVEGDDDGEEDDADRAVDDVDAEMDEDDDIGDDGEDGGDGGDGVEANADEDEGGSSYSSEYSD

SEQ ID NO: 112049 - protein, 492 aa, Oryza sativa
  Clone ID: PAT_MRT4530_15971C.1.pep
MAAAGLNHGGASPSARGKWLESVCGKYLQPPLKFSSDRTHMAVGLVLAPSFGLCEELPACGAATIPSSSDGTSSVTLSHRYGPCSPADPNSGEKRPTDEELLRRDQLRADYIRRKFSGSNGTAAGEDGQSSKVSVPTTLGSSLDTLEYVISVGLGSPAVTQRVVIDTGSDVSWVQCEPCPAPSPCHAHAGALFDPAASSTYAAFNCSAAACAQLGDSGEANGCDAKSRCQYIVKYGDGSNTTGTYSSDVLTLSGSDVVRGFQFGCSHAELGAGMDDKTDGLIGLGGDAQSPVSQTAARYGKSFFYCLPATPASSGFLTLGAPASGGGGGASRFATTPMLRSKKVPTYYFAALEDIAVGGKKLGLSPSVFAAGSLVDSGTVITRLPPAAYAALSSAFRAGMTRYARAEPLGILDTCFNFTGLDKVSIPTVALVFAGGAVVDLDAHGIVSGGCLAFAPTRDDKAFGTIGNVQQRTFEVLYDVGGGVFGFRVGAC

SEQ ID NO: 112050 - protein, 64 aa, Oryza sativa
  Clone ID: PAT_MRT4530_15972C.1.pep
MDDASSNAVPILALLRLPATTPTAHGPIDEEQHDVVTVHGEEESNTMCCGMEKLRVAQHYGRRG

SEQ ID NO: 112051 - protein, 72 aa, Oryza sativa
  Clone ID: PAT_MRT4530_15973C.1.pep
MEWDLKMPPAASWELADELENSGGGGVPAAVSSSSAAVGGGVNAGGGGRQECSVDLKLGGLGEFGGGGAQPR

SEQ ID NO: 112052 - protein, 111 aa, Oryza sativa
  Clone ID: PAT_MRT4530_15974C.1.pep
KTKIYPAFLPRPRDPPTGKKQKPGGGPGIPHYFNPPPPYQGGQGGPGGQKPPPGGPTRGLGSPKNPPGFLAPIWTGRGGRPSTQGSTDRPTPVNFGFLGGPLNGKKKPPPP

SEQ ID NO: 112053 - protein, 499 aa, Oryza sativa
  Clone ID: PAT_MRT4530_15975C.1.pep
MAAEEAHRLADASATAPPKNAAAVDGVAVAAPAAGGGHGRAPGNKLSLVPLIFLIFFEVAGGPYGAEPAVQSAGPLFALLGFLVFPFIWAVPESLVTAELATAMPGNGGFVLWADRAFGPFAGSLMGTWKYVSGAINGAAFPALCADYVARVAPAVSGGGARVAAIVAFNVAISVLNYTGLSIVGWTAVALGVASLSPFALMFGAALPKIRPRRWRATAADKDWKLFFNTLFWNLNYWDSASTMAGEVERPGRTFPRALLSAVAMTTLGYLLPLLAATGAIDAAPEDWGNGFFADAAGMIAGGWLKYWIEVGAVLSTIGLYSATLSSAAFQLLGMADLGLLPRAFALRAPVFDTPWVGILATAAITLAMSFTSFDTIVASANFLYSLGMLLEFAAFVRLRARLPAMPRPYAVPLRGLPAAAALCAVPSAFLVFVMAIAGWKVYAISAVFTAAGVAVYYLMDLCKARGWLTFSAAAADRGGSGGDAMMYRRQGSTASEVV

SEQ ID NO: 112054 - protein, 403 aa, Oryza sativa
  Clone ID: PAT_MRT4530_15976C.1.pep
MEGVGGGKRRGDDGAEATPRWRFSRPSSQGGPLAAAGLTSIRAVLNRVNSSVDAAAAGGPRPVLRLGNGDPTASACYRTAPAAEDAVVDALRSGAHNGYSLTVGVLSARRAIAEYLSRDLPYELSANDIYLTSGCVQAIEVMISVLAQPGSNILLPKPGFPLYESRTTFSNLEVRHFDLIPERGWEVDLEGVQAIADENTVAIVVINPSNPCGSVYSYDHLAKIAETARKLGLLIIADEVYDHLAFGNNPFIPIGVFGKTVPVITLGSISKRWLVPGWRLGWIATCDPNGILKEAKVNQSIENYINISTDPATFVQGAIPQIIANTKEDYFNKILDQLRNAADLCYDKIKDIKGITCPHKPEGSMFVMVKLDLSYLDGFHDDMDFCCRLAKEESVIVLPETSW

SEQ ID NO: 112055 - protein, 169 aa, Oryza sativa
  Clone ID: PAT_MRT4530_15977C.1.pep
TTTTPRRRRPGDGDDPATPATMADSGGSRSAASSSLRAPSMPPPLLCLPSSPLPCVVEVAMTSSTPDLASSSTGRRPRCGHRRRCHLLLLDAAWEEGRHRAPLGGAAVLGVGVGDGAGPELLLPCGGRVDDEELEVDASGGDGKRRGRDGGLRRWPGMTRRRRSSSARA

SEQ ID NO: 112056 - protein, 189 aa, Oryza sativa
  Clone ID: PAT_MRT4530_15978C.1.pep
LRTTNFLFHPQQRRRQPCDGDDPATTATMADSGGSRSAASSSLRAPSMPPPLLCLPSSPLPCVVEVAMTSSTPDLASSSTGRRPRCGHRRRCHLLLLDAAWEEGRHRAPLGGAAVLSVGVGDGDGPELLLPRGGRVDDEELEVDASGGDGKRRGRDGGLRRWPGMTRRRRSSSARRHGGWACRARPPRM

SEQ ID NO: 112057 - protein, 75 aa, Oryza sativa
  Clone ID: PAT_MRT4530_15979C.1.pep
SSSSAIRAPRSRPPVRSTFCSRVRACAQVFFYVLGGDKWWVFSTLKRCCECTCDFPPVFVTIFETLSFLDQFSVP

SEQ ID NO: 112058 - protein, 141 aa, Oryza sativa
  Clone ID: PAT_MRT4530_1597C.1.pep
LMLFNYGYSNPALQLRITGYNSLHFAFLVYRKEVFALRVLHRQTHRGYYSFTREHMVTEGAAVISAAAGAGDAEVWLAIVLAGAEHRPALPGGVVDHCPPASSQGSPRSSSVDRSSVLAGGGGCQALLLAAGGRGRQPTSC

SEQ ID NO: 112059 - protein, 146 aa, Oryza sativa
  Clone ID: PAT_MRT4530_15980C.1.pep
MTESTKIKYCRADSGSGSKPLSAETKTRLMADGKKIDEEKKDGTAVRRVLFWFAVLVIRFALLMAMHYYHDVTSSRCDGARAGGARTGRSALSRVRGRRRGGGTPDTRPYCDSGTACLDFRKGGCNHGDACEFAHGVFDNSSADLA

SEQ ID NO: 112060 - protein, 107 aa, Oryza sativa
  Clone ID: PAT_MRT4530_15981C.1.pep
MCGRAGRPPFDDTGTIIIMTRRETVHLYENLLNGCEMVESQLLPCAGEHLNAEIVQLTNPQHYGIKKEIPRELLEKQMKDICVEKIHELGEYGLIWTDEDGFLLKPL

SEQ ID NO: 112061 - protein, 117 aa, Oryza sativa
  Clone ID: PAT_MRT4530_15982C.1.pep
KTRPPIGEGPRTPDGTPPGKKEPTQLARDPPHNGRNTPPLTTPTTGLFRPQNKRQGPPTKKAGPKASKIRAPPKLLPPRAATQPKNPKQPGQHHHRFPCRSPRGPPFKWGPTFRGWN

SEQ ID NO: 112062 - protein, 130 aa, Oryza sativa
  unsure (1)..(130): unsure at all Xaa locations
  Clone ID: PAT_MRT4530_15983C.1.pep
RLWTAAAEALRWASYTTSGGTPSPARDSAPPCGYGLTTWISATVLTYWIRFSMTNDDVQXTTGVALAMLLTAVRAQEPPLSDFTKQNIVVVGAGSAGIGVLNMAKQAMLRMPGINMIXQGHNQFWVFDKN

SEQ ID NO: 112063 - protein, 128 aa, Oryza sativa
  unsure (1)..(128): unsure at all Xaa locations
  Clone ID: PAT_MRT4530_15984C.1.pep
SRVRYLTAIHEILEKTGYKEDEGTANELSFQTWTNXCNDTLNSKKKGDNAFRQKDFSCAIDCYSQFIEVGTMVSPTIYALSCLSYLMNDKAEQALSDAMQALVISPTWTTAFYLQAAALLLLGMENEA

SEQ ID NO: 112064 - protein, 57 aa, Oryza sativa
  Clone ID: PAT_MRT4530_15985C.1.pep
LNMSAITQSTNRYSCHRSAGFCLQLEPMCFIQANSILYVLGELDGTNLNIHFGLRIV

SEQ ID NO: 112065 - protein, 55 aa, Oryza sativa
  Clone ID: PAT_MRT4530_15986C.1.pep
MGKKRPDPSSLSMASSSGTTVVVEVAVTIPSASVVLRAPLSPTPPDSAGGVLVRE

SEQ ID NO: 112066 - protein, 494 aa, Oryza sativa
  unsure (1)..(494): unsure at all Xaa locations
  Clone ID: PAT_MRT4530_15987C.1.pep
MGGRVSKAVACCCCRSQHHGVVVESSEKTAEEDHGESYELPAFQEFSFEQLRLATSGFAVENIVSEHGEKAPNVVYKGKLDAQRRIAVKRFNRSAWPDPRQFLEEAKSVGQLRSKRLANLLGCCCEGDERLLVAEYMPNDTLAKHLFHWEAQAMKWPMRLRVVLYLAEALEYCTSKGRALYHDLNAYRVLFDDDCNPRLSCFGLMKNSRDGKSYSTNLAFTPPEYMRTGRITPESVIYSFGTLLLDVLSGKHIPPSHALDLIRDRNFNMLTDSCLEGQFSNEEGTELVRLASRCLHYEPRERPNVRSLVQALXPENGKTKKKMGLLSKGVVDVHVNLAGSRVNLYSRALCFHQGHFSFLFGFVSYVENRGILVWRKSLQMKTNQMQDTLNSKKKGDNAFRQKDFSSAIDCYSQFIEVGTMVSPTIYARRCLSYLMNDKAEQALSDAMQALVISPTWPTAFYLQAAALLSLGMENEAQEAIKDGCAHETSSSSGH

SEQ ID NO: 112067 - protein, 294 aa, Oryza sativa
  unsure (1)..(294): unsure at all Xaa locations
  Clone ID: PAT_MRT4530_15988C.1.pep
MNSESCCWVIDYQTRIEIARCNSSSDLYPLLADSLPSTTSVQPFVASTIDTNLWHHRLGHLGHEALSRLAQASVIPXSEECYPLCHACQLRSHTHLPFTSSFTRATTSFELLHCDLWTSPIPSVSGFKYYLVILDDFSHYVWTFPLCFKPDTFANLSXFFAFVKTLFAASIRSIQCDNGREFDKSNGRTFFRSXNGVSLRMSCPHTSPQNAKAERTLCSLNNEVRSLLFHATLLPSFWLRPSTLARISITGIPTKILHHHTPFFALYGTHPFYTHLRVFGCKCYPNLSATTPHK

SEQ ID NO: 112068 - protein, 83 aa, Oryza sativa
  Clone ID: PAT_MRT4530_15989C.1.pep
MAVVAVAAYVREDASRSTTSRRASPARALCTHVRPAAGAARPAAGRAGPSARARTADGDGEGPVVRVTNRRTLFALASLKPEA

SEQ ID NO: 112069 - protein, 1333 aa, Oryza sativa
  Clone ID: PAT_MRT4530_1598C.1.pep
MSNEVNHVGKAPMFNGTNYSTWKIKMSTHLKAMSFHIWSIVDVGFAITGTPLTEIDHHNLQLNAQAMNALFNSLSQEEFDRVSNLETAYEIWNKLAEIHEGTSEYKDAKLHFLKIQYETFSMLPHESVNDMYGRLNVIVNDLKRLGANYTDLEVAQKMLRALPEKYETLVTMLINSDMSRMTPASLLGKINTNDMYKLKKKEMEEASPSKKCIALQAEVEDKSKSKVNEVNEDLEEEMVLLARRFNDLLGRRKERGRGSNSNRRRNRRPNKTLSNLRCFECGEKGHFASKCPSKDDDGDKSSKKKSGGYKLMKKLKKEGKKIEAFIGEWDSNEESSASSGSKEEGGDDASSKKKKMAVVAIKEAPSLFAPLCLMAKGSSKVTSLSDSESDDDCDDVSYDELVSMFEELHAYSEKEIVKFKALKKDHASLEVLYEELKTSHERLTISHEKLKEAHDNLLSTTQHGAHIDVGISCDLLDDSATCHIAHVASSSISTSCDDLMDMPSPSSSSSSCVSICDASLIVENNELKEQLAKLNKSLERCFKGKNTLDKILSEQRCILNKEGLGFIPKKGKKPSHHATRFVKSNGKYCSKCREVGHLVNYRTGGSHWMLDSGCTQHMTGDRAMFTTFEVGGNEQEKVTFGDNSKGKSIVAELFKKFAKRAQNEFSCTLVKIRNDNGSEFKNTNIEDYCDDLGIKHELSATYSPQQNGVVERKNRTLIEMARTMLDEYGVSDSFWAEAINTACHATNRLYLHRLLKKTSYELIVGRKPNVAYFRVFGCKCYIYRKGVRLTKFESRCDEGFLLGYASNSKAYRVYNKNKGIVKETADVQFDETNGSQEEHENLDDVGDEGLMGAMKNMSIGDVKPIEMEDKPSTSTQDEPSTSASPNEALCDPDWMNAMHEELNNFARNKVWTLVERPRDHNVIGTKWIFRNKQDENGLVVRNKARLVAQGFTQVEDPKNPNHVYKLSKALYGLKQAPKAWYERLRDFLLSKDFKIEKVDTTLFTKIIGDDFFVCQIYVDDIIFGSTNEVFCKKFGDMMSREFEMSMIGELSFFLGLQIKQLKDGTFVSQTKYIKDLLKRFGLEDVKPIKTPMATNGHLDLDEGGKPVDLKLYRSMIGSLLYLTASRPDIMFSVCMCARFQAAPKECHLVAVKRILRYLKHSSTIGLWYPKGAKFKLVGYSDSDYAGCKVDRKSTSGSCQMLGRSLVSWSSKKQNSVDLSTVEAEYVSAGSCCAQLLWMKQTLLDYGISFTKTPLLCDNDSAIKIANNPVQHSRTKHIDIRHHFLRDHVTKCDIVISHIRTEDQLADIFTEPLDETRFCKLRNELNVIDFSNVA

SEQ ID NO: 112070 - protein, 171 aa, Oryza sativa
  unsure (1)..(171): unsure at all Xaa locations
  Clone ID: PAT_MRT4530_15990C.1.pep
GEDSAELVPNSARVASLPPSHTLFTNPITMQLSSAHFILSLSSAQAKLARRLEEXXEKLIGVSLMTTLPTAILLLLLLLALPPPSAVVRSPPTARAAGAQGXGHRQPLSCCSPWSESEPXPCXXPGVTXPTXRRRXANPRGGLSGLASPXKKXFXVXPFGTPXPCCXLPGX

SEQ ID NO: 112071 - protein, 316 aa, Oryza sativa
  unsure (1)..(316): unsure at all Xaa locations
  Clone ID: PAT_MRT4530_15991C.1.pep
MDRQEEEDDDAALREAGGGASVPGGWLRRLSRELHWSFVLAVVAVYGACQGVGDAVGGVAAGYYWKDVQRVQPSAAQFYQGFVSAPWVVKPIWGLLTDVVPVAGYRRRPYFLLAGVIGASSMLTLSLHRKLGIMPAIFIPDYVFAVIDNSVXSQMIGRLKWLPLLVLCSKLCPPGIEGTFYALLMSIQYAGLLMSGWWGGLMLHLLNETRIVFRSLWVAVLIRNLSMLLPLMIMFLVPQSDQNSMLLPAEMLQDNESTEARKGGQDTAEFSVLVADDSSCHALSVAVEDERIKVVDAGTGTVELIPLMNELQDRGS

SEQ ID NO: 112072 - protein, 447 aa, Oryza sativa
  unsure (1)..(447): unsure at all Xaa locations
  Clone ID: PAT_MRT4530_15992C.1.pep
MDRQEEDDDAALREAGGGASFPGGWLRRLSRELRWSFVLAVVAVYGACQGVGDAVGGVTAGYYWKDVQRVQPSAAQFYQGXIGASSMLTLSLHRKLGIMPAILALTAQSAGAAVADVTVDALVAQNSITHQPLAADMQSXGALGLLSIPSALVFLAGVLLKERRVTDFDYKQAWTVMPLECFDGFSLSLDIQAGMFYWYTDPIVGPGFSEEFIGLVYSVGSIGSLLGVLLYQISLKDYPFRGVLFWGQVLSSLAGMLNLIMVTRLNTRIGIPDYVFAVIDNSVSQMVGRLKWLPLLVLCSKLCPPGIEGTFYALLMSIQNAGLLMSGWWGGLMLHLLNVTRTEFSNLWVAVLIRNLSRLLPLMLLFLVPQSDQNSMLLPAEMLQDNESTEARKGGQDTAEFSVLVADDSSCHALNVAVEDERIKVVDAGTGTVELIPLMNELQDRGS

SEQ ID NO: 112073 - protein, 122 aa, Oryza sativa
  Clone ID: PAT_MRT4530_15993C.1.pep
MDADAVAKAFVEHYYRTFDTNRPALVSLYQDGSMLTFEGQQFLGAAAIAGKLGSLPFAQCHHDINTVDCQPSGPQGGMLVFVSGSLRTGPDEHPLKFSQMFQLLPAGGNFYVQNDMFRLNYG

SEQ ID NO: 112074 - protein, 139 aa, Oryza sativa
  Clone ID: PAT_MRT4530_15994C.1.pep
CVRRVRPAEGTDGGGRGRRHRAAWRWARLVAPIGSRCRRLRAHARRRQRILRFRPLYRGWSCPLQALLHVQLGVETKGNPKHAFPSKETSRPDETGSDSDQPVCGRSHRRSDRPSTGGLTAQHKAYPRELSAWIVPSIG

SEQ ID NO: 112075 - protein, 86 aa, Oryza sativa
  unsure (1)..(86): unsure at all Xaa locations
  Clone ID: PAT_MRT4530_15995C.1.pep
YASLSISYNREFVRTWVLLNLIALIERALAFQSPLSLQSSSSCPMFSYHVLXPXXKXPWXXNFLHXXLNGXXPXFESIQXNXLNLX

SEQ ID NO: 112076 - protein, 39 aa, Oryza sativa
  Clone ID: PAT_MRT4530_15996C.1.pep
MGMISPVRGDENVGGVKMKAPNNNDRAVGGDESKPTMKK

SEQ ID NO: 112077 - protein, 301 aa, Oryza sativa
  Clone ID: PAT_MRT4530_15997C.1.pep
MASFFADDGADELPRTASHPFDADDDAAPDASGGAAADDTGYGGYASFVDGGVEDVEEEEEEIAVESEGVPIGHVSGGFSPSPFSPDPELDGGDGPILPPPAQMGAEEGILLREWRRQNAIVLEEKERKEKELRAQILAEAEEFKKAFYEKRIQNCETNKVHNREREKIFVAGQEKFHAEADKQYWKSISELIPHEIATIEKRGKKDKDKKPSITVIQGPKPGKPTDLSRMRQILVKLKHAPPPHMMQPPPASAAKDGAKDGAKDGTPAPANGTKKPAESKEKPANGSPAEAEKEQPAASE

SEQ ID NO: 112078 - protein, 549 aa, Oryza sativa
  unsure (1)..(549): unsure at all Xaa locations
  Clone ID: PAT_MRT4530_15998C.1.pep
MPTPAALLLTAATGSAALSVGVAAVGPRAPSLLLRSASATRRAPGRARPTRIRAAAAIGGEFGGLAQRRALAGEFIERLRNVLPGGSWWRLEDGEEAGGGRAEASGATAASALRRMWALVASDRWVVFVGFASLVGAALAEIAIPHLLAASIFSAQNGGAVFYRNAKLLVKRMREMLFDSILSQDIAFFDEETVGDLTSRLGSDCQQVSRVIGNDLNLISRNLLXRYQKRAAKFAQEFTASANNXLIGGISIMAGKLTAEQLTKFILYAEWLILSTWWIGDNWSSLMQSVGASHRLQKLEGRIQYADVSFSYPSRPTVPILGGLNLTLHPNEVVAIVGLSGSGKSTVVNLLLRLYEPTDGQILVDGVPLSELDIRWFRERIGFVGQEPRLFRMDISSNIRYGCPREVSNEEVEWAAKQAYAHDFIMSLPDGYNTIVDDALLSGGQKQRVAIARALLRDPSILVLDEATSALDAESEHYVKNVITKFSTDPKARRTVIIIAHRLSTIQAADRIIVMENGNIVEDGNHSELINKHDGLYSRLARRQNDALD

SEQ ID NO: 112079 - protein, 243 aa, Oryza sativa
  Clone ID: PAT_MRT4530_15999C.1.pep
SLTLSIPRLVASPSASLRQPRARVSISPPTGFPSLPSSSLRAKARHGGSRRRPQEIPAGHGQRRRRRREALESTIGCPFGEGCHFSHFVPGGYQAVAKTLNLGNPAVPAPARAPMDHAAGGNSHPASSGKTRMCTKYNTAEGCKFGDKCHFAHGERELGKPAYMSHESAMAPPMGGRYGGRPEPPPPAAMGPPAGNFGASATAKISVDASLAGGIIGKGGVNTKQICRVTGVKLSKRDHESDS

SEQ ID NO: 112080 - protein, 1000 aa, Oryza sativa
  Clone ID: PAT_MRT4530_1599C.1.pep
MKKLKKEGKKIEAFIGEWDSNEESSASSGSEEEDGDDASSKKKKMAVVAIKEAPSLFAPLCLMAKGSSKVTSLSDSESDDDCDDVSYDELVSMFEELHAYSEKEIVKFKALKKDHASLEVLYEELKTSHERLTISHEKLKEAHDNLLSTTQHGALIDVGISCDLLDDSAICHIAHVASSSISTSCDDLVDMSSSSSSSCVSICDASLVVENNELKEQVAKLNKSLERCFKGKNTLDKILSEQWYILNKEGLGFIPKKGYASNSKAYRVYNKNKGIVEETADVQFDETNGSQEGHENLDDAGDEGLMRAMKNMSIGDVKPIEVEDKPSTSTQDEPSTSATPNEALCDPDWMNAIHEELNNFARNKVWTLVERPRDYNVIGTKWVFRNKQDENGLVVRNKARLVAQGFTQDEGLDFGETFAPVARLEAIPILLAFASCFDIKLFQIDVKSAFLNGKIAELVFVEQPPGFEDPKNPNHVYKLSKALYGLKQAPRAWYERLRDFLLSKDFKIGKADTTFFTKIIGDDFFVCQIYVDNIIFGSTNEQLKDGTFVSQTKYIKDLLKRFGLEDAKPIKTPMATNGHLDLDEGVMPPRTRHGRRAPDPVSEPEESSREDYAQSDEEVEANVEGASEEESGDDDSGSGEDEDEGSDEMNIDPSIQFVVNMRNPSQYTILRHHDQFLRPRDTPDPRFHTAFQKSVYEQVYAGKAFAEHKWISWRDINETPEFEGLQDLFRTIGIDRIVTLKQDYNEDLIRQFYTTVWVAEDYNEMKWMSDTLQCSISRRQFRRLLNVRLDFGDDLHEEHTHNPLSIDYLSQFYEDGARYIHGKVAGLRTIPSVVNRIVRATILPRLGNNDDIRGVAWHVIDAIIQGRQFDTVTLMMQEIAISKGTFTQGIYYTPYIMRLIQDKLGAAGPNLKKHKQYKPRLQPGAPRAPRTAPSSHPGASSSSAPPPPHGYDPNVFFHPQYAYFGMQPNEYFNPGRSDRPHRPACHGRSDRPQDGGLTVA

SEQ ID NO: 112081 - protein, 143 aa, Oryza sativa
  unsure (1)..(143): unsure at all Xaa locations
  Clone ID: PAT_MRT4530_159C.1.pep
MAMVQAGMGLTRVVVLIGAGMAGSVVLRNGRLSEILGELQEILDKGEKGKDGEGGGGADMTDALTRQVRNLAMEVKQLASSRGSITVLNGGSGQTVFXGLIVPAATVGALGYGYMWWKGISFAELMYVTKRNMANAVSSMTKH

SEQ ID NO: 112082 - protein, 40 aa, Oryza sativa
  Clone ID: PAT_MRT4530_15C.1.pep
MVYLPASPNGCPGKPCGGSALFVMVGGVLGKTCTGWQCPS

SEQ ID NO: 112083 - protein, 559 aa, Oryza sativa
  Clone ID: PAT_MRT4530_16000C.1.pep
MSSAYTVHRSISLLSVIQLNNSSQWRAERIKQQIKVHFCANRLAHRKLFVASLSFEKDMTGNKSFMEPRFFGPKVLRQAKHPMRHAVHHFFTFLFDYKYSVIRVLQNENDVGHVFRALAKFKSLLLDVVRKKRAPTRGGGGKKYAIGYRSRPEKSKKRIASFMKLLRFNWAAAAAVTPARAKDLELHYHPYYYDYDDSTWNVVVPADGAAEELRGGGGDDGEDCGYLCWLEEETSAGALPAAGEGEDGGNGNGDGDGNGAVNEIDRLAERFIARCHAKFLLEKQESYRRYQEMMARSITIGCPFGEGCHFSHFVPGGYQAVAKTLNLGNPAVPAPARAPMDHAAGGNSHPASSGKTRMCTKYNTAEGCKFGDKCHFAHGERELGKPAYMSHESAMAPPMGGRYGGRPEPPPPAAMGPPAGNFGASATAKISVDASLAGGIIGKGGVNTKQICRVTGVKLSIRDHESDSNLKNIELEGNFDQIKQASNMVGELIATISPSTPAKKPAGSAAGAAPAGRGGPGGRSNYKTKLCENFVKGTCTFGDRCHFAHGENEQRKGAA

SEQ ID NO: 112084 - protein, 485 aa, Oryza sativa
  Clone ID: PAT_MRT4530_16001C.1.pep
MAASSLLPSTTTSPRRRLPFPPTRKPHSAAAAAAKPPTTLTTKPLRLARPLASSSSSPPPPPPPEEAEPKDPIALAFARAAAYKKERDSPPPPPPPPTPAPPPQPPAATEEDSRSSKESFARAVEYRNGNGGGLGSGGGSPLLGASPRFGQSTFSTEDGAFGKFTNKKEEYEYDETDFLGLDFFEKKSYKGPPPGLAPAADPFPDKDFPEVEIIIGDPSKFGKTHRSTEVQPADDSEPEETSRSTTEEKKEENKPDETPPSTVTEPEEDEDEYKPTVRSWGMFPRPQNISKAVGGGRNIRLGGETRSAEEKAAKDKRTKELIAAYRNSQNMIVDAKTKAECTEALKEGDELMNTGRLKQALPYYEKVMQAVDFKWSICLDSLCRSKEAMSMYSKLKNHPNSEISKKANMFMFSFQAMDFMKVNSSPLPRNTGYEKYFDKFGGQKNYYAALDEPEMGIDQIIPYMLFLVSPIFLVAFVALRKSFQL

SEQ ID NO: 112085 - protein, 118 aa, Oryza sativa
  Clone ID: PAT_MRT4530_16002C.1.pep
MMLRDMWIRRGGVGEDPWASRHALGSPDVADLTGWVIRTRLPEWKRIVVLLGSWTLGVRENEKGSGSRLIKWNGSGSRESVGSAAAAVVGVSSSASSVALSGCSELQPKLSAMSWDWY

SEQ ID NO: 112086 - protein, 86 aa, Oryza sativa
  Clone ID: PAT_MRT4530_16003C.1.pep
LTAATATAAASGGLARPHGHVPHPRRRALLPALRRPAGAGGAVLAAVQPVVVRRRGRRRQCPRSPCKALKRKALLSLPTESFAEAA

SEQ ID NO: 112087 - protein, 115 aa, Oryza sativa
  Clone ID: PAT_MRT4530_16004C.1.pep
QINAKMKESHRKSTMPATPPSSSSSTPPMSCPVPLMVAIDHLLPVARTRAARSLVVDGADGIVVPPSEVVGGEDDPPSSCTKLARWCSMFSSSSLSPLPTTRRISGSSSWLDTPR

SEQ ID NO: 112088 - protein, 166 aa, Oryza sativa
  unsure (1)..(166): unsure at all Xaa locations
  Clone ID: PAT_MRT4530_16005C.1.pep
IKSTGTLTNXKGKIFGPALKLSRSSRPRVFASTRFWHAQWETASMSVEKQSPSSTGKSTDPQNRPPNPTGSEVHEGNIVPITMDKLSPEQKKDFRXMMKNAQEQFMKSFVETRGKVYQKRXMVEDLGPDANGLQPQFNNFQDRIDYAVQHALINQSGVLVNTLTKM

SEQ ID NO: 112089 - protein, 566 aa, Oryza sativa
  Clone ID: PAT_MRT4530_16006C.1.pep
MARSSSAPESMEADHQLTATVTAAASGDMPVTEQQQQKQMVAVAAPPATENADAAGGGGGDNGDHLPPTATSLLGGARRTGLHLFVLNARSALRLDELGAEVLRIAVPASLALTADPLASLIDTAFIGRIGSVEIAAVGVAIAVFNQVMKVCIYPLVSVTTSFVAEEDAILSKGAAGADDDNDDGHDAKGHGASAAAVADPEKQQVVGVDSAETNGAEVSTAAVRTTDDKKAAAAGVGVGKCRRRFVPSVTSALIVGAFLGLLQAVFLVAAGKPLLRIMGVKPGSPMMIPALRYLVVRSLGAPAVLLSLAMQGVFRGFKDTKTPLYATVTGDLANIALDPILIFTCRFGVVGAAIAHVISQYLITLIMLCKLVRKVDVIPSSLKSLKFRRFLGCGFLLLARVVAVTFCVTLAASLAARHGATAMAAFQICAQVWLASSLLADGLAVAGQALLASAFAKKDHYKVAVTTARVLQLAVVLGVGLTAFLAAGMWFGAGVFTSDAAVISTIHRGVPVGVAAVTIPCLVLLSSHGGFVGIWIALAIYMSVRAFASTWRMGAARGPWKFLRK

SEQ ID NO: 112090 - protein, 88 aa, Oryza sativa
  Clone ID: PAT_MRT4530_16007C.1.pep
GGAQFFGFLGCRFRGSGGWVFLGLLKGLFYGGFKVVILAISLVWEGVITGGAFSFFFGPLSLGWFFKYVVVLVCGGGVLFLLFGKRLG

SEQ ID NO: 112091 - protein, 60 aa, Oryza sativa
  Clone ID: PAT_MRT4530_16008C.1.pep
TYELAPGSRDTGAPQKRQHSQRTGPGQRGHVRAPTKRGARNIIRKRARETKKKKKAAPLK

SEQ ID NO: 112092 - protein, 49 aa, Oryza sativa
  Clone ID: PAT_MRT4530_16009C.1.pep
LLSMLSVVIEQDGLRFPLCWSIILPVEPAQLPMRFLLFLGASPFSLTSP

SEQ ID NO: 112093 - protein, 55 aa, Oryza sativa
  Clone ID: PAT_MRT4530_1600C.1.pep
SRFRGSCVRAAPPPFLKNGIKRVVRLPWKLKFHVMMRGLYLLIIGQGLYSLVNKC

SEQ ID NO: 112094 - protein, 75 aa, Oryza sativa
  Clone ID: PAT_MRT4530_16010C.1.pep
GPRFEAPQVRRAGRGEPLHRAAARRRRRGRDRRRGGRGGRGCSGGGPPGGGGRSGGWPGGRDGGQRRGWRGGGRL

SEQ ID NO: 112095 - protein, 89 aa, Oryza sativa
  Clone ID: PAT_MRT4530_16011C.1.pep
IAVALKNGKRLTRETLTLCTANTNKRSRLTTLLSTNHMQIACGSMAACDRKPRASGAGLHTHTHTGGSGKSRKDVPHSKGPGGIGRGTM

SEQ ID NO: 112096 - protein, 166 aa, Oryza sativa
  unsure (1)..(166): unsure at all Xaa locations
  Clone ID: PAT_MRT4530_16012C.1.pep
PVKYLGIPIHFRKLGNKDWKVIEXRIEKKLSSWKGKYMSVDKYPSLYAIVRRKCSSITSVMRSVPLNVSFRRTLVGQNLIFWYELCASIIHIQLNHSSDCFRWNFNKNGRFSVRLMYLALINNGYIERNKMIGKLKMPLKIKIFMWYLLKGPLLVCFCRRFSRCIA

SEQ ID NO: 112097 - protein, 711 aa, Oryza sativa
  Clone ID: PAT_MRT4530_16013C.1.pep
MQSGYGGVSEFQQYIMDPGAFAMSAPPQPAQAAAAAAAAAAAAAGGQELGAPFRYQPLHHHALPQHHHHHHPPPQMPPHLAHFGGAGGIPFTQQLLHQAAAAGHHPHLQLFHEQHHHQKHQQQPPPPARWAPQHHHHHHPHHHLGLDVEAAVPESSGAGAGSAASGAAAPPGVPPFLAAAMSFKLGVDGGGGSGATGGTDDALNDGGGAGSGMMLHGGGGGGGGGDDEAATESRLRRWPGDEETSIKEPTWRPLDIDYIHSSSSSKRAPPKDKPATPDSPAPPPPAYYFKNKPDDNAAAASAASAGAVNYKLFSELEAIYKPGSGGPQTGSGSGLTGDDNAMLAPPMADLPDAAAANPPHLNTSETSAGEDAHAVVQPQPQTQQPSGADAARRKRKRRRQEQLSASASFFERLVQRLMEHQESLHRQFLDTMERRERERAARDEAWRRQEADKFAREAAARAQDRASAAARESAIIAYLEKISGETITLPPPAANPAPGADEQDGVGKEVVAYDGEGSLQLSSSRWPKHEVEALIRVRTGLEDRFQEPGLKGPLWEEVSARMAAAGYRRNAKRCKEKWENINKYFRKAKESGKKRPAHAKTCPYFDELDRLYSRSGSGGGGGSSSAGGNGGEEAKGSSELLDAVVKYPDVRCAPPGFPFDGEQNEEGRTKDDGDEAHHDGDGDGDEEDVGVGVGRATDDHDDQVDESHDGH

SEQ ID NO: 112098 - protein, 108 aa, Oryza sativa
  Clone ID: PAT_MRT4530_16014C.1.pep
MSCSASPSAAPLAEYTEHLSNLVAIPSLSHDNHYFLGPIGDSDPTEFIIAKTNRIPFRLANPNLSDWKNTFKSWPSLEKTSPEKSWTTWYKRVSASKQVHWDEIGIGQ

SEQ ID NO: 112099 - protein, 144 aa, Oryza sativa
  Clone ID: PAT_MRT4530_16015C.1.pep
TGEATVTVTSTCDKKYSVSILKPSVPLGRVVYEGSTLPGFSGSIYANGQIAVGMHCHGGVRGGGYELLYLYYRLAAALDQPDEDSGEFFMRQAKHGYLYEDLGNDNVIIRMSDGAYHMTKQDIVRQMEEARPGYERGPSVSFNH

SEQ ID NO: 112100 - protein, 249 aa, Oryza sativa
  Clone ID: PAT_MRT4530_16016C.1.pep
MVEGNDATATDEAERRGGIGGWLSHLPPLSEEKKMGASILVITVDLKCCRCRAKITKVLDCLKEEYCIEKTEFEEKDDKVIVRGKFDAGSLRNKICCKAGGKVVKDIKTVDAWPPPKEPEKKKKDEKPVCKLVPFPVPYPAPPPPPACCPPSTHQCYHCCPAPPKPKPKPCECTHHCGGHGGGCNKPAVSPCGGGCSISDGGACGASCKPPPPPAAIWPPQPSFYYYPPPPCGGYKFACEENSDVCVIM

SEQ ID NO: 112101 - protein, 58 aa, Oryza sativa
  Clone ID: PAT_MRT4530_16017C.1.pep
INIIQSAIYANKINLNKSRIVILRWIVVIIRGIVFFYRIIYLERRLHSVERDCEVCHF

SEQ ID NO: 112102 - protein, 81 aa, Oryza sativa
  Clone ID: PAT_MRT4530_16018C.1.pep
FQQVLGFILTEALCVNLHDIFIQIVSPRCFNLSHTMMHDFIFLSCTTISATISTTRYHRRLGTATGSSCRQPLGKYPHIDG

SEQ ID NO: 112103 - protein, 1041 aa, Oryza sativa
  unsure (1)..(1041): unsure at all Xaa locations
  Clone ID: PAT_MRT4530_16019C.1.pep
MASSSTTSSANRLQGSTVSEKLGKTNHALWKVQVCAAIHDARLQGHLTGAAKKPDAEIAVTVDGKTEKKANPAFEDWEAVDQQVLGFLLASLSRDVLMQVARCTTAAEAWTTIDQMYSTHTRARAINTYYVLTNTKKGNMSLPEFFGKMKALGDEMAASTGRPVEEEEMIMHIIAGLGKGYSEEXQENVVNLASRGGGGNGGGRGGGNFSRGSSGGAPQGGRGRSNNAGGRXGRGRGRAPGAADRRPTCQVCFKRGHTATDCWYXAAAASSSYGIXTNWYIDIGATDHITGELEKXLTVKDKYNGNEQIHTASGAGMDISHVGNTVVHTPNSRNIHLKNVLYVPQAQKNLISVHRLVENNSAFLELHRDYFYLKDLVTKKMLLRGRSHCRLYPLPKPSLNGDEQVFHSWANPPANPPNMSHNFPQDAATDQTAKEDPPGADSHDDSCSRPDGSVHRSPARTPDASPVRQSSADTSLHQHPSAADRIILQGPPPHQETRGQQSGTMTGTATGEETLGSPVTDVEILDMNDIDTDVTGINPDADTILPHVQQMETQEPQQVRPRTRLQSDIHKEKVNLVIKEALKDKNWKLAMDAEYEALVKNNTWHLVPPQRGNNVIGCKWVYKIKRKADGSLDRYKARLVDKGFKQRYGIDYEDTFSPVVKAATIRIILSIVVSRGWSLRQLDVQNAFLHGYLEEEVYMQQPPGFEDVTKPHYICKLDKSLYGLKLAPRTWFARLSQKLIELGFSGSKADTSLFFLNKGEVTIFVLVYVDDIIVASSSERAIAALLQDLKTDFALKDLGELHYFLGIEVSKIHNGIILTQDKYATDLLKKVGMMNCKLAATPLSVSEKFSVHEGSPLGPNDATQYRSIVGALQYLTLTRPDIASSVNKVCQFLHTPTTVHWAAVKRILRYIKQCTKMGLNIHKSGSTLVSGFSNADWAGSIDDRRSTGGFAIFVGSNLVSWNARKQATVSRSSTESEYKAIANATAEIMWVQTLLSELGIKSPRAGKIWCDNLGAKYLSANPMFHARTKHIEVDYHFVRER

SEQ ID NO: 112104 - protein, 1475 aa, Oryza sativa
  Clone ID: PAT_MRT4530_1601C.1.pep
MSNEVNHVGKAPMFNGTNYSTWKIKMSTHLKAMSFHIWSIVDVDFAITGTPLTEIDHRNLQLNAQAMNALFNSLSQEEFDRVSNLETAYEIWNKLAEIHEGTSEYKDAKLHFLKIQYETFSMLPHESVNDMYGRLNVIVNDLKGLGANYTDLEVAQKMLRALPEKYETLVTMLINSDMSRMTPASLLGKINTNDMYKLKKKEMEEASPSKKCIALQAEVEDKGKGKVNEVNEDLEEEIALLDRRFNDLLGRRKERGRGSNSNRRRNKRPNKTLSNLKCFECGEKGHFASKCSSKDDDGDKSSKKKSGGYKLMKKLKKEGKKIEAFIGEWDSNEESSASSGSEEEGGDDASSKKKKMAVVAIKEAPSLFAPICLMAKGSSKVTSLSDSESDDDCDDVSYDELVSMFEEFHAYSEKEIVNFKALKKDHASLEILYEELKTSHERLTISHEKLKKAHENLLFTTQHGALIDVGISCDLLDDSATCHIAHVASSSISTSCDDPVDMPSSSSSSCISIYDASLVVENNELKEQVAKLNKSLERCFKGRLIMVALLLDMWVPLYSVVNYRTGGSHWVLDSGCTQHMTGDRAMFTTFEEGGKEQEKVTFGDNSKGKGVRLTKFESRCDEGFLIGYASNSKAYRVYNKNKGDEGLMRAMKNMSIGDVKPIEVEDKPSTSTQDEPSTSATPSQAQVEVEEEKAQDPPMPPRIHTALSKDHPIDQVLGDISKGVQTRSRVASICEHYSFVSCLEPKHIDEALCDPDWMNAMHEELNNFARNKVWTLVERPRNHNVIGTKWVFRNKQDENGLVVRNKARLVAQGFTQVEGLDFGETFAPVARLEVIRILLAFASCFDIKLFQMDVKSAFLNGKIAELVFVEQPPGFEDPKNPNHVYKLSKALYGLKQAPWAWYERLRDFLLSKDFKIGKVDTTLFTKIIGDDFFVCQIYVDDIIFGSTNEVFCKEFGDMISREFEMSTIGELSFFLGLQIKQLKDGTFVSQTKYIKDLLKRSGLEDAKPIKTPMATNGHLDLNEGVMPPRTCHGRRAPTPDAVSEPEESSGDDYAQSDEEVEANVEGASEEASGDDNSGSGEDEDEGSDNMHIDPSIQFVVNMRNPSQYTILRHHDQFLRPRDTPDPRFHTAFQKSVYEQDLFKTVGIDWIVTLKQDYNEDLIRQFYVTVWVAGDYSEMKWMSDTLHCSISRRQFRRLLNIRLDFGDDLHEKHTHNLLSIDYLSQFYEDGVRYTHGKVAGLRTIPSVVNRIVRATILPRLGNNDDIRGVAWHVIDAIIQGRQFDIVSLMMQEIAISKGTFTQGIYYAPYIMRLIQDKLGAAGQNLKKHKQYKPRLQLGAPCAPRAAPSSHPGASSSSAPLPPPPPGYDPNTFFHPQYAYFGMQPNEYFNPVLGAINTLSESIQRLSTGHEALHEDVRGLRTDVGDLNASVGRLHTRVGTLDSRVQMLESSQAFVYHRSHDAPYPSTLVRPPSPPQE

SEQ ID NO: 112105 - protein, 72 aa, Oryza sativa
  Clone ID: PAT_MRT4530_16020C.1.pep
FLLLQKTMGEKRAKGKALHKGGWAKCKKWERCYYKNRNSTSYKRALTGYRLSTLNSKPKMGLQQSNNWGGVR

SEQ ID NO: 112106 - protein, 70 aa, Oryza sativa
  Clone ID: PAT_MRT4530_16021C.1.pep
ANYGCLLYIIAVKCDCGRRKVCFVLANQNVQLCCLAKKKKKGEKAMDRQINCVTGGNLTVCKYNELWIFE

SEQ ID NO: 112107 - protein, 738 aa, Oryza sativa
  Clone ID: PAT_MRT4530_16022C.1.pep
VYAAIHGARLQGNLTGAGKKLDAEIAVTVDGKTEKKANPAFEDWEAVDQQVLGFLLTSLSRDVLMQVARARAINTYYALTNTKKGNMMALGDEMAASTGRPVEEEEMIMHIIAGLGEGYSEVISAMSARPEPMTMGELYSQIVNFEGRMALYRGTQENVVNFASRGGGGNGGGCGGGNFSRGSSGGAPLGGCGRGNNAGGRGRGRAPGAADRRPTCQVCFKRGHTATDCWYRYDEDYVPDNKHVAAAAAASSSHGIDTNWYIDTGATDHITGELEKLTVKDKYNGNEQIHTASGADVSNESVCNACQQAKSHQLPFPVSSSVSQHPLELVFSNVWGPAPESLGRKKYYVSFIDDFSKFTWIYMLQHKSQVFEKFQEFQEFHSWANPLANLPNMSHNLPQDAATDQTATEDPTGADSHDDPCARPDRSVHRSPARTPDASPVRQSSTAMSPHQHSPAADRIVLQGSPSHRETRGQQSGTATGDGTSGSPATDIETPDTNDIDTDDLDVTVGDSGTTTGPSQNKATKRHLQGKGEPSDHLEALKDKNWRLAMDAEYEALVKNNTWHLVPPQRGTMSSGCKWVYKIKRKADGSLDRYKARLVAKGFKQRGWSLRQLDVQNAFLHGYLEEEVYMQQPPGFEDVTKPHYICKLDKSLYGLKQAPRAWFARLSQKLIELGFSEPKADTSLFFLNKWEFTIFVLVYIDDIIVASSSERATAALLQDLKTYFALKDPGELHYFSWY

SEQ ID NO: 112108 - protein, 202 aa, Oryza sativa
  unsure (1)..(202): unsure at all Xaa locations
  Clone ID: PAT_MRT4530_16023C.1.pep
MDAKRTPPPPTPPNPNPSVIGSGAAADGGGFGRGEAAAATKHMLAFHFLRALSRIHRATPVTRRTRTIRRAAYSSMARAASPRRAWSRALLGQVRARRSRTLMRRAAGXAGRRVVAAPAPSPASARGVRIIAAGETSAAARAVPPPPRQQGEPPRAEALRRLVPGGAGMEYSSLLEETADYLRSLRAQVQLMQGLVDLFSYQ

SEQ ID NO: 112109 - protein, 1531 aa, Oryza sativa
  unsure (1)..(1531): unsure at all Xaa locations
  Clone ID: PAT_MRT4530_16024C.1.pep
MASSSTTSSANRLQGSTVSEKLGKTNHALWKVQVCAAIHDARLQGHLTGAAKKPDAEIAVTVDGKTEKKANPAFEDWEAVDQQVLGFLLASLSRDVLMQVARCTTAAEAWTTIDQMYSTHTRARAINTYYVLTNTKKGNMSLPEFFGKMKALGDEMAASTGRPVEEEEMIMHIIAGLGKGYSEVISAVCARPEPMTVGELYSQVVNFEGRMALYRGTQENVVNLASRGAXGSSGGAPQGGRGRSNNAGGRXGRGRGRAPGAADRRPTCQVCFKRGHTATDCWXAAAAASSSYGIXTNWYIDIGATDHITGELEKXLTVKDKYNGNEQIHTASGAGMDISHVGNTVVHTPNSRNIHLKNVLYVPQAQKNLISVHRLVENNSAFLELHRDYFYLKDLVTKKMLLRGRSHCRLYPLPKPSLNGDEQVFHSWANPPANPPNMSHNFPQDAATDQTAKEDPPGADSHDDSCSRPDGSVHRSPARTPDASPVRQSSADTSLHQHPSAADRIILQGPPPHQETRGQQSGTMTGTATGEETLGSPVTDVEILDMNDIDTDVTGINPDADTILPHVQQMETQEPQQVRPRTRLQSDIHKEKVNLVIKEALKDKNWKLAMDAEYEALVKNNTWHLVPPQRGNNVIGCKWVYKIKRKADGSLDRYKARLVDKGFKQRYGIDYEDTFSPVVKAATIRIILSIVVSRGWSLRQLDVQNAFLHGYLEEEVYMQQPPGFEDVTKPHYICKLDKSLYGLKLAPRTWFARLSQKLIELGFSGSKADTSLFFLNKGEVTIFVLVYVDDIIVASSSERAIAALLQDLKTDFALKDLGELHYFLGIEVSKIHNGIILTQDKYATDLLKKVGMMNCKLAATPLSVSEKFSVHEGSPLGPNDATQYRSIVGALQYLTLTRPDIASSVNKVCQFLHTPTTVHWAAVKRILRYIKQCTKMGLNIHKSGSTLVSGFSNADWAGSIDDRRSTGGFAIFVGSNLVSWNARKQATVSRSSTESEYKAIANATAEIMWVQTLLSELGIKSPRAGKIWCDNLGAKYLSANPMFHARTKHIEVDYHFVRERNDRNAYEPSVLSIGPYHHSELPLLAMETEKWICVDYILKLNHHVSLREYPSLLSGLEKQVCKGFAGLKTHMKLLLMVMGSKKIVILLMNQIPFFVIRAIYQLFSRDTMATTPLLTSDISEFMEGILYHFPKAITEENRPVDFYHLLHLCRMYLKPGHKVEDKQHHGHAGKSHYFDYISDFGQKVFCVGQEQNMLYELSKLNSPEHVYRWRRAVDYHEAGIEFKKRDFHEEDPHSLLDIRFRKGVMEIPCLPIDDKSSLLFRNLVALEQTCPQVSDDITAYIVLMSEFVSTAADVALLAQKGIIVHQMESDEEVSTLFTKLFEYVAFDFRGEHYLKSLYCAMEAHYQSRLNRDMFGQKSAAKTYGILEFVRDSGRVRIKSTGTLIHSKASFGPALELSRSPRPRVFCQQYHEMQFNDLFGDLVLSVKDTSVVPVHISGLAPPKGNGDGVKVIGAVILDHDANDVADAKRDHF

SEQ ID NO: 112110 - protein, 152 aa, Oryza sativa
  unsure (1)..(152): unsure at all Xaa locations
  Clone ID: PAT_MRT4530_16025C.1.pep
SAHASAHASAHASAHAFADAWARRRRRRRAVTTTTTSVVGYRRALLSREAAAVGSTTFQLRLGCVVKSEYRDCVLLLSGFVLFLYFYFSFLTCIIFFFVLLVFYVTFYFFWXFFFFLFFSCLFCLFLSLLILTYFLLQFIFYFFYFSYNILF

SEQ ID NO: 112111 - protein, 411 aa, Oryza sativa
  Clone ID: PAT_MRT4530_16026C.1.pep
METEKWICVDYILKLNHHVSLREYPSLLSGLEKQVCKGFAGLKTHMKLLLMVMGSKKIVILLMLFSRDTMATTPLLTSDISEFMEGILYHFPKAITEENRPVDFYHLLHLCRMYLKPGHKVEDKQHHGHAGKSHYFDYISDFGQKVFCVGQEQNMLYELSKLNSPEHVYRWRRAVDYHEAGIEFKKRDFHEEDPHSLLDIRFRKGVMEIPCLPIDDKSSLLFRNLVALEQTCPQVSDDITAYIVLMSEFVSTAADVALLAQKGIIVHQMESDEEVSTLFTKLFEYVAFDFRDMFGQKSAAKTYGILEFVRDSGRVRIKSTGTLIHSKASFGPALELSRSPRPRVFCQQYHEMQFNDLFGDLVLSVKDTSVVPVHISGLAPPKGNGDGVKVIGAVILDHDANDVADAKRDHF

SEQ ID NO: 112112 - protein, 118 aa, Oryza sativa
  Clone ID: PAT_MRT4530_16027C.1.pep
LFFFFFCFFFFFFFFFFFFFFFFLKKKKNFLFFFWFGPAFADRGDHEPQPCPISPLAQQKGAPSAGGGPSPFITPPLAGWVIFLGFSPPPPAVIKPLPFFFLFLHIKPRNLVFWAPLT

SEQ ID NO: 112113 - protein, 1428 aa, Oryza sativa
  unsure (1)..(1428): unsure at all Xaa locations
  Clone ID: PAT_MRT4530_16028C.1.pep
MASSSYTTSSANPLQGSLVSEKLGKTNHALWKVQVYAAIHGARLQGNLTGAGKKLDAEIAVTVDGKTEKKANPAFEDWEAVDQQVLGFLLTSLSRDVLMQVARCTTAAEAWTTIDXMYSTHTRARAINTYYALTNTKKGNMMALGDEMAASTGRPVEEEEMIMHIIAGLGEGYSEVISAMSARPEPMTMGELYSQIVNFEGRMALYRGTQENVVNFASRGGGGNGGGCGGGNFSRGSSGGAPLGGCGRGNNAGGRGRGRAPGAADRRPTCQVCFKRGHTATDCWYRYDEDYVPDNKHVAAAAAASSSHGIDTNWYIDTGATDHITGELEKLTVKDKYNGNEQIHTASGAGMDISHVGNTVVHTPNSHNIHLKNVLYVPQAQKNLISIHRLVEDNSAFLELHRDYFXLKDLATKKTLLKGRSHCRLYPLPKPSLKYACNATKISFHRWHSRLGHPSSSVVRQVVNKNNLPCLDVSNESVCNACQQAKSHQLPFPVSSSVSQHPLELVFSNVWGPAPESLGRKKYYVSFIDDFSKFTWIYMLQHKSQVFEKFQEFQVMVERLFDKKILAMQTDWGREYQTLNSFFFENWXFIMCHVLTXHQQNGSAERKHRHIVEVGLSLLSHASMPLKFWDEAFQAATYLINRVPSRVNTTPLEKLFHQKPDYSALRIFGCACWQNLRPYNKHKLQFRSTRCAFLGFSNMHKGFKCLDISSGRVYISRDVVFDETVFPFSELDANAGARFQSELSLLAPNIISGDEQEFHSWANPLANLPNMSHNLPQDAATDQTATEDPTGADSHDDPCARPDRSVHRSPARTPDASPVRQSSTAMSPHQHSPAADRIVLQGSPSHRETRGQQSGTATGDGTSGSPATDIETPDTNXTLILTILMSQHPRTRLQSGICKEKVYTDGTIKYSCFTSSGEPSDHLEALKDKNWRLAMDAEYEALVKNNTWHLVPPQRGTMSSGCKWVYKIKRKADGSLDRYKARLVAKGFKQRYGIHYEDTFSPVVKSATIRIIXAVSRGWSLRQLDVQNAFLHGYLEEEVYMQQPPGFEDVTKPHYICKLDKSLYGLKQAPRAWFARLSQKLIELGFSEPKADTSLFFLNKWEFTIFVLVYIDDIIVASSSERATAALLQDLKTYFALKDPGELHYFXLGIEVSKIHNGIILTQDKYATDLLKKVGMINCKPAATPLSVSEKMSVHEGSPLGPNNATQYRSIVGALQYLTXTRPDIAFSVNKTCQFLHTPTTVHWAAVKRILRYIKQCTKMGLNIHKSGSTLVSGFSDADWAGSIDDRRSTGGFAIFIGSNLAXVSWNARKQTTVSRSSTESEYKAIANAIAEIMWVQTXLAELGIKSPRAGKIWCDNLGAKYLSVNPVFHARTKHIEVDYHFVRERVSQKLLEIDFVSSGDQVANGFTKPLSTNLLEKFKANLNLTEK

SEQ ID NO: 112114 - protein, 358 aa, Oryza sativa
  Clone ID: PAT_MRT4530_16029C.1.pep
MSTKKSGAADVQPSPSSCSTIVVTEASGHHVLKIDGYTRTTMMVATGEHLDSGEFHVGGYAWHLRYYPNGYDQEFSSSISFALVRTAGAGDNVRLHARAKISLLDLAGEPVARYSQPVDKCSTSKASDPWVCKSFIERDELEKSGHVVGDRLAVRCDLTFNVQDRLVRELVAVPPPLLRRHIGELLGDARTSDVRFKVGGETFPAHRCVLAARSPVFRAELLGPMREHAATTIRVDDMDASVFAALLRFVYTDELPELDGGSAAAMAQHLLVAADRYDMERLKKVCEDRMVRHLDVGTAATSLALAEQHDCPELKKAILRFMASPARLKAVMASDGYEHLVTSFPSIATEILAMFAAH

SEQ ID NO: 112115 - protein, 94 aa, Oryza sativa
  Clone ID: PAT_MRT4530_1602C.1.pep
GGRANPVITPKERTVLCDSLLGNYTSMLHEPLLAIAKVSSNHDLSFLSKLSLVGAIMAHFIGLEKRGTTHFMLENMVTLLLFHTGSFLLVEITL

SEQ ID NO: 112116 - protein, 26 aa, Oryza sativa
  Clone ID: PAT_MRT4530_16030C.1.pep
GRCQLYLIAISFDINGRLHNFMSRIR

SEQ ID NO: 112117 - protein, 99 aa, Oryza sativa
  Clone ID: PAT_MRT4530_16031C.1.pep
ILVAQGFTQVEGLDYDETFAPVARIEAIRLLLAFATSKEFAETMRREFEMSMMGELSYTKDLLRWFRMENCKAISTPIGSIVVLDPDEDGEAVDQKEYR

SEQ ID NO: 112118 - protein, 474 aa, Oryza sativa
  Clone ID: PAT_MRT4530_16032C.1.pep
MQALICKLSGRYFDKSDKNVAVCCTVLVQGEDSRIFEDESDDDDNEVGSASQTAGTPPVRPAPDEQSDRPGLSASGFVDADRDGPPEATTSTSEGTECETTSEVAATLHIQRQYPREQIIDNIGERATMFKVFKNKQNQDGLIVRNKAILVAQGFTQVEGLDYDETFAPVARIEAIRLLLAFATSKGFKSYQMDVKSAFLNGFIQKEVYVKQPPALYGLKQAPRAWYDRRKNFFLAKGFSMGKVDKTLFVHIYVDDIIFGCSTHALVVEFAETMRREFEMSMMGELSYTKDLLRWFRMENCKAISTPIGSIVVLDPDEDGEAVDQKEYRSDLMPRESIAGDGSGVDLGIRRCVNGNSDPGNGDDDVDDLGDDKKDDKQKDKKGDDSAEGELMTLMDLDLKHGEMEVGAQAGKEQKCGIPTDSDIENMRSEEDKHNGYPHLNWAVSPISIRHGVRHRLEVTDVKTYLNRANGRHG

SEQ ID NO: 112119 - protein, 74 aa, Oryza sativa
  Clone ID: PAT_MRT4530_16033C.1.pep
SSLVSSWSGLLSPCSALAPALFSCGGTHSCFAPTVALPGYREFRSAQYLVCAERLGAAMASAPLRLVGRAVPAG

SEQ ID NO: 112120 - protein, 44 aa, Oryza sativa
  Clone ID: PAT_MRT4530_16034C.1.pep
ISCAEKLDGLMVVFCEHLKSCQTPGGTNFITVLLLSLISKRSSI

SEQ ID NO: 112121 - protein, 712 aa, Oryza sativa
  Clone ID: PAT_MRT4530_16035C.1.pep
MAFELELGPPPNTTMDSMSVRYLLNQIGSDRTTHIQILATVGGALLGFQALLGYRRRRSSNKLFLVLLWAAYTVSSNVVSYTVGLVQSVAEPDRYSVQQWWAVGLLLLLGSADTMSAFTRGDAEQSKGMMAQHAVQTVLVLWWTITLSVCWLYSIVKMGQRIKAMRMASSSHGLVRAAKVVADYMHDTVDAWDRDCGHGGDGGTAARDLDSVDMGPYKYLVHGEEGRSTPPSEQTDYRTRVPEDGTVVTIDKIWRCDGELLVSSGDGVVGDKRRARARALKDTCLSFALFKLLKRRFCGLELELSFAHDFFYTKYPALFPTSAVLHVARFVSLLAFLKLFYDFTYTASYTAKIFKDISAVGIFSSFNDFLFISMILGVEVMQQLSTGYSDWAVVHFVCDYVRRVDKNNKKRHGGGFGFRQAVIKRLATRRARTSRHWQNKLGQYSLLYHSSAGNCLSWLTGRLLEPKVVRLPREVKVAVLRSFKESGGRLAVGRSLDSRLRWACDRFLPPSTQLQSDTHWKTRAHTHTVLVWHIATTMCDHLDAAAAADDDENGADRLVATRLSGYCAYLLAFVPEMLPDHSYMATLVLDAAVQEARKHLVDATAMANKCKKLRVLGESSGGGRDGILMDGARLGSQLMAASYDTRRRWKLLAEVWAELVLFLAPSENADAHAESLARGGEFMTHIWALLTHAGILDRDPEAAAPPAGATAV

SEQ ID NO: 112122 - protein, 68 aa, Oryza sativa
  Clone ID: PAT_MRT4530_16036C.1.pep
CIYFQLSMFTQARPQGRTDFRNRPRQHNSTSIQKPELEDNIKALVAVLDCDSIFQASGLTFPWREQGW

SEQ ID NO: 112123 - protein, 88 aa, Oryza sativa
  unsure (1)..(88): unsure at all Xaa locations
  Clone ID: PAT_MRT4530_16037C.1.pep
MSLLTQFYSKKKKKKNSRGGPVPNSPYSEXYYNSLAVVXXXXDWENPGVTQLNRLAXHPPFASWRNSXXARTDRPSQQLRSLNGEGKL

SEQ ID NO: 112124 - protein, 294 aa, Oryza sativa
  Clone ID: PAT_MRT4530_16038C.1.pep
MVQKELSQAWWFDSHNLARTSPWLTNTLSELDDKTKQMLKMIDQDADSFAQRAEMYYKKRPVLVDMLGDLYRTHRSLAEQLDLLKNGNGTRHTVFGPSSCTQSWSHQAAAAAMGGKGTTGSRSSISLCSDNYDSESEVDDPEQENMEEELSESEDMMKHPSQSQADQAAQLELMHAEIEMLKEKNAELQKASAENEMLKQKNEELQRVSEENMALKAELAAKDEEKREVIRQLASSFDIVKKENFTLREYIIKNSKNSSSSSRGFDFKKLTKDLFTAKLFTAHCKATTGPMVAL

SEQ ID NO: 112125 - protein, 392 aa, Oryza sativa
  Clone ID: PAT_MRT4530_16039C.1.pep
KTTTQQIDRHIQKSIDTTNRFSYYGNTEIGVLDYSATNASAIGDPINSDLFTAGGLTWRVNCYPRGDKADNNGDYISLYLELISKSKNIKAIFDAFMVDEHGNPSDGSNRLVQVYPPAGYPAWGWPRFVKRSNLSSVFVVDGKVRIMCVVGVTGGHLDGGLLPLPPPNIGVHLGGLLDSEDGADVTFAVGGETFHAHRAVLAARSPVFRAELLGSMAEATMPCVTLRDIEPATFRALLHFVYTDVLQIEGSSSTSTTDLLQRLLAAADRFALERLKLMCAQKLWESVSVETVIATLCCAEMHSCPELKNRCIDLVVTKDNFMEVAVTKDYFHLGQSFPSVIEEITGNLPRTMQRGPWGQTWRQHRVSGSLGGVTSSSRVIYSRIMSATKARS

SEQ ID NO: 112126 - protein, 105 aa, Oryza sativa
  unsure (1)..(105): unsure at all Xaa locations
  Clone ID: PAT_MRT4530_1603C.1.pep
DKETRFLTEVRKLAGFLLPIEAISTPPLNHEATVRPLRQGVGKAGAGPRRGLPKPRSLGXVLPSLRRPYYSTTASFLAVAGLSLGPTAXAGQTDLGWPAKRASVK

SEQ ID NO: 112127 - protein, 80 aa, Oryza sativa
  Clone ID: PAT_MRT4530_16040C.1.pep
MSRTSERGRRRPRPVSTPATAPPAARRPSAPPTAAPAAPLLRPPSLRPPPAAPLLRPPPAVAPSTARHPLYAAAARLLVV

SEQ ID NO: 112128 - protein, 130 aa, Oryza sativa
  Clone ID: PAT_MRT4530_16041C.1.pep
KNSLFFFFFFFSPLPLHRSCSLQSQDPESELLPAIAAGARLLDLWNSIGGRGGRGKVGFLRRDLGPIFGPFLVDFVRVLVVLDRVGGGGGAGKRWLPWPPNSQPFFCSDSWRFLAQILARVGVDSRSYPH

SEQ ID NO: 112129 - protein, 590 aa, Oryza sativa
  unsure (1)..(590): unsure at all Xaa locations
  Clone ID: PAT_MRT4530_16042C.1.pep
MSISEYFGKMKAYSDEIASTGKPLDEEDTIAYIVNGLDGDYDSFVSALGMRVEPITMTELYAQLLNFENRLHLRKQGSANAAHRGNGGRGNFIPRGGAIGAAGGTNPGRGHGDSGRGRGSTGGNRGGWGGNQQRVDTRPVCQVYYKRGHVVAECWHRFDANYVPGERHVAAAAYAYGLDTNWYIDTGATDHLTSELDKLTTREKYRGXDQIHTANGAXAKSHQLPYSKSSSFSSNPLDLIYSDVWGPAPDSVGGKKYYMSFIDDYSKFTWVYPIKYKSDVFQRFHEFQVLVERLLGHKIIAMQTDWGGEYEKLHSFFEKIRITHHVSCPHAHQQNGSAERKHRHIVEVGLALLAQASMPLKFWDEAFLTASYLINRTPSKVIQFETPLEKLFHRKPNYQFLQVFGCACWPNLRPYNNHKLQFCSKQCAFLRYSHLHKGFKCLDISTGRVYIFRDVIFDENVFPFSQLHSNAGARLRAEISLLPSSLVPHCTDQGGEHGIDHMLNTAPNEPSDDFSGENVAEDDADSSAGTQEDVHGEILMKNPLQGRGPCRHSRQGNLGSRFSSSSTGDGGHNRGCRSCAAVCQWSQRRN

SEQ ID NO: 112130 - protein, 531 aa, Oryza sativa
  Clone ID: PAT_MRT4530_16043C.1.pep
MEYERIHKVQAGALSPTKLRMKLLGTHNRVRVISNSSSRTSPSKNTEPSQAQNRLLVCDVLEEVSGSSDGSKCSSAINKTEALEKDPPLDINKVEDMTKSSVQQPASSNSSMIHPVRTIEEESNDCDSGIDNASTSSFEFHGGEKTAAQNPTSGYFSRQTSSKWNDAEKWIVNKQNVQQNISKGAPQNQSAQQMNSAAGRGFIVPKISNRNIIPRPMQNMKRPSPASSASRSILERLSFGSHQPKLVRHADVCTVNNAGVTSEYQTKATDNSSSIEIRPYKDPKAIPAVHSVSVRDVGTEMTPIPSQDPSRTGTPLGSMTPTRSPNCSIPSTPVGGRSTASPGDDNTDDGPYFNRKGGTNEISDDEMRLKTRKEIAALGIQLGKMNIATWASKEELELVSASPSIADLERMKKEYAARAAAYEEAENFKHTARFKKEELKIEAWESLQKAKIESEMKRIEEHAEKLRSEAMAKMAEKLEMTRRLAEEKRASANARMNQQAAKAVHKAELIRQTGRVPGSCILCCSGCFCQH

SEQ ID NO: 112131 - protein, 263 aa, Oryza sativa
  Clone ID: PAT_MRT4530_16045C.1.pep
MERLRLSLTSSSLAEGGKERLLDEVELATSAVVTAGGGGGTAIISSAPSRRSARPSLCSARGPQPLRPSLCSAAAPPIPLLRPSTPLLCSRSTATPPVPLLRRHPVPPPAPPACSAHISARPPLPQPVAADGFDGAAAGPNGVASPAGQAPSSSLPGFHEAPPSVLISRPSWIVRSESNIRRERPKRPDPPCTICRGTGKIDCRNCFGRGRTNHADLVMLPKGEWPQWCRICGGSGLDYCHRCHGTGEFREPMGFHFATIHRK

SEQ ID NO: 112132 - protein, 182 aa, Oryza sativa
  Clone ID: PAT_MRT4530_16046C.1.pep
MSAALHTLPAVAAGGLGCRWRRPSATLRAASSVGTASVAVSVNAETQQQRQVGVEEEEKRREDAAEVRTGRVVEALYDDGFGGVTVKDYFAAARAVSSDDGGPPRWFCPVDAGRPAVDNAPLLLFLPGTDGVGMGLILHHKSLGRVFEVRCLHIPVNDRTPFEGFFTIINKTRKIRAGIRVR

SEQ ID NO: 112133 - protein, 58 aa, Oryza sativa
  Clone ID: PAT_MRT4530_16047C.1.pep
IRAEVLVTRIGYATSPYTYVIIRHVFPRREPLGFAAHSSEWFCIPYVSDAWSSREFRT

SEQ ID NO: 112134 - protein, 434 aa, Oryza sativa
  Clone ID: PAT_MRT4530_16048C.1.pep
MGYIGAHGVETLKRYRYSGQDHSVVAKYVLQPFWSRCVTLFPLWMPKEPFSPCLVNPQVGGIGRDLFGDDYTSDGRSFTNLRTVFHNITLTGFMFLVVSALLGYVRILISQIYSPHLDTAPPRWVHLAHGLLLFLYQTFDAVDGKQARRTSSSSPLGELFDHGCDALACAFEALALGSTLMCGRFTFCFWVIAAVPFYLATWEHFFTNTLILPLINGPTEGLMLIYLSHSFTFLTGAEWWAQDFRKSIPLLSWVPLPFIPDIPLYIIVMILMILFAVIPTIGSNVSNVQKVVEARKGSMVLALAMLLPFIALLTGVAVWSYLSPSDIMRNQPHLLVIGTGFAFGYLVGRMILAHLCDEPKGLKTGMCMVNHLRGSIKRYIIITIARIPLVDELLVLFLYCAYTVGLYLHLAVSVVHEIKDALGIYCFRITRKEA

SEQ ID NO: 112135 - protein, 105 aa, Oryza sativa
  Clone ID: PAT_MRT4530_16049C.1.pep
TRSWQDRIDFVNQNHKYGTTESKVWDWKDNCKVSDLPSYHPYWTMIVCEEAKKTLIWIEDKYKECLGDYDKIKYYFNSSTKITDIEDKIRSYKNKIELYQKKIRY

SEQ ID NO: 112136 - protein, 121 aa, Oryza sativa
  unsure (1)..(121): unsure at all Xaa locations
  Clone ID: PAT_MRT4530_1604C.1.pep
GDRRGRGGSXVTVTSREAVSRSEGSWTPEGMEALPYLKKGYGNELHKGLHVGPDRWTGVSNLVKGGKGEAWGGEPYDLEDTGRSCKSLGRKGFGRMGDIKVPLPYRQDSFNLGIVSDALDY

SEQ ID NO: 112137 - protein, 40 aa, Oryza sativa
  Clone ID: PAT_MRT4530_16050C.1.pep
MAGNGWGIDAVVARKRMGKVARVSAGKTKRRSDFGVYFAR

SEQ ID NO: 112138 - protein, 904 aa, Oryza sativa
  unsure (1)..(904): unsure at all Xaa locations
  Clone ID: PAT_MRT4530_16051C.1.pep
SALREGEGLGEGEGALLYLVKSVFFLSFAMAGMIPPFSSFFYDVLEFYGIQMAHLTPNAVMMLAIFAHLCEMFIGVRLSLRLFWYFFTMQPAFLATEVSGCYFXPRNQLAHPYICCTLRKKWDDLKSDCIEPSLTPDGILPLCSDRDHDSFFAVMQAIDAAGNHGRDDGAGDSHDDGAGGSGGQGEQHPSTRGGHSEGPMXGGLGSSHPADPNGKRPGRTLPPYPSRGGSPERTANRHPPSAGPVVPPETGRKKKRPRKIGETQTXRGSFIEPPEWSFKCPPSSEVPAPVSPTDEPSRQSKTGRPGRAKAXRKRPRRARRWRRRAHGRMTVRSPRLRAGARRLRPRRRSKQSGPSXGAMPEVEPKAWPSGKKDEREHGAPRTTTSEASXDRTPGGGHIGGPAEDASHTGGGGTQGTEGSAAGGSSRTPPPRGRRSSFSASTPMGTEPLLQALATTNTAVVEGLNTQMHALQEERAALDEERDRVAEGWHSVEALVEAGRKAHHMRLAELGARAETMDAVMRETEEERQLALIATNALDKAINDIHLQHDAHAKELARKLDAMRGLLNAALARERRATQAEALSQQRMESLDRRIRKLDEXPSAGQARPGAYAARPSPVGXREATLVAHESAAAEAESALRLHEDAVVERMCTLAYSEATAQRLEQSLRLREEANAGREQRHLENARAERATLEQRVTKLEAQEKELATSAYGGVVPMGEGELAEQLTVAADTIAGLHRALQERVEEVKALWLANEVGPGMLRDAFVRLDRTGHRVGISLSRDPKLPSSMTALTHRIGEMAEDLERLPEVVKDTVKSSSVVELVLASYHARDPDFLPWLALEDSPLSSPQXKETEVHEAAEEIMGNFEGTAPTFTFVVASEDVDPEEYWDHFLGSSATGSLGAGE

SEQ ID NO: 112139 - protein, 157 aa, Oryza sativa
  unsure (1)..(157): unsure at all Xaa locations
  Clone ID: PAT_MRT4530_16052C.1.pep
MSLSVFFFLTSRRWLPAAPELSGEHAEAAAVSMRRRQRWEDGGEVAEGGNEKKTGGDACAQRAALRGVATVKARAFRDVWNVAAVIPVEKNAIAAINHHQHYKHNAQKQQHHHRHRGNGSNTSNSFGDDDDDNNFLTICSQELLARGTXLLKRTRKV

SEQ ID NO: 112140 - protein, 68 aa, Oryza sativa
  Clone ID: PAT_MRT4530_16053C.1.pep
MGAAPTHAPRAVAYASRRLAASLHIASCHDGGFDTDRRRGSGTTTCTRARPGDASASGAAIPLPAKKA

SEQ ID NO: 112141 - protein, 58 aa, Oryza sativa
  unsure (1)..(58): unsure at all Xaa locations
  Clone ID: PAT_MRT4530_16054C.1.pep
EGWEHNLXYFFFFFFFXFXFFWFFSXQAXAPPLKPKQSSSMIRSCALLPLLELATTRT

SEQ ID NO: 112142 - protein, 61 aa, Oryza sativa
  unsure (1)..(61): unsure at all Xaa locations
  Clone ID: PAT_MRT4530_16055C.1.pep
HXIGFTLAPDTFXRRVEGASMISRVPGYNAHXSGLIXPILXTFKLLSNMXXGYPIRNLSSG

SEQ ID NO: 112143 - protein, 123 aa, Oryza sativa
  Clone ID: PAT_MRT4530_16056C.1.pep
RVAQHELPKARRLWTHARTHARAAYLLGASCSVAGGEVGAGRGGRPGRGLLVRSPRACGGVGAWDRSLPLARSLARPSTWRSGRRMRRRGEARQTRVDSSLAVEERRGGGGCDGDSDDAFGAA

SEQ ID NO: 112144 - protein, 146 aa, Oryza sativa
  Clone ID: PAT_MRT4530_16057C.1.pep
LYPKKPKKKREASKKRGIIAMGAINPVAGEVAGATAKAPPPAMATVRAPLAGNHYLPYHSGWGGGSYAENTQSTSSPVSPASPGKNSSSSSALPPQQQRTWEPKPTTFSQANPGHAYQQDHFPAVAGRRFFPPPAMQMQYYHQQPD

SEQ ID NO: 112145 - protein, 116 aa, Oryza sativa
  unsure (1)..(116): unsure at all Xaa locations
  Clone ID: PAT_MRT4530_16058C.1.pep
RLSIGETKNPHQKQNKQRESKNHTKTGCPLPPPPPLPSPRTRLLSISMAGXGXAGGGGRIKGSAPPHETRGEWRRGEARRSGAAQRGVEPTPDEEEERXRRRRTGRRQREWRPGGG

SEQ ID NO: 112146 - protein, 90 aa, Oryza sativa
  unsure (1)..(90): unsure at all Xaa locations
  Clone ID: PAT_MRT4530_16059C.1.pep
HNNIGCTELGHGEYTEKLLIVVVMNDDCGSKTAGEIGESCNGMTSANNGFGWDGVXGMAHEWXPTNCHQGLNGPAVANGTPKGGCYCKIL

SEQ ID NO: 112147 - protein, 1627 aa, Oryza sativa
  Clone ID: PAT_MRT4530_1605C.1.pep
MSNEVNHVGKAPMFNGTNYSTWKIKMSTHLKAMSFHIWSIVDVGFAITGTPLTEIDHCNLQLNAQAMNALFNSFSQEEFDRVSNLETAYEIWNKLAEIHEGTSEYKDAKLHFLKIQYETFSMLPHESVNDMYGRLNVIVNDLKGLGATYTDLEVAQKMLRALPKKYETLVTMLINSDMSRMTPASLLGKINTNDMYKLKKKEMEEASPSKKCIALQAEVEDKGKSKVNEANDDLKEEIALLARRFNDLLGRRKERVRGSNSNRRRNRRPNKTLSNLRCFECGEKGHFASKCPSKDDDGDKSSKKKSGGYKLMKKLKKEGKKIEAFIGEWDSNEESSASSGSEEEGGDDASSKKKKMAVVVIKEAPTLFAPLCLMAKGSSKVTSLSDSESDDDCDDVSYDELVSMFEELHAYSEKEIVKFKALKMDHASLEVLYEELKTSHERLTISHKKLNSSSSSCVSICDASLVVENNELKEQVAKLNKSLERCFNGKNTLDKILSEQRCILNKEGLGFIPKKSKKPSHRATRFVKSNGKHCSKYCEVGHLVNYRTGGSHWVLDTGCHAQKFTSCDNGCTQHTTGDRAMFTTFEVGGKEQEKVTFGDNSKGKVIGLVAKTSLGWLWHRRLAHVGMNQLSKLSKRDLVVGLKDVKFEKDKLCSACQAGKQVACSHPTKSIMSTPRPMELLHIDLFGPTTYKSIGGNSHCLVIIDDYSRYTWVFFLHDKSIVAELFKKFANRAQNEFSCTLVKIRSDNGSEFKNTNIEDYCDDLGIKHELSATYSPQQNGVVERKNRTLIEMARTMLDEYGYASNSKAYRVYNKNKGIVEETADVQFNETNGSQEGHENLDDVGDEGLMRAMKNMSIGDVKPIEVEDKPSTSTQDEPSTSASPSQPQVEVEEEKAQDSPMPPRIHTVLSKHHPIDQFLGDISKGVQTRSRVASICEHYSFVSCLEPKHVDEALCDPDWMNAMHEELNNFARNKVWTLVERPRDHNVIGTKWVFRNKQDEIGLVVRNKPRLVAQGFTQDEGLDFGETFAPVARLEAIRILLAFASCFDIKLFQMDVKSAFLNGEIAELVFVEQPLGFEDPKNPNHVYKLSKALYGLKQAPRAWYERLRDFLLSKYFKIGKVDTTLFTKIIGDDFFVCQIYVDDIIFGSTNEVFCKEFGNMMSREFEMSMIGELSFFLGVQIKQLKDGTFVSQTKYIKDLLKRFGLEDAKSIKTPIATNGHLDLDEGGKPVDLKLYRSMIGSLLFLTASRPDIIFSVCMCARFQAAPKECHLVAVKRILRYLKHSSTIGLWYPKGEARGVLRFAPIEGSFLLCLPALVMVVVSPRRSQVRMRNQADRSMLKGDEVEVSGDDTGSGDGEDDEASDDGSPLDPTIQFVLNLRNAQQYTILRHHDQFRRPNDCNDSRFHTRYQKAVYEQVYANKAFTEHKWISWRHIGETPEFVDLQGLFKAVGIDRIITMKQPFDEDLIWQFYATFYEEGGRHTYGKVAGLRVIPSVINRIVKATILPRCGNNDDIRGVAWHVIDAIMDGRRFHFINLMMKEIAISKGTIGQGIYYAPYIMRLIQSKLGQVGNNLKEHKEYKPRLQLSTPRAPRVRQPTFDQGASSSATPPPPHGYDTNAFFHPQYAYFGM

SEQ ID NO: 112148 - protein, 246 aa, Oryza sativa
  Clone ID: PAT_MRT4530_16060C.1.pep
MTKAAEAWEGPTAAELKAAGAEAIPGGVRVKGWVIRSHNGPILNSASLQLFEDKLQTTHLPEMVFGESFLSLQHAQTGIRLYFNALDALKAWKHEALPPVEVPAAAKWKFRSKPSDQVILDYDYTFTTPYNGSDALVQNPDSIQTSLDEPRNLCWEDSEDRIDLVALSAKEPILFYDEVILYEDELADNGISFLTVRVRVMPTGWFLLLRFWKGYPSDSAAYGDPNLIAHKLPVVMQKIQKLKLPN

SEQ ID NO: 112149 - protein, 406 aa, Oryza sativa
  unsure (1)..(406): unsure at all Xaa locations
  Clone ID: PAT_MRT4530_16061C.1.pep
MQQMAVSAFTANPSSSHGNTLSGLCSRRPEIWHRRRIGSRIRAQAQSQMQYRKLGDSDLVISEVTLGTMTFGEQNTEKEAHDILSYSFDQGVNILDTAEMYPVPPRKETQGRTDLYIGSWMQSKPRDKIILATKVSGYSERSTFLRDNAKVVRVDAANIKESVEKSLSRLSTDYIDLLQIHWPDRYGPLFGEYCYNPTKWRPSVPFEEQLKAFQELIDEGKVRYIGVSNETSYGVMEFVHAAKVQGLPKIVSIQNSYSLIVRCHFEXVKLIXIYPFTLFIARLLDALGSELKYDISLPYLLFINXVTLPVIFTKHEMQIDRCHXFAKEATNEYVKLAKKHGLTPVQLALGFVRDRPFTASTIIGATTMDQLKENIDAFTSAPRPLAPEVLDDIESLFKRYRDPTLS

SEQ ID NO: 112150 - protein, 290 aa, Oryza sativa
  Clone ID: PAT_MRT4530_16062C.1.pep
MTKAAEAWEGPTAAELKAAGAEAIPGGVRVKGWVIRSHNGPILNSASLQLFEDKLQTTHLPEMVFGESFLSLQHAQTGIRLYFNALDALKAWKHEALPPVEVPAAAKWKFRSKPSDQVILDYDYTFTTPYNGSDALVQNPDSIQTSLDEPRNLCWEDSEDRIDLVALSAKEPILFYDEVILYEDELADNGISFLTVRVRVMPTGWFLLLRFWLRVDGVLMRLRDTRVYCSFGSDEAKPIVLRECCWREATFASLSAKGYPSDSAAYGDPNLIAHKLPVVMQKIQKLKLPN

SEQ ID NO: 112151 - protein, 697 aa, Oryza sativa
  Clone ID: PAT_MRT4530_16063C.1.pep
MGLHRLRSPAKGSVQCSVGPGNCIVYVGIVQGCISTFDLLDYSGAKQISQAGVFDFFVNRVVQAFFENGEMQEGANDTVIVMIPKTKSPEEMKDFWPISLCNVIYKSAFVSGCMITDNALIAFECFHAIQKCKRENQNFCALKLDLSKAYDRVDWAFLDGVLQRMGFGESWRKWTMSCMTSVRYSICLNGNLLDPFTPTRGLRQGDPLSPYLFLFITDGLSHILEKKSLEGSIQPIKERQEEIKAVLQIQRAGFEDKYLGLPTPEGERKVHWISWEKLTSPKLHGGLGFRDTRSFNQALLARQAWRLIAEPNSLCARLLKAKYYPNGSLTDTAFPSNTSPTWKGIEHGLELLKKGLIWRIGDRRTTKIWRNRWVAHGEKVEVIQKKNWNRLTYVHELLIPGTNAWNEALIRHVATEEDANAILKIHVPNQETSHFPAWHYEKTGLFSGVAWNLTKSAQVQAASSTATNGERKLWENVWKADVQPKVKIFAWKLAHDRLPTWENKRKRRIQPVGICPICGVKEENGFHATVECTMARSLREAIREFWALPPERKFAMTGPDWLLVLLDSLNSSDKARVLYLLWRAWFLRNDMIHGKGTATIAESVNFLVNYEKVQTTNQVDKWHALPEGSAKRRGVQGSVTTGAVEITLGSDNKGSERDDAVSLKCAVLLEVLFDFHNTFQLSFPFVSGNKKGGSFLH

SEQ ID NO: 112152 - protein, 60 aa, Oryza sativa
  Clone ID: PAT_MRT4530_16064C.1.pep
SGFFSRSGPVKFRPGAKHVLEPRQDTDDGNYPPMYSCVPFFVIRRGGNILSGQTKSHRKV

SEQ ID NO: 112153 - protein, 176 aa, Oryza sativa
  Clone ID: PAT_MRT4530_16065C.1.pep
MAYTMDELVKWSKSKIGNIKKGIESRRKKLGELRMAGMLDSEPEVKKIKEQLQEMLRREEIWWRQRSQITWLKEGDKNTKYFHLKASWRARKNKVKKLRRPNGSLVSNEKEMGETKITAEMNESLMKPFSEEEIGDVLFQIGHLKAPGSDGYRQDFGVLVKSASYKGYPPKGRFLT

SEQ ID NO: 112154 - protein, 1099 aa, Oryza sativa
  unsure (1)..(1099): unsure at all Xaa locations
  Clone ID: PAT_MRT4530_16066C.1.pep
SESKLKDSREALADCDWHDLGFHECPWTYXYNQRGANNVRVRLDRAVASPAWLGRFRQASITHLVTPSSDHVPLLLERLEEELVHNSVKISRYEAIWEREESFDSVVQQAWGEGEVVRNLGDFKTKMAYTMDELVKWSKSKIGNIKKGIESRRKKLGELRMAGMLDSEPEVKKIKEQLQEMLRREEIWWRQRSQITWLKEGDKNTKYFHLKASWRARKNKVKKLRRPNGSLVSNEKEMGEVARDFFQNLYMKDENLDPTELFNLFQTKITAEMNESLMKPFSEEEIGDVLFQIGHLKAPGSDGFPAHFFQRNWXLKTDVIRVVQAFFENGEMQEGANDTVIVMIPKTKSPEEMKDFWPISLCNVIYKVIAKCLVNRLRPLLHDVISNAXSAFVSGCMITDNALIAFECFHAIQKCKRENQNFCALKLDLSKAYDRVDWAFLDGVLQRMGFGESWRKWTMXMYDICWISHLLFADDSLLFFQAEVDQARICWRRSVYTRKAQGSEFCSXERQEEIKAVLQIQRAGFEDKYLGLPTPEGRMKSEQFQPIKGRFSKRLTDWCERFLSAAGKDTLIKSVAQALPTYTIGVFKMPEHFCNDYEXMVRNFWWGHDKGERKVHWISWEKLTSPKLHGGLGFRDTRSFNQALLARQAWRLIAEPNSLCARLLKAKYYPNGSLTDTAFPSNTSPTWKGIEHGLELLKKGLIWRIGDRRTTKIWRNRWVAHGEKVEVIQKKNWNRLTYVHELLIPGTNAWNEALIRHVATEEDANAILKIHVPNQETSHFPAWHYEKTGLFSVRSAYKLAWNLTKSAQVQAASSTATNGERKLWENVWKADVQPKVKIFAWKLAHDRLPTWENKRKRRIQPVGICPICGVKEENGFHATVECTMARSLREAIREFWALPPERKFAMTGPDWLLVLLDSLNSSDKARVLYLLWRAWFLRNDMIHGKGTATIAESVNFLVNYEKVLLPIRQQSDDIKGKGLITAVQAEALACLEGLRAAMEWIHMPRILETDSVEVFKALSQQELSRSPLAATIKEARGMMQCLXSVQVCKIKREANRIAHALAQMAMRSRSCVEXKLCAPAGILDLIDQEYCYGTLDLSF

SEQ ID NO: 112155 - protein, 779 aa, Oryza sativa
  unsure (1)..(779): unsure at all Xaa locations
  Clone ID: PAT_MRT4530_16067C.1.pep
SDVIRVVQAFFENGEMQEGANDTVIVMIPKTKSPEEMKDFWPISLCNVIYKLIAKCLVNRLRPLLHDVISYAQSAFVPGRMITDNALIAFECFHAIKXCKRENQNFCALKLDLSKAYDRVDWAFLDGVLQRMGFGDTWRKWTMSCVDIFWRRRAWKVQSNQLRCVGEPQGSPTYFSLTIAYCSLKPSEFCSQERQEEIKAVLQIQRTGFEDKYLGLPTPEGRMKSEQFQPIKERFSKRLTDWCERFLSSGPAWGKANCVQECLARVRTSEDKVCRKDMCWSVRAVYDXMKARAWPGGRRDVILLSXEKLTSPKLHGGLGFRDIRCFNQALLARQAWRLIAEPNSLCARLLKAKYYPNGSLIDTAFPSNTSPTWKGIEHGLELLKRGLIWRVRDGRTTKIWRNRWVAHGEKVEVIQKKNWNRLTYVHELLIPGTNAWNEALIRHVATEEDANAILKIHVPNQETSDFPAWHYEKTCLFSVRSAYKLAWNLTESAQVQTSSSTATNGERKLWENVWKADVQPKVKIFAWKLAHSRLPTWENKXKRRIQPVGICPICGVKGEHGFHATVECTMAXSLREVIREFWALPPKRKFAMTGPDWLLVLLDSLSSSDKARVLYLLWRAWFLRNDMIHGKGTATIAESVNFLINYEKVLLLIRQQSDDIKGKGLITAVQAEALACLEGLRVAMEWIHMPIILETDNVXALSQQELSRSPWAATIKEAKGMMXCLQSVQVCKIKREANRIAHALAQMAMRSRSCEEWKLCAPAGILDLIDQEFIIGCIP

SEQ ID NO: 112156 - protein, 151 aa, Oryza sativa
  Clone ID: PAT_MRT4530_16068C.1.pep
MDMGGNGMAMPPPPAPVKKARYMHMTFFWGKNTEVLFTLWPGARGGMYALAILFMFALAVLLEFRGYRVLEARLARRRAPRAAAALRTAVHAVRVGVAYLIMLALMSFNGGVFLAIVAGHAAGFLAFRAGLCGGGPAPPLEEDRKNDPVCC

SEQ ID NO: 112157 - protein, 130 aa, Oryza sativa
  Clone ID: PAT_MRT4530_16069C.1.pep
MMQCFARWASARDQLRCRLGEGGLCGCDHGSSCGGSNYGLSRSLLCRAQFLLSAGAHPTAVADALHLLAARAVEVLHGMAIPVELSDHETGLTSSSRQQSLTRLPGPSSPSQGRFLAAPAADAAFSPPLK

SEQ ID NO: 112158 - protein, 107 aa, Oryza sativa
  unsure (1)..(107): unsure at all Xaa locations
  Clone ID: PAT_MRT4530_1606C.1.pep
YRNKYTEGPSTCHRDKKTSSISKTRYAGSLNXTKPVTTCPSAVLIPILSYVAHVDPTCQPVQVSLLFLSPLLSLPLLSLSLLLSGAAAELEPHAQPAEAREAASSSC

SEQ ID NO: 112159 - protein, 62 aa, Oryza sativa
  Clone ID: PAT_MRT4530_16070C.1.pep
FLYFELHIKRSRRISYLPNKHATKIRPRNCLEKFSGTDRQKPDPERQDYFKRKSWDSTEPFN

SEQ ID NO: 112160 - protein, 111 aa, Oryza sativa
  unsure (1)..(111): unsure at all Xaa locations
  Clone ID: PAT_MRT4530_16071C.1.pep
SSDLAPPPPPTITAAVHTGIRGDSPAKAPTSPNSAACMAEATKRRCRSPPPPGCASSPPPXPPQPPRAAAAAADSTPHRPHRRAPPPXAAPARRPHRPGGGGDLRRRLVVG

SEQ ID NO: 112161 - protein, 196 aa, Oryza sativa
  unsure (1)..(196): unsure at all Xaa locations
  Clone ID: PAT_MRT4530_16072C.1.pep
LPYLPLSASTASVRSASVAPPPSGRYRIRPPPVAAQSPLPPPPPSRRRPNPPSCRPAPAPVSPLSFSNPSPVDPRPPPQPTPSSAQTPISVASSTSGASIHDHDHDHAARRSGHRCCPSAGEVCAASASTGIAAAVPPPRKSSRLASTATYTESRRRPSAAEXGQHQRRLADLHACCPPALPTEEEFYSDAEGVEG

SEQ ID NO: 112162 - protein, 101 aa, Oryza sativa
  unsure (1)..(101): unsure at all Xaa locations
  Clone ID: PAT_MRT4530_16073C.1.pep
TRPRTRGRTRGRCCPSAGEVCAASASTGIAAAVPPPRKSSRLASTATYTESRRRPSAAEXGQHQRRLADLHACCPPALPTGEDFEEFQEEEFYSDAEGVEG

SEQ ID NO: 112163 - protein, 128 aa, Oryza sativa
  Clone ID: PAT_MRT4530_16074C.1.pep
MCYQVKCGTCGKSTWAGCGRHVASVHSQIADGQHCACRAWPGVADKAAAAATDAAGEAPSSSLCAIMESFQCRVRNVTGCGLVGVFFAARFTGTSACICISVNVNSFQSEACSYWGFFKPKDTKTDDL

SEQ ID NO: 112164 - protein, 371 aa, Oryza sativa
  Clone ID: PAT_MRT4530_16075C.1.pep
MGSAARAVMVAVNADPRQGPQARVGAGRIWRRCRRRWHPATTTSETTVADGDLGSYSGSDDGGDGGWRRSRRRLATTAAPGNDDLGSSGTETAAKRVKQYWIVPPTRRPRMLSTVAAGVALSQAMSYILLTRSSRDVVVIDYSIAAVSPGGMFIQVEYDDDSTGAVDMRRLAGDNDALRVAAISGSLRRGSANTGLIRAAKEICEESIPGMVIDHVDIPDLPLLNTDMEVDDGFPPAVEAFRASVRAADCFLFASPEYNYSISGPLKNALDWGSRPPNCWADRAAAIVSASGGSGGSRSMYHIRQVGVFLDIHFINKPEVFIKAHQPPKKFDSDGNLIDPEIKEELKDMLLSLQAFALRLQGKPANSKHAA

SEQ ID NO: 112165 - protein, 78 aa, Oryza sativa
  Clone ID: PAT_MRT4530_16076C.1.pep
HKYYDMLLFCMTILIWLMNTQRDSKCANKLESSGVIFYFGLLHHLILKNKINRAVLMNHFCDLLKAVGQGLILEAYSD

SEQ ID NO: 112166 - protein, 150 aa, Oryza sativa
  unsure (1)..(150): unsure at all Xaa locations
  Clone ID: PAT_MRT4530_16077C.1.pep
MVRVRPPPAPSTTTXPAPPPPSSTTTTTATPPAPSLPPTAPSAPDPRTAGSLLSHVRAPPATTTTTTATPPAPSLPPTXLPPPTAPSSPTCARRRLSLLAASPPRPLCRRPRQATTTVRIQPPALLVDATMTPAAPTTVDEGSPSRRRPW

SEQ ID NO: 112167 - protein, 57 aa, Oryza sativa
  Clone ID: PAT_MRT4530_16078C.1.pep
ANSLEPSGCFLWQWHCQVISIHPFHQLVSLSVQTKNVFPIFMGYKPTPHNTSKIITI

SEQ ID NO: 112168 - protein, 58 aa, Oryza sativa
  Clone ID: PAT_MRT4530_16079C.1.pep
RLLYVSVLCISVPGGENCVPVLHDLSVDTNRLCSRAAIRILYLHTAHLVDAYVHPNTP

SEQ ID NO: 112169 - protein, 149 aa, Oryza sativa
  Clone ID: PAT_MRT4530_1607C.1.pep
MAVEKVPTTTPTFLPLHLHGRWRVAGRPRGESATAVVLGGSESSFGGRALGKEEEVSMGLTPGAANAYRSPINDPSVRRTANTFSSASDERRMREGWKHGVVAVGGDGDNRQAAPRLPTPPLPLPLPDLASGRGAAAAAAATASGQRQR

SEQ ID NO: 112170 - protein, 106 aa, Oryza sativa
  Clone ID: PAT_MRT4530_16080C.1.pep
MRHYLAVTEVSAPVTVVWELSGASMWKVAMRGVRGGSASHHRPSPEVGDGRSSGGRPPAFASSACRVARGGGRWRQIDGLMIAHVSNARDPSLIRCLEYWRPGQCS

SEQ ID NO: 112171 - protein, 548 aa, Oryza sativa
  Clone ID: PAT_MRT4530_16081C.1.pep
MDAGTVRCAANHAPLTPISFIQRAAAVYGDRAAVVCGERRYTWREARGRCVRLAAALAARGDVVAVLSPNVPAMYELHFAVPMAGAVLCTFNARHDAAMISTLLSHSGAKVFFVESHLLDVGRAALRRLAGSTSAASLPVLLTISDDGAGARDSGCVDYEDLVRDAPSEFDIRWPVDEMDPITLNYTSGTTSRPKGVVYNHRGAYLNTIATVLAYDITAMPTYLWTVPMFHCNGWNLPWGVAMQGGTNICLRHFTAKVIFDSIARHGVTHMGGAPTVLNMIANAPAADRRALPGPVRVMTGGAAPPPRVLLAVEELGFVLYHIYGLTETYGPATVCTWMPEWDALPAEERARLKARQGFHHIAVQDVAVKNSATMENVPYDGQTVGEVMFRGNTVMSGYYKDIGATKESMAGGWLHSGDLAVRHPDGYIQLKDRAKDIIISGGENISSIEVESVIFSHPAVLEAAVVARPDDYWGETPCAFVKLKDGANATEGEIISFCRERLPHYMAPKTVVFDDLPKTSTGKTQKFVLREKARAMGSLTKSANSKL

SEQ ID NO: 112172 - protein, 1074 aa, Oryza sativa
  Clone ID: PAT_MRT4530_16082C.1.pep
MATTSSACVSIAVLVVVLSSTSCYSSPSPTTTANGSSDTDLAALLAFKSQLTDPLGVLTSNWSTSTSFCHWLGVTCSRRRRHRRVTGLSRPHPPRLRPITPLLGNLSFLSFLRLTDTNLTASIPADLGKLRRLRHLCLGENSLSGRIPPDLGNLARLEVLELGSNQLSGQIPPELLLHLHNLQVISLEGNSLSGQIPSFLFNNTPSLRYLSFGNNSLSGPIPDGVASLSQLEILDMQYNQLSSLVPQALYNMSWLRVMALAGNGNLTGPIPNNNQTFRLPMLRFISLARNRIAGRFPAGLASCQYLREIYLYSNSFVDVLPTWLAKLSRLEVVSLGGNKLVGTIPAVLSNLTRLTVLELSFGNLTGNIPPEIGLLQKLVYLLLSANQLSGSVPRTLGNIAALQKLVLPHNNLEGNMGFLSSLSECRQLEDLILDHNSFVGALPDHLGNLSARLISFIADHNKLAGSLPEKMSNLSSLELIDLGYNQLTGAIPESIATMGNLGLLDVSNNHILGPLPTQIGTLLSIQRLFLERNKISGSIPDSIGNLSRLDYIDLSNNQLSGKIPASLFQLHNLIQINLSCNSIVGALPADIAGLRQIDQIDVSSNFLNGSIPESLGQLNMLTYLILSHNSLEGSIPSTLQSLTSLTWLDLSSNNLSGSIPMFLENLTDLTMLNLSFNRLEGPIPEGGIFSNNLTRQSLIGNAGLCGSPRLGFSPCLKKSHPYSRPLLKLLLPAILVASGILAVFLYLMFEKKHKKAKAYGDMADVIGPQLLTYHDLVLATENFSDDNLLGSGGFGKVFKGQLGSGLVVAIKVLDMKLEHSIRIFDAECHILRMVRHRNLIKILNTCSNMDFKALVLEFMPNGSLEKLLHCSEGTMHLGFLERLNIMLDVSMAVHYLHHEHYEVVLHCDLKPSNVLFDNDMTAHVADFGIAKLLLGDDNSMIVASMSGTVGYMAPEYGSMGKASRKSDVFSYGIMLLEVFTGRRPMDAMFLGDLISLREWVHQVFPTKLVHVVDRHLLQGSSSSSCNLDESFLVPIFELGLICSSDLPNERMTMSDVVVRLKKIKVAYTEWISAT

SEQ ID NO: 112173 - protein, 125 aa, Oryza sativa
  Clone ID: PAT_MRT4530_16083C.1.pep
SLPYTDLTNRCARSTDDVPEGDDTAEQGGVSDGLQGRPSSLKDPIQTRRPARQAKANPRNYGPDWAIFTATRHGSGNDDRNGLGSADLPPLALGVVDPPCMGGSTNDYGSLRSADRMLPASGALC

SEQ ID NO: 112174 - protein, 115 aa, Oryza sativa
  Clone ID: PAT_MRT4530_16084C.1.pep
MEKLVPNTKKAMEDKEEKPKVPSSDPDLVDLVAGEQPQLQREHQPPNISEMKPLTREAYGGGMYANEGRRDPTRPRASATQSADGPEEAAVRPKHAPPPSTGDRDLDITGQSYIQ

SEQ ID NO: 112175 - protein, 147 aa, Oryza sativa
  unsure (1)..(147): unsure at all Xaa locations
  Clone ID: PAT_MRT4530_16085C.1.pep
GSLQDALLGWRCSELVVEWPRCLAVARDVAATLHYLHSVVKPXNSDADEDGKPESGAIAEGCDVDRGCDDDASIIRESMITTMVNGEGNPKSPENDDGFTSASPAEAASASGFDRISVESGMRPPPEPGATARLLLPLRLPPTAHRY

SEQ ID NO: 112176 - protein, 99 aa, Oryza sativa
  Clone ID: PAT_MRT4530_16086C.1.pep
FFFFLACKEMEISSLGSKIDVQFHTIETNLQSKPRVIFSKRTVQNKNITLSHLISPAYTPLWPLCRCRLTRRPKSISTSHPIYVVAGASKAYATTTPSV

SEQ ID NO: 112177 - protein, 299 aa, Oryza sativa
  unsure (1)..(299): unsure at all Xaa locations
  Clone ID: PAT_MRT4530_16087C.1.pep
LLKKQPVRPVGLGCWDAAGSLQGEREFHNEFAVASHLLALSSAPGSPPVPAAAAKPGGKGRDSIDRIPNGSLQDALLGWRCSELVVEWPRCLAVARDVAATLHYLHSVVKPXNSDADEDGKPESGAIAEGCDVDRGCDDDASIIRESMITTMVNGEGNPKSPENDDGFTSASPAEAASASGFDRISVESGMRPPPEPGATARGSWSRAVRRDATRIHHRARATRQRGVMDAAPTNPQQQKSNVPCAAPPGRHTVRCAPLHHRSRPAPTPAHHHTTPYHTTAISSVSVTHPAIPPRPPPP

SEQ ID NO: 112178 - protein, 147 aa, Oryza sativa
  Clone ID: PAT_MRT4530_16088C.1.pep
MGCMMADMASLAPLAPSDEGKAGEGAIGEGGNIIVEIRRDLKHWDDIVHAWVAAELSAYGEAVWVLDAKQEVLSLLAPVTPCAWCDVIGSEEPRSSITRSTVVKGGEEPRRMGGARALRLWRGRTGRSRRQTRGVELVGASHAICAA

SEQ ID NO: 112179 - protein, 103 aa, Oryza sativa
  unsure (1)..(103): unsure at all Xaa locations
  Clone ID: PAT_MRT4530_16089C.1.pep
MEVRRPAGDEAAATQKGRPAAAAGARRXATPASCAASTAACQRRRPARSRWRRRTLLLLLLPPGTRSRHIKGSTSWDLSTAIAAIKSGIKACNFGIQQKQARN

SEQ ID NO: 112180 - protein, 1789 aa, Oryza sativa
  unsure (1)..(1789): unsure at all Xaa locations
  Clone ID: PAT_MRT4530_1608C.1.pep
MSNEVNHVGKAPMFNGTNYSTWKIKMSTHLKAMSFHIWSIVDVGFAITGKPLTEIDHRNLQLNAQAMNALFNSLSQEEFDRVSNLETAYEIWNKLAEIHEGTSEYKDAKLHFLKIQYETFSMLPHESVNDMYGRLNVIVNDLKGLGTNYTDLEVAQKMLRALPEKYETLVTMLINSDMSMMTPASLLGKINTNDMYKLKKKEMEEASPSKKCIALQAEVEDKGKGKVNEANEDLEEEIALLARRFNDLLGRRKERGRGSNSNRRRNRRPNKTLSNLRCFECGEKGHFASKCPSKDDDGDKSCKKKSGGYKLMKKLKKEGKKIEAFIGEWDSNEESSASSGSEEEGGDDASSKKKKMAVVAIKEALSLFAPLCLMAKGSSKVTSLSDNESDDDCDDVSYDELVSMFEELHAYSEKEIVKFKALKKDHASLEVLYEELKTSHERLTISHEKLKEAHDNLLSTTQHGALIDVGISCDLLDDSATCHIAHVASSSISISCDDLVDMSSSSSCISICDASLVVENNELKEQVAKLNKSLERCFKGKNTLDKILSEQRCILNKEGLGFIPKKGKKPSNRATRFVKSNGXAHDGSIVARYVGSPILGGELPHRWEPXVLDSGCTQHMTGDRAMFTTFEVGGNEQEKVTFGDNSKGKSIVAELFKKFAKRAQNEFSCTLVKIRSDNGSEFKNTNIEDYCDDLGIKHELSATYSPQQNGVVERKNRTLIEMARTMLDEYGVSDSFGAEAINTACHATNRLYLHILLKKTFYELIVGRKPNVAYFQVFGCKCYIYRKGVRLTKFESRCDEGFLLGYASNSKAYRVYNKNKGIVEETADVQFDETNGSQEGHENLDDVGDEGLMRTMKNMSIGDVKPIEVEDKPSTSTQDEPSTSAMPSQAQVEVEEEKVQDPPMPPRIHTALSKDHPIDQVLGDISKGVQTRSRVASICEHYSFVSCLEPKHVDEALCDPDWMNAMHEELNNFARNKVWTLVERPRDHNVIGTKWVFRNKQDENGLVVRNKARLVAQGFTKVEGLDFGETFAPVARLEAIRILLAFASCFDIKLFQMDVKSAFLNGEIAELVFVEQPPGFEDSKYPNHVYKLSKALYGLKQAPRAWYERLRYFLLSKDFKIGKVDTTLFTKIIDDDFFVCQIYVDDIIFGSTNEVFCKKFGDMMSREFEMSMIGELSFFLGLQIKQLKDGTFVSQTKYIKDLLKRFGLEDAKPIKTPMATNGHLDLDEGGKPVDLKLYRSMIGSLLYLTASRPDIMFSVCTCARFQAAPKECHLVAVKRILRYLKYSSTIGLWYPKGAKFKLAGYSDSDYAGCKVDRKSTSGSCQMLGRSLVSWSSKKQNSVALSTAEAEYVSAAMPPRTRHGRREPMPNPVNENEESSGDEYVQSDDDNMENVEGDEMEVSDDGDDNGSGNGEDDEASDDGSPLDSTIQFVFNLRNAQQYTILRHHDQFRRPNDCNDPRFHTQFQKSVYEQVYANKAFAEHKWISWRHIGETPEFEDLQEMFWTVGIDRIVTMKQSFDEDLIRQFYATVWVSGDCDAMKWMSGTLQCSINRREFKELLHIRFNNGDDLHDEHTHNPFPIDHFSQIYEDGGRHTYGKVAVRATILPRCGNNDDIRGVAWHVIDAILDGRRFDVINLMMKEIAISKGTIGQGIYYAPYIMRLIQSKLGQIGHNLKEHKEYKPRLQLSSPKAPRVRQPTFDQGASSSAAPPPPHGSDPSAFFHPQYAYFGMQPNEFFNPVLGAINTLSESIQRLSTGHEALHEDVRGLRTDVGNLNTSVGRLHTRVGVLDS

SEQ ID NO: 112181 - protein, 171 aa, Oryza sativa
  Clone ID: PAT_MRT4530_16090C.1.pep
RLYRQRSRGFAVKFYTEDGNWDLVGNNTPIFFVRDPILFPSFIHTQKRNPATHLKDPNMVWDFFTLRPESTHQAMFLFSDRGTPDGYRFMNGYGSHTFKLINAKGEAVYCKFHLKSGQGIKNLPVDKAAKISGDDPDYSIRDLYNAINNGDYPKWNFFIQVMTFEQAEKHR

SEQ ID NO: 112182 - protein, 77 aa, Oryza sativa
  Clone ID: PAT_MRT4530_16091C.1.pep
SPTDGPAAQRRRQRRTKRARGARDHSVLIMPRAVGVRWRSDRVLPAAAHRRAGAGGGHTKTGTRGAVHPYVRGARRH

SEQ ID NO: 112183 - protein, 55 aa, Oryza sativa
  Clone ID: PAT_MRT4530_16092C.1.pep
MLRVSEDGGRRRRREAHAAGYGELGRALLDLQAAADQVFDAVTARTAEEREKLSA

SEQ ID NO: 112184 - protein, 63 aa, Oryza sativa
  Clone ID: PAT_MRT4530_16093C.1.pep
VWMDRNLSEARLPCGLTRISLRMSKCGYLECPVDTVYVLYIAPVPYFLVNEQLTSASCVRSAI

SEQ ID NO: 112185 - protein, 44 aa, Oryza sativa
  unsure (1)..(44): unsure at all Xaa locations
  Clone ID: PAT_MRT4530_16094C.1.pep
RFPVPFKLQSKRAXLYNLXIXYXXINDXFLGIGRSXTRDGGELT

SEQ ID NO: 112186 - protein, 101 aa, Oryza sativa
  unsure (1)..(101): unsure at all Xaa locations
  Clone ID: PAT_MRT4530_16095C.1.pep
LANSSIQPXAGSYGQASVXFAPRPSISDQPKNTFFSNALSXRGRRYLQRYHFTQGSGNGGQSAXSTSGGQNTETNCGGSNDTLMDMVRDSAGHEYSRCGLR

SEQ ID NO: 112187 - protein, 167 aa, Oryza sativa
  unsure (1)..(167): unsure at all Xaa locations
  Clone ID: PAT_MRT4530_16096C.1.pep
MENACFPNTMPSIDCCIFAVHVIDMAILNDLECLCGLKDERSFFDNGLSLQDMADFYSSSICQGQDLINAQVVVDACEEKGVYLASLEFDQRLSIWILNESCARGPWILQDVNYHLYCQMXPGEWNLYDWEYDPSHPDYQNDSGEALDENNFKWNSDDDNVVDTQGY

SEQ ID NO: 112188 - protein, 339 aa, Oryza sativa
  Clone ID: PAT_MRT4530_16097C.1.pep
MATGAEAAAALSPPGAAGAAVMGVFKYNFAAQFLSRVTPFLYNSWFVRQLSADDCAAYALQLPLFINCVLFLSREGFRRACLRNDSDSGNAISDEEILKVAWMIVPFGILVSFISSLFVLRVKKLRLSDTYAKATLIIGQTFRKLMLQEGEKFVLVWFDTPYNQAAYGLVDKLGSLVVRIVFLPFEESSYATFAQLASGQNPQNISNLEGSLLGALKLIMLIGTSEAFLHAVANEDKLKQSNDMLLLFSAIYIVLNVVLIKSADMLLRITYSAAFIKDYFKGSFSFRHCLPAGWGVLLISGLTTAFSERMFLNRNRFKQTLPIHMAIGIMCLGFSSLEM

SEQ ID NO: 112189 - protein, 158 aa, Oryza sativa
  unsure (1)..(158): unsure at all Xaa locations
  Clone ID: PAT_MRT4530_16098C.1.pep
LLPFRLSAMMDCDKQLLHMCMLFTGQTFRKLMLQEGEKFVLVWFDTPYNQAAYGLVDKLGSLVVRIVFLPFEESSYATFAQLASGQNPQNISNLEGSLLGALKLIMLIGLVVISFGPSYSYTLLRLLYGARYSDGDATXILRYYWFYVICLAMNGTSE

SEQ ID NO: 112190 - protein, 348 aa, Oryza sativa
  Clone ID: PAT_MRT4530_16099C.1.pep
MQIREGGPRRGAASAARSPMSAMMLAMFATMASFYVAGRLWQDAQSRVYLIKELDRRTGQGHSTISVDDTLKVVACRQQGKRLASLEMELAAAKHEGFVGKYTYETNGTNSRKRPLIVIGIMTSFGRKNYRDAVRKSWLPTGSMLKKLEEEKGIVVRFIVGRSVNRGDASDREIDEENRSTKDFMILDDHTESEEESPKKTKSFFANAAESFDAEFYAKVNDDIYINVDTLSAMLKEHWDKPRVYIGCMKSGEVFSESFPKNRTHKWYEPEWWKFGDGKTYFRHASGEMFVISKAVAQFISINRSVLRTYAHDDVSVGSWLIGLAVKHVNEAKLCCSSWPSGALCSAL

SEQ ID NO: 112191 - protein, 72 aa, Oryza sativa
  Clone ID: PAT_MRT4530_1609C.1.pep
MRQWGFLSRDLAPYRRGVGGGAGSGKKVGGGGVAVAAGGGRAYVWPCELVSAVEVVGSGVGVRVEDFSGGDG

SEQ ID NO: 112192 - protein, 42 aa, Oryza sativa
  Clone ID: PAT_MRT4530_160C.1.pep
LCDALRILPNLHTNHDHNHDGAYTEDTIHCYPHMKTLIAIHA

SEQ ID NO: 112193 - protein, 143 aa, Oryza sativa
  Clone ID: PAT_MRT4530_16100C.1.pep
TRPGLLGPPNSQVPHSAAASVPAGPPLCPDFRGRPAPERRCHLALPPPPPVWPRVLRPPRRYLLRAPPVPPSWESSSTTSVRALSPSSFFDPSLRVISGGGGSKCGLVVAAAQFLFRGTPFLYNSWFVRQLNADDCGGRGSPS

SEQ ID NO: 112194 - protein, 207 aa, Oryza sativa
  Clone ID: PAT_MRT4530_16101C.1.pep
MVLMAAVDDHDRHRAGNSSSPSEDSPAPAPAPAPAPAPPQPSRTRLHSFSFPTLSWGTHRLLRCSKNPASSPPPAAPDTPSPDKEKAAHRSTDGVGGGCSPQRGPQRPWNLRTRRSATAAPRPEGSDDAADAAPDRAPSPLAATKKRVFSIVLSKEEIGQDFKAIRGTRPPRRPKKRPRTVQRQLDLLYPGLCLADLTPETYKIEER

SEQ ID NO: 112195 - protein, 395 aa, Oryza sativa
  Clone ID: PAT_MRT4530_16102C.1.pep
MGHLRDAANRLRVPQPSPPPPAAADDDKAREPTCRDGLRARVQGPASASTSRPATAASGRCSEAVEPATVDTAAPSRLHVVGGGGARAVLVPTLESAPFLVALTPEEIEEDIYAPPSPSLPGSHQQGVVIDRENDENIVIDGERGLLEEMSMNDEVSLLEDGEVKPLVRVESMNGLETKLWRWWRSPALPRWPSSGVDSGAHGTRGAAVVASAWRGSNTGEAGGAGDPRGEGEAAAALRLGRPTGGEEAGGRRRFGDASTEAMPPSTSSLSPPWWPSSPLSAERSRQRRLSPPRAAELDAGDAAGGGAVSRHVGAVDDPCVTVNNTAKATGDRVRQELERQEAGTGTMTVALRDQASSPGAQEASIHGGELGSMPASILTMYHNEQYSWKEHPQA

SEQ ID NO: 112196 - protein, 214 aa, Oryza sativa
  unsure (1)..(214): unsure at all Xaa locations
  Clone ID: PAT_MRT4530_16103C.1.pep
HASARSSGTTVTFXIIDGLFITVASVGDSRCVLEAEGSIYHLSADHRFDASKEEVDRVTESGGDVGRLNVVGGAEIGPLRCWPGGLCLSRSIGDQDVGQFIVPVPYVKQVKLSTAGGRLIISSDGVWDVLTAEVAFNCSRTLPPEAAAEQIVKEAVQQKGLRDDTTCIGXDILPDKAXLTMPHTKKQPGXGVFLKNMFXKKTPSDSSSHTDREY

SEQ ID NO: 112197 - protein, 108 aa, Oryza sativa
  Clone ID: PAT_MRT4530_16104C.1.pep
RHLGYYENSGDELDAAAAAIAVELVAQREEQADRDVAVCLRGCRQIRNASPRYRGHDAVQIHLLLAGLPLRCTRRSSSSRNASSAAISTCSPAGRAPPPASLAAGKSS

SEQ ID NO: 112198 - protein, 407 aa, Oryza sativa
  Clone ID: PAT_MRT4530_16105C.1.pep
MEGMLPSDPPGSDDDGNGTNMWTGQKDKLALDPCVSGDTNENAHACTSLTAVHQVLEESTNNTVHAMDMGVVTRQDDPLKASEEDINQHKDEQELWGPNVQTSQDDYFDYVKQLSPNSRRIDKWSLLSHDEMIEVKERHARYRIRFCKMLNKEFEDTMKDPAEYSRGELLKENYFLRYERDETLGWYFHPVHTWLAGLNDYQKLVLVNHDDSTEFLARDDYHSCFNTYEVDEDYVKYCEELPKKIKWIGDYVDLDRSSQEWSKMDNTTFFQALKIATNFCHMTVGLAQFAYMEYVWDLREISRLKEWPYFLHEIWKLVAKQKMNFNDALKVVYEMDMFHSFKFAVEAELNGDKLFGLEYRFSMCSKDISGDVEEGKALDLITKAVYREVISETLKLKMFLILHPAQF

SEQ ID NO: 112199 - protein, 107 aa, Oryza sativa
  Clone ID: PAT_MRT4530_16106C.1.pep
GEAQATSDLTGGWVPYNGVGGHKQQLYMPGPLRKGPGPPPPLGNRQAAFPIRSAHCLPLSLRGRLRVWTSVPAEDARLVGQRGLRTVLACACRIWPGSKLDKAGLPS

SEQ ID NO: 112200 - protein, 102 aa, Oryza sativa
  Clone ID: PAT_MRT4530_16107C.1.pep
HMAGGQVQCRQAESCGARMGHCTVLSDRQALLSHRQRQSGGSNTQMINTIESSGSIASHKGIPQSRSQSRTAQLSGITSGCVHRITPLALLNQLIQIINILN

SEQ ID NO: 112201 - protein, 167 aa, Oryza sativa
  Clone ID: PAT_MRT4530_16108C.1.pep
MRQLLALQFKKQIGIDNAGKYPRGEALLPLSLGVARAGPLLLLPSASPPPERPLAKSGGRMDGGGGTPCLLSQARRLGALPRRREDPKWWSSATSFDDGGDRSGPLMVGSGVPAGVHTEVVGVRMEEPGGALAGGRRRVGKAATTVTLGPMMGTASSGAPWPDPPSG

SEQ ID NO: 112202 - protein, 383 aa, Oryza sativa
  Clone ID: PAT_MRT4530_16109C.1.pep
MAPSSSSCHDAAASMLLCAEDNSSILWLEDEEGEVGERRSGGCRSMVGDLAAGGGGGSGGGGVEEEEDMFPRQSEECVASLVEREQAHMPRADYGERLRGGGGDVDLRVRSEAIGWIWEVYTYYNFSSVTAYLAVNYLDRFLSQYELPEGRDWMTQLLSVACLSIAAKMEETVVPQCLDLQIGEPRFLFEVETIHRMELLVLTNLNWRMQAVTPFSYIDYFLRKLNSGNAAPRSWLLRSSELILRIAAGTGFLEFRPSEIAAAVAATVAGEATGVVEEDIAEAFTHVDKGRVLQCQEAIQDHHYSMATINTVQPKPASTRRGSASASSSSVPESPVAVLDAGCLSYKSDDTDAATIASHGGGRRKSCFDSSPVTSKKRRKLSR

SEQ ID NO: 112203 - protein, 111 aa, Oryza sativa
  Clone ID: PAT_MRT4530_1610C.1.pep
RVRADAAVHALPAPVCPSRRIIRSGGLHRRSRSRRRRGTYAAPTTTKRPGWPSVPIIVAASRSGTFITFMASGVTSWRRRCQGVPTCVACVPCRLDIVIQDLDGHASAHAS

SEQ ID NO: 112204 - protein, 119 aa, Oryza sativa
  Clone ID: PAT_MRT4530_16110C.1.pep
MEPCMRGRRRGRAWLGGRHTLASSNGRWAGRGRPRVRYRAQGGPGLLANTLKKCMVAVSEQAARGRRRGHGPWRDRVMGRAEEEDKKVAGQDQKERGRMMWSIWTVAHGNFQGRVWNRI

SEQ ID NO: 112205 - protein, 159 aa, Oryza sativa
  unsure (1)..(159): unsure at all Xaa locations
  Clone ID: PAT_MRT4530_16111C.1.pep
TSCSDWVVNLTELISVFGADCTVRAIIGSRFEHRDAYLRMLLVXRLKIVPGMTLTDLFPCSRLALILIRVPGRIEHHRQGMQRFIDAISXEHQEKRAADVVNDDDDEDEDFLDVLLKLQKEMGSQHPLTTANMKTVMLDMFSAGSEWSATVLQRTMAEL

SEQ ID NO: 112206 - protein, 100 aa, Oryza sativa
  Clone ID: PAT_MRT4530_16112C.1.pep
SDLTPKGMRVPGASIVHWKFAFKCREVYRARCNFIRVGVRRLIGQSGSCTRVSIGLDRKRSINRESICDAGDPRGVLYIIGLRYTYIGNQSKLQSLKNKN

SEQ ID NO: 112207 - protein, 33 aa, Oryza sativa
  unsure (1)..(33): unsure at all Xaa locations
  Clone ID: PAT_MRT4530_16113C.1.pep
SLCNFRKLKVIKKSXCSSTKLLALHNHRKRYDP

SEQ ID NO: 112208 - protein, 107 aa, Oryza sativa
  Clone ID: PAT_MRT4530_16114C.1.pep
IHNRIFCIVGQRYKDRRECTLCHCVAFLSVQRFTTDIASFYNIPTILLIVIQYAHRFSCFSKLSKTPLETLWFSNLGINLEQYRKEHHCTSKFGNHEGTIQCINVDQ

SEQ ID NO: 112209 - protein, 295 aa, Oryza sativa
  Clone ID: PAT_MRT4530_16115C.1.pep
MGSDFKAIPLIDISPLVGKIDDPSMVNDEDLLQVVQMLDDACREAGFFYVKGHGIADSLMKQVRDVTQKFFQLPYEEKLKIKMTPQSGYRGYQRVGENITKGKPDMHEAIDCYTPIEPGKYGDLAKPMVGSNLWPKYPSNFDVLLENYISLLRDLSRKIMRGIALALGAPVDAFEGHLFADLLTLVNQDDDICALEVRNQSGEWIYAKPIPGTFVCNIGDMLKVWSNGIYQPTLHRVVNNSPRYRVSVAFFYESNFDAAIEPVEFCRERTGGVAKYEKVVYGEHLIKKVLNNFIK

SEQ ID NO: 112210 - protein, 129 aa, Oryza sativa
  unsure (1)..(129): unsure at all Xaa locations
  Clone ID: PAT_MRT4530_16116C.1.pep
GAASPRSLARVVLCSSAHRACSLDDDGVLKRRPRRIRWWGRRQRRIRRRARATAANPVVGRAVAVNPEAGXGDGGESSGGGGESKGGEGGDGSVAAANPEAGSGDGDRSGGGEGGGGGEGGGDGDGGRG

SEQ ID NO: 112211 - protein, 812 aa, Oryza sativa
  Clone ID: PAT_MRT4530_16117C.1.pep
MPSPGPAARPTPPRPSFFIQITAFSARTTTATALGSESEEKERGKGGAAVPALLAAIRLLHSSISCIAAVDAATDTRHSSKTNQVWSNGIYQPTLHRVVNNSPRYRVSVAFFYESNFDAAIEPVEFCRERTGGVAKYEKMDLDSTHQYIVHQRTRTLGVLAVVLAIIRWRRRIRNRRHPRKYGPLVDRDLVRKTRLDDLYNGSDTTCISQLRMRKEVFWKLASKLRDNGLLCDTIHVSVEEQLAMFLHTVGHNLRNRVIGFYVIRSSETVSRYFNEVLKALCCLAKDMIQIRSIETHSKIVSNPGRFYPYFEDCIGALDGTHIPAFVPENIVNRFRGRKSYPTQNVLAAVDFDLRFTYVLAGWEGSAHDLVVLKAALRRSSGIQIPEGKYYLADAGYAARPGILPPFRGVRYHLKEYEGGKSPETPQELFNLRHSSLRTSVERAFGTLKNRFKVLASKPFFPYKVQVKIVIACCVLHNWILDNGPDNIIYDEARWYIHNMDIGGSNKHGKGKSKARKGVGGSGVRSKPINWPPAFSEFLLDWYIEKKLELPPKGVIKKMHHTACTSAINAKYGSTYNVDQINDRGILSKPIQFFDKLQELFSGSSADGAFMEDPSSVADFDDEADELDNFNDMSTYAETKYPQGEDSDKLEADSDDCKEVAALNAATAALNAATSQVSSSHTSGLKPNKKSFKKCGKPKTLPQSHNDKGKLKAKSSSGLHDDDDIDVLITSTLVGIKDNLAKPIQTAAPQDPNAPLWDMLKKIALEPEDKMRVGLHLCKPEFQAHRSFLISMGQEYLERWVYKFLSGDDTGL

SEQ ID NO: 112212 - protein, 44 aa, Oryza sativa
  Clone ID: PAT_MRT4530_16118C.1.pep
MEMLAGGCRRGEMRGGPVPGRIEIWFSRSFLRSMVQINFYTVHT

SEQ ID NO: 112213 - protein, 38 aa, Oryza sativa
  Clone ID: PAT_MRT4530_16119C.1.pep
MKPLVKELTGGSAVADGRCRASEQAYKRGHGCGASVHA

SEQ ID NO: 112214 - protein, 81 aa, Oryza sativa
  Clone ID: PAT_MRT4530_1611C.1.pep
TLTHTLRREAIPRAFFVHGHDIRFPNLAKADLHFTGVYFNGEIHQKFLWRDEELFFSGLTQGTKTWIKRMGLWRGGATWAF

SEQ ID NO: 112215 - protein, 284 aa, Oryza sativa
  Clone ID: PAT_MRT4530_16120C.1.pep
MGQALGLVQVDQSTVAIKESFGKFDEVLEPGCHFLPWCIGKQIAGYLSLRVQQLDVRCETKTKDNVFVNVVASVQYRALAEKASDAFYRLSNTREQIQSYVFDVIRASVPKMNLDDAFEQKNEIAKAVEDELEKAMSTYGYEIVQTLIVDIEPDEHVKRAMNEINAAARLRVAANEKAEAEKILQIKRAEGDAESKYLAGLGIARQRQAIVDGLRDSVLAFSENVPGTSAKDVMDMVLVTQYFDTMKEIGASSKSSSVFIPHGPGAVKDIAAQIRDGQLQAKLI

SEQ ID NO: 112216 - protein, 304 aa, Oryza sativa
  Clone ID: PAT_MRT4530_16121C.1.pep
MGQALGLVQVDQSTVAIKESFGKFDEVLEPGCHFLPWCIGKQIAGYLSLRVQQLDVRCETKTKDNVFVNVVASVQYRALAEKASDAFYRLSNTREQIQSSYSSDYLLYVLPLLFNANRTFFLAVIRASVPKMNLDDAFEQKNEIAKAVEDELEKAMSMYGYEIVQTLIVDIEPDEHVKRAMNEINAAARLRVAANEKAEAEKILQIKRAEGDAESKYLAGLGIARQRQAIVDGLRDSVLAFSENVPGTSAKDVMDMVLVTQYFDTMKEIGASSKSSSVFIPHGPGAVKDIAAQIRDGQLQAKLI

SEQ ID NO: 112217 - protein, 78 aa, Oryza sativa
  Clone ID: PAT_MRT4530_16122C.1.pep
QINPHLGTLIKYHGSQYIWASADETGEGKTKQKFRKPARKKLCGWGSLGLKRGTGCPARNSLWRRGGLPGFPLVLSPL

SEQ ID NO: 112218 - protein, 840 aa, Oryza sativa
  Clone ID: PAT_MRT4530_16123C.1.pep
MSTSASPSAAPSAKYAEHLSNLVAVPSLSHENHYFLGPVGNPDPTEFIIGETNRIPFRLSNPDLGHWKNTFKSWPSLEKTSPEKSWITWFKRMSASKRVHWNEIGIGQALDLTIANSAKEEPLMAAASYFWSNTINAFLFNQGPMTLTLIVIIMITGLDVTSSANPMSLNTKNQYDFKTKSIGGWSGYVAAYMGQGSVTPREHVAFLLMWLEKFLFCGSSCGPTTNWQFVAEALEANKQFPLGKILLGYLYQMLNNASAKLAVGSVVGAVVNRPSVTEAEFPRLEPIIEDDEECTHRRCMSYGEYASTPADAGAKLSAELLKDWFCSFYEGFQKDARVWFPYEDSANLELPSDFRFEDINHERFQTSREVFIAAISPCILPVGIHQGRNVQASYEFYHPMSSARQLGLGQLPIGLFFADKIQCRGEISSTLMMDRLLNLQGPPLGSIENIELTTESSPPRQSNSGRDITYAPGLIPNGGGPSPPVIGYDAPKTSALLQGLIREPADAGKKRKTRSSAVDTLAPAPKKKIKKKAKPADDLPALDPSIKQALDEEEIGEDVDQAVAEISDTERTPSASPKQVPQTPSAPTHFTRKRKAAVKKKSAPMTSKPAPLVLADLFFFDIRDYLDEETEVDTTSKALVPLSDDVKKTLEDISHRLETSSLDSLVVDCGSIRTRLHEVYAQILDELADILTTAVYLEQHQFKLEKAKLRLAEHQERKDIEATIQANRQFVHEEKAKLDQLSKGPIKSNIDRLEARKIELLAQLQECNAELDLEHKRLADLPQSIEEQKARLKSAIKNVANMTKSLKVIPGTDAQDAQAIEEVEQIRQRAISAIQRYLSE

SEQ ID NO: 112219 - protein, 52 aa, Oryza sativa
  Clone ID: PAT_MRT4530_16124C.1.pep
MSPSLLNRHRRRRDIGRDDRLSDWTALASPAPSTLFGRLMDHVYAPYGTSSL

SEQ ID NO: 112220 - protein, 491 aa, Oryza sativa
  Clone ID: PAT_MRT4530_16125C.1.pep
MTPTLIDIIMITGLDVTSTANPMNLNMKNQYDFKTKSIGDLFPDVVPQTTESSPPRQSNSGRDITYAPGLIPNGGGPSPPVIGCDAPKTSALLQGLIREPSDVGKKRKTRSSAVDTLAPAPKKKIKKKAKPADDLPALDPSIEQALDEEEIGEDVDQAAAEDLADLFSFDIRDYLDEETEVDTTSKALAPLSDDVKKTLEDISHRLETSSLDSLVVDCDSIRTRLHEVQAQIPDELADILTPAVYLEQHQFKLEKAKLRLAERQERKDIEATIQANRQLVHEEKAKLDQLSEGPIKSNIDRLEACKIELLAQLQECNAELDLENKKLADLPQSIEEQKARLKSAIKNVADMTKYLKVIPGTDAQDAHAIEESSINLVLLALASSPPSSSVLNGASGRNVSRKWPRPRRAVGDHVGNREDEDDERQRGPPPPFPSPSHCREPLPPFPSSSHYREPPRPSRRHPSRRPPPSVRFRCVPMAAAAAIEKERKEKI

SEQ ID NO: 112221 - protein, 45 aa, Oryza sativa
  unsure (1)..(45): unsure at all Xaa locations
  Clone ID: PAT_MRT4530_16126C.1.pep
MACINRPVNFFTDXLFLLCESSLTQQLLSQSTSQWQSSPPGSPPG

SEQ ID NO: 112222 - protein, 624 aa, Oryza sativa
  unsure (1)..(624): unsure at all Xaa locations
  Clone ID: PAT_MRT4530_16127C.1.pep
MMSSSASPSAAPSAEYAEHFSNLVAIPSLSHENHYFLGPVGNPDPTEFIIGETNRIPFRLSNPDLGHWKKTFKSWPSLEKTSPEKSWITWFKRMSASKRVHWDEIGISQALDLTIANSAKDEPLMAAASYFWADDPTLIDIIMITGLDVTSSANPMSLNTKNQYDFKTKSIGVMKVVNRPSVTEAEFPRLEPIIEDDEERTHRRCMSYGEYASTPADARAKLSAELLKDWLCSFYEGFQKDARVWFPYEDSADLELPSDFRFEDINHETFQTSREVFTAAISPCILPVGIHQGRNIQASYEFYHPMSSARQLGMGQLPIGLFFTDKIQCQGEISSTLMMDRLLHLPGPPLGSIENIELAMFRSKNFDRWCGEWKLYLFHQPASIGLSPPVIGYDAPKTSALLQGLIREPADAXKKIKKKAKPADDLPALDPSIEQALDEEEIGEDVDQAAAEKRKAAVKKKSAPMTSKPAPPVLADLFSFDIRDYLDEETEVDTTSKALAPLSDDVKKTLEDISHRLEASSLDSLVVDCGSIRTWLHELEKAKLRLAERQERKDIEAKIQANRQLVHEEKAKLNQLSEGPIKSNINRLEARKIELLVQLQECNAELDLEHKRSFLEPTLKMPKP

SEQ ID NO: 112223 - protein, 246 aa, Oryza sativa
  Clone ID: PAT_MRT4530_16128C.1.pep
MASTDADEDQLLKSFLAEVSEAERDNEVLRILGCFKLNPFEHLKLSFDSSADEVKKQYRKLSLLVHPDKCKHPKAQEAFAALAKAQQLLLDPQERGYILDQVTAAKEELRAKRKKELKKDSASKIKSQVDEGKYEEQYERSEEFQKQLIIKVREILTDKEWRRRKMQMRISEEEGRLKKDEEETKEMWKKKREHEEKWEETRDQRVSSWRDFMKTGKKARKGEIKPPKLKTEDPNKSYVQRPVKRA

SEQ ID NO: 112224 - protein, 762 aa, Oryza sativa
  Clone ID: PAT_MRT4530_16129C.1.pep
MSTSASPSAAPSAEYAEHLSNLVAIPSLSHENHYFLGPIGNPDPTEFIIGETNRIPFRLSNPDLGHWKNTFKSWPSLEKTSPEKSWITWFKRMSASKRVHWDEIGIGQALDLTIANSAKDEPLMAAASYFWSNTINAFLFNQGPMTLTLIDIIMIMGLDVTSTANPMNLNMKNQYDFKTKSIREKFLFYGSSCGPTTNWQFIAEALEAKKQFPLGKILLGYLYQMLNNASAKLAVGSVVGAGGPWWLLQTWLNLIVMKVVNRPSVTEAEFPRLEPIIEDDEERTHRRCMSYRVYASTPADAGAKLSADLLKDWFCSFYEGFQKDARVWFPYEDSADLELPSDFRFKDINHERFQTSREVFIAAISPCILPVGIHQGRNIQASYEFYHPMSSARQLGMGQLPIGLFFADKIQCRGEISSTLMMDRLLSLPGPPLGSIENIELAMFRSKNFDRWWGEWKLHLFYQLASMYMTNLFPDVVPQTTESSPPRQSNSGRDITYTPGLIPNGGGPSPPVIGYDAPKTSALLQELIREPADAGKKRKTRSSAVDTSALAPKKKIKKKAKPADDLPALDPSIEQALDKEEIGEDVDQAAAEKRKAAVKKKSAPMASKPAPPVLADLFSFDIRDYLDEETEVDTTSKALAPFSDDVKKTLEDISHQLETSSLDSLVVDCGSIRTHLHEVQTQILDELADILTPAVYLEQHQFKLEKAKLRLAEHRERKDIEATIQANRQLVHEEKAKLDQLSEVPIKSNIDRLEARKIELLA

SEQ ID NO: 112225 - protein, 539 aa, Oryza sativa
  Clone ID: PAT_MRT4530_1612C.1.pep
GLQEFGTRQKNGEESSAGNKRKQPPSARSKSKKKKKKLKDSDIYLASGAVARVRWFRVVLDEAQTIKNFRTQVAKACCGLRAKRRWCLSGTPIQNAIDELYSYFHFLKYDPYSTYNSFCTMIKHPIARNAVHGYKKLQTVLRIVLLRRTKETLIDGEPIIKLPPKTINLDKVDFTKEERAFYLTLEERSRQQFKAYAAAGTLKQNYANILLMLLRLRQACDHPLLVKGHQSEYKGDGSIEMAKQLPKEMIINLLAKLEVGEFCSVCSDVPEDAVVTMCGHVFCYQCIYERITTDENMCPSPNCGNTLSTDSVFSSGALRICMSGVSSSHASGSSSLDDESSSISQTSYISSKIQAAIDILNSIINTYALTDSDTVESNPSRVAPVKAIVFSQWTGMLDLLELSLNSNLIQYRRLDGTMSLNSRDKAVKDFNTDPEVRVMIMSLKAGNLGLNMVAACHVILLDLWWNPYAEDQAIDRAHRIGQTRPVTVSRLTIKDTVEDRILALQEEKRAMVSSAFGEDKSGGHATRLTVDDLKYLFRF

SEQ ID NO: 112226 - protein, 38 aa, Oryza sativa
  Clone ID: PAT_MRT4530_16130C.1.pep
MSTGGGVNGGAPGTGVAPIDNTNGGSSVSQSSGGTFTG

SEQ ID NO: 112227 - protein, 692 aa, Oryza sativa
  unsure (1)..(692): unsure at all Xaa locations
  Clone ID: PAT_MRT4530_16131C.1.pep
MSISASPSAAPSAEYAEHLSNLVAIPTLSHENHYFLGLVGNLDPTEFIIGETNRIPFRLSNPDLGHWKNTFKSWPSLEKTSPEKSWITWFKRISASKRVHWDEIGIGQALNLTIANSAKDEPLMAAASYFWSNTINAFLFNQEPMTPTLIDIIMITGLDVTSSANPMSLNTKNQYDFKTKSIGGWSGYVTAYMGQGSVTPREHVAFLLMWLEKFLFCRLSCGPTTNWQFVAEALEAKKQFPLGKILLGYLYQMLNNASAKLAVGSIVIAGGPWWLLQTWLNLIVMKVRTTKNALIADATESSPPHQSNXGRDITYAPGLIPNGGGPSPPVIGYDAPKTSALLQGLIREPADAGKKRKTRSSAVDALAPAPKKKIKKKAKPADDLPALDPSIEQALDEEEIGEDVDQAAAEKRKAAVKKKSAPMTSEPAPPPPSPPIQQASSDRTPSAVGCRHVEEEEQLAALAIPVLADLFSFDIKDYLDEGEEDVTSKALAPLSDDVKKTLRSILDRLEASSLDSLVVDYGPIRARLHEIQALIPDELADVLTPAVYLEQHQFKLEKAKLRLAEQRERKDIEGTIQANRQLVHEEKSKLDQLSKGPIKSNIDRLEARKIDLLAQLEECNAELDMERKKLADLPQSIEEQKARLKXVIKHVAELTKSLKVIPATDAQDAQAIEEVEQIRQKAISAIQQYLSQ

SEQ ID NO: 112228 - protein, 609 aa, Oryza sativa
  Clone ID: PAT_MRT4530_16132C.1.pep
MSASKRVHWDEIGIGQALDLTIANSAKDEPLMAATSYFWSNTINAFLFNQGPMTPTLIDIIMITGLDVTSTANPMNLNMKNQCDFKTKSIGVGIHQGRNIQASDEFYHPMSSARQLGMGQLPIGLFFADKIQCRGEISSTLMMDRLLSLPGTPLGSIENIELAMFRSKNFDRWWDNRILSSSSKQQSNSGRDITYALGLIPNGGGPSLPVIGYDAPKTSALLQGLIREPADAGKKRKTRSSDVDTSAPALKKKIKKKAKLADDLPALDPSIEQALDEEEIREDVDQAATEEGFHLPLLVKEEEKEAEWRVESLKPHVGSSDEDAFTRCSGYLFEEGAATEGELPTAYDLAGIGAVYRRRPLLVVRRALQIGTSFGRWFTLRYLDRVNERSDDMFEIRAAQLRRILLELGPDVIPPAYLDELSLLQDRIAPFSTEVAFNIIETELGLPLDMIFSEISPEPVAAASLGQVYQARLRSNRKVVAVKVQRPGVQAAISLDIYILRFLAGVARKAGKLNTDLQSLRARTEQSLTRDQQEETDSSKFAIKQVLSFTLTEQGAFVKDLLLQEIAKIPGYNSTEENEGDSTDEISLVLYEMRSLPELLPVLSVIPEI

SEQ ID NO: 112229 - protein, 754 aa, Oryza sativa
  Clone ID: PAT_MRT4530_16133C.1.pep
MSTSASPSAAPSAKYAEHLSNLVAVPSLSHENHYFLGPVGNPDPTEFIIGETNRIPFRLSNPDLGHWKNTFKSWPSLEKTSPEKSWITWFKRMSASKRVHWNEIGIGQALDLTIANSAKEEPLMAAASYFWSNTINAFLFNQGPMTLTLIVIIMITGLDVTSSANPMSLNTKNQYDFKTKSIGVVNRPSVTEAEFPRLEPIIEDDEECTHRRCMSYGEYASTPADAGAKLSAELLKDWFCSFYEGFQKDARVWFPYEDSANLELPSDFRFEDINHERFQTSREVFIAAISPCILPVGIHQGRNVQASYEFYHPMSSARQLGLGQLPIGLFFADKIQCRGEISSTLMMDRLLNLQGPPLGSIENIELTTESSPPRQSNSGRDITYAPGLIPNGGGPSPPVIGYDAPKTSALLQGLIREPADAGKKRKTRSSAVDTLAPAPKKKIKKKAKPADDLPALDPSIKQALDEEEIGEDVDQAVAEISDTERTPSASPKQVPQTPSAPTHFTRKRKAAVKKKSAPMTSKPAPLVLADLFFFDIRDYLDEETEVDNTSKALAPLSDDVKKTLEDISHRLETSSLDSLVVDCGSIRTRLHEVYAQILDELADILTTAVYLEQHQFKLEKAKLRLAEHQERKDIEATIQANRQFVHEEKAKLDQLSKGPIKSNIDRLEARKIELLAQLQECNAELDLEHKRLADLPQSIEEQKARLKSAIKNVANMTKSLKVIPGTDAQDAQAIEEVEQIRQRAISAIQRYLSE

SEQ ID NO: 112230 - protein, 233 aa, Oryza sativa
  unsure (1)..(233): unsure at all Xaa locations
  Clone ID: PAT_MRT4530_16134C.1.pep
KHFLTQQRGGATHFKKAFFAWGALGPFFSQIFSPVRFPGKGPFTGKISRGPKTQIFPRGGALWGLFGAQTQNGGGHPPGVPPGGPKKPGPRGGFPRGYPGKPGKTQKRVLTHLFCGGGFPFNSRGGRGGPPRGGAFFPPILGPKGGPFPQNFPKKXGAPGVYRGGFGGLKTGPRGPFSPFPPTNTGGKTGGGPKKTRGPPGENPFPGPPRGPPGGPQKKGPGVSRGFPGAPKN

SEQ ID NO: 112231 - protein, 131 aa, Oryza sativa
  Clone ID: PAT_MRT4530_16135C.1.pep
MAHGGDGARRRAAAQLGGGAAARRLGGGLAARERGREGGGEASSTTIDDGERRRWQDGLRDDLKNKMREVREREGGRSELGRWPKAATMAMLTGARGMADSGCGFGRLRGGRGGARGGEHNGVDGAARRGG

SEQ ID NO: 112232 - protein, 299 aa, Oryza sativa
  Clone ID: PAT_MRT4530_16136C.1.pep
KRKAAVKKKSTPMTSKPAPPVLADLFSFDIRDYLDEEIEDDTTSKALAPLSDDVKKILEDISHRLETSSLDSLVVDCGSIRTWLHEVQAQISDELAGILTPAVYLEQHQFKLEKSKLRLAERRERKDIEATIQATRQLVHEEKAKLDQLSEGPIKSNIDWLEARKIELLAQLQECNAELDLEHKKLADLPQSIEEQKAKLKSAIKNVADCHAQKFPNRIPSRMCIKTPVQDQPGYTNDNVDIQILREHHSTGILDGTDEAYSSGKPSSDTYPSSGVGKNRARLSPAIHLNYPSSTDYTR

SEQ ID NO: 112233 - protein, 289 aa, Oryza sativa
  Clone ID: PAT_MRT4530_16137C.1.pep
MSNGGGVNGGAPGTGYAPIDNTNGGSSASQSSGGTFTGSVDNRNKPGGNMNDIFIFNDVISSLGLLEIPLSGRSYTWSDMQADPLLEQLDWVFTSANWISVFPNTQALVTAKNTSDHAPIKIQIATSIPKSNVFRFENYWLKQPGLLDQVILFLDKLEELRLLNVPELRFRLIFKDHVAHLLHGRELYWKQRFKQNSVLLGGENTKFFHAMATERICQEIKPQAQMGSMDVSSNPAGQLLLKIFIGCMCADFWGGSIDLSAINYIINTWSHLSYAHNVLEYMLQLATNL

SEQ ID NO: 112234 - protein, 568 aa, Oryza sativa
  Clone ID: PAT_MRT4530_16138C.1.pep
MMSSSASPSAAPSAEYAEHFSNLVAIPSLSHENHYFLGPVGNPDPTEFIIGETNRIPFRLSNPDLGHWKKTFKSWPSLEKTSPEKSWITWFKRMSASKRVHWDEIGISQALDLTIANSAKDEPLMAAASYFWADDPTLIDIIMITGLDVTSSANPMSLNTKNQYDFKTKSIGVMKVVNRPSVTEAEFPRLEPIIEDDEERTHRRCMSYGEYASTPADARAKLSAELLKDWLCSFYEGFQKDARVWFPYEDSADLELPSDFRFEDINHETFQTSREVFTAAISPCILPVGIHQGRNIQASYEFYHPMSSARQLGMGQLPIGLFFTDKIQCQGEISSTLMMDRLLHLPGPPLGSIENIELAMFRSKNFDRWCGEWKLYLFHQPASMYMTDLFPDVVPQTTESSPPRQSNSGGLSPPVIGYDAPKTSALLQGLIREPADADPSIEQALDEEEIGEDVDQAAAEKRKAAVKKKSAPMTSKPAPPVLADLFSFDIRDYLDEETEVDTTSKALAPLSDDVKKTLEDISHRLEASSLDSLVVDCGSIRTWLHEVQAQIPDELADILTPAVYLEQH

SEQ ID NO: 112235 - protein, 100 aa, Oryza sativa
  Clone ID: PAT_MRT4530_16139C.1.pep
MQTERDSIGLNANVRGTSCQAYGGNLLGTMLHDVVTEGTYLCKSSPQLSAERQTSIDLGAILHKLGSRCAYGDIGLLVWEYFLPCDGLATGTHVRFPTST

SEQ ID NO: 112236 - protein, 231 aa, Oryza sativa
  Clone ID: PAT_MRT4530_1613C.1.pep
RRVSTEGQNMRMELSDKFNNAIKDVSVKLDEQKNECIAQLAQNNLLRSKLKDLADQYNITQQKYAHQLKEKMLELELADLKMQQHQEKTAQEQTQMQLYADQVSQLMSTEKNLRLQLAADGERFQQFQDALTKSNEVFETYKKEMEKMVKLIKDLKKDNEFMKSKCENSDVALVKLIEERELMKKQVDKFKNQKEKLESLCRSLQAERKQSPSGGTPDATSNETNLATIES

SEQ ID NO: 112237 - protein, 323 aa, Oryza sativa
  Clone ID: PAT_MRT4530_16140C.1.pep
MPRYDDRYGSTRLYVGRLSSRTRSRDLEYHFSRYGRIREVELKRDYAFIEFSDPRDAEEARYNLDGRDVDGSRILVEFAKGVPRGPGGSREYMGRGPPPGTGRCFNCGIDGHWARDCKAGDWKNKCYRCGERGHIERNCQNSPRNLRRERSYSCSPSPRRGRGRSRSYSRSRSRSRSYSRSRSRSLSGSPRARRELERSRSLSYSRSPRRSISPAANEKKRSPTPDGSRSPRSPQDQVSPPPKDNAERNGSDHGDSPRGRENSRSPSDGYRSPAAANGRSPSPRNNGSPSPMDNGSRSPRDGNGDGGSRGGSRSPRPSESPEA

SEQ ID NO: 112238 - protein, 70 aa, Oryza sativa
  Clone ID: PAT_MRT4530_16141C.1.pep
THRLKCRDERERKGPPYMFLHHHTAMDMPQELQALLMYLSPHTVCPIYKISYYIPPKEGDQEAKKPSRAS

SEQ ID NO: 112239 - protein, 146 aa, Oryza sativa
  Clone ID: PAT_MRT4530_16142C.1.pep
WSAASSMDLTDLSERHDAERSGPLRSNNIMDRTRCDLCERLLSKRSPWGSRRIVRTGDLPVAGVLPCCHVYHAECLERTTPKGQKHDPPCPACDRLSGKDTEQWSICRLRNGFPSLRSLGEGPSRVWSCAQAGDCVAGAVQIPRAS

SEQ ID NO: 112240 - protein, 305 aa, Oryza sativa
  unsure (1)..(305): unsure at all Xaa locations
  Clone ID: PAT_MRT4530_16143C.1.pep
GLQNSGGSTSSRSDGSEYDIVPKSYSSTPRNFPSRRSFLSKPIHPLSFAEHALEGQETDSPVANASTSSPMPSEFKAIGXIRPSGLMDYAYASGSHXXESANWSAASRLYLTDLSERHDAERSGPLRSNNIMDRTWRHSPSSRTAIPDERGKQQDASPHPPSSQSREWPWGAXRIVRIADLRVVGVLPCCHVYHAECLERTTPKGQKHDPPCPACDRLSGKDTEQWSICRLRNGFPRLRSLGEGPSRVWSCAQAGDCVAGAVQIPRASSISLLSRSGHKRHHAASKGESGKDWAETSSSSRTACM

SEQ ID NO: 112241 - protein, 134 aa, Oryza sativa
  Clone ID: PAT_MRT4530_16144C.1.pep
MVYWRSKSGGGGASPSRANGGEDDQVPRGHVPMVAGCGGGDGDGGERVMVPVRLLGDPCIAELLDMAAQQYGYGQPGVLRVPCDAGHFRRVVERALRKDGGRLANNKGVCRAKLGAKTLICTRLPTTLEEDLVF

SEQ ID NO: 112242 - protein, 160 aa, Oryza sativa
  Clone ID: PAT_MRT4530_16145C.1.pep
MARTGRRGAAPPLLLAATTPTGFCETNGVDAMEELPVELELRRPLRRRVGRRHVQQREGDIAWRGQTEWRHQWSWHGKSCPMAIVAVEIVNRAPMWQFCHARSYRESESKRVQALEPLFLFLSSTSSGVSTPAPARDECLEALIIPTGRGEACDRPPVAT

SEQ ID NO: 112243 - protein, 91 aa, Oryza sativa
  Clone ID: PAT_MRT4530_16146C.1.pep
MTIGAATLFGHATAIGIKELGSYSDVTLPLLHMTPSHPPPQGSPEFQLDGTPSALSPPAATAVPARAGPFLPLRARAREVGEDEELREEAD

SEQ ID NO: 112244 - protein, 71 aa, Oryza sativa
  Clone ID: PAT_MRT4530_16147C.1.pep
MARTGRRGPAPPLLLAATTPTGFCETNGVDVDALRGLMQQWRNYPSSWNSGDPCGGGWDGVMCSNGRVTSL

SEQ ID NO: 112245 - protein, 121 aa, Oryza sativa
  unsure (1)..(121): unsure at all Xaa locations
  Clone ID: PAT_MRT4530_16148C.1.pep
SKEDNTCGAVQITSSVLAKSATTVTTFKGLMSTDDVFEARRSGIASXASTSTWHLIGWFGDVLVDSRTWPFLGPLLGSTETRGLAAQWGPALVSKVVFVYREKHRYPGYYXSRCSSMWKLP

SEQ ID NO: 112246 - protein, 531 aa, Oryza sativa
  unsure (1)..(531): unsure at all Xaa locations
  Clone ID: PAT_MRT4530_16149C.1.pep
LFVLDACPQSWQRRHPLLAHREREPPAPPSHSPPPAPSSPLPPLSRRPDPPPPPTPPPXPAPPHPSPPLPLPTLPPPPPSPPPPHRPLPVAPPPPAGPXATPPPRPPPIPPPPPPPPPPPPKPPPPTPKPNPPPFPKPPPIPLPPPPPNPPPPPPPPPPSPPPPPRPPPFPKPPPIPPPLPKPPPRPPPLPKLPPRPPPFPIPPPRPLPPPRPPPPPSPPPPPRPPPFPKPPPIPPPLPMPPPRPPSSPPPSPPPPPRPPPLPKPPPSPPPLPMPPPRPPPFPMPPPRPPPPPSPPPPPRPPPFPKPPPSPPPFPMPPPRPPPPPSPPPPPSPPLFPKPPPSPPPLPMPPPRPPPLPXPPPMPGPMPPPKPPPLPNPPPAPCPMPPPIPPPLPKPPPNPPPLPKPPPLPKPPPTPPPLPNPPPPPKPPPPPPPSPPPPPPPNPPPPPKPPPPPPPPPPPKPPPFPXPPPSPAPSPFPNCFFNQRDFSSPAALSSPLAATGRAHTPTAAPLRHSSSTSAAPLALPAMAVSGS

SEQ ID NO: 112247 - protein, 114 aa, Oryza sativa
  Clone ID: PAT_MRT4530_1614C.1.pep
GLGERGLLEEMSMNDEVSLLEDGEVKPLVRVESMNGLETKLWRWWRSPALPRWPSSGVDSGAHGTRGAAVVASAWRGSNTGEAGGAGDPRGEGEAAAALRLGHETRDNTSVALV

SEQ ID NO: 112248 - protein, 39 aa, Oryza sativa
  Clone ID: PAT_MRT4530_16150C.1.pep
MAGLRQRRRKNGVHSSSGVEATPESSSCGGLDVTSAAAD

SEQ ID NO: 112249 - protein, 188 aa, Oryza sativa
  Clone ID: PAT_MRT4530_16151C.1.pep
MCWSTCLNRSGRHRFGFASPVIQSHRIDFCDDDDALLLWPILRDVRCCSFPGGIDDEANQIDTPIRKITPVAVGGGEDEVGELSALHPASSFTQCASLLISPSGDDELGRFGLLALRFNLCLPLHHQAVQPSPRVPVGAGAASDPTHLQALVLSQIYCRLHLRPRPPTDADANAITAFGSVHLPAPPS

SEQ ID NO: 112250 - protein, 92 aa, Oryza sativa
  unsure (1)..(92): unsure at all Xaa locations
  Clone ID: PAT_MRT4530_16152C.1.pep
FPVNYAQVSAXPPSDLMLRSIWPYTCPAMAALSHPWDRRIANGRPRSSSHRRCVDERNASRHRPLIPIHPHAATASLSFALSTPLVSQLTQH

SEQ ID NO: 112251 - protein, 220 aa, Oryza sativa
  Clone ID: PAT_MRT4530_16154C.1.pep
MDCVHSGLVRESPADELVWWLAASAPPATTTYGSDGTHNSSSTRPPRRSPPPTTARQLTIRGDAAGRGRHSGALREREQEQQQRNPAAALRRWRWHGEREQQRANAVPSLPSSALTRVQRRIIGAQAPDSLGVLDIDEYDRVMAVNARSMFVCVKHAYHIAIVSPKPSRRHRRRPGRHHQPLGGSNSVVCELTVPRFLSSPLQPVGQLRGKRGLVSVSSS

SEQ ID NO: 112252 - protein, 76 aa, Oryza sativa
  Clone ID: PAT_MRT4530_16155C.1.pep
KAGLTMNRVVPGADLDRRGTWSERILLFLAWHVCASGFAHSNSAGNTNASYVSQKKETQTYTIHRTSISSMTLLLC

SEQ ID NO: 112253 - protein, 95 aa, Oryza sativa
  Clone ID: PAT_MRT4530_16156C.1.pep
VNRRIVILCDWTDRALVAGQTGVYCAVRPAQPAVTRCLGRVFAVMDRDQTGGSTAVRPVDLYRSDRRHPSGQTGKATSVRPISVDFEGKVDIEAF

SEQ ID NO: 112254 - protein, 69 aa, Oryza sativa
  Clone ID: PAT_MRT4530_16157C.1.pep
IPSITQSVDGLARNYPLVKSLIGNSELRLVLTPQFIKLTFSPMKPYSRCFFFKLFPRTQVIPFVSCPCI

SEQ ID NO: 112255 - protein, 62 aa, Oryza sativa
  Clone ID: PAT_MRT4530_16158C.1.pep
PPPIGRPSRSHIRIYIKIRHCCPGEGSLTGYTHLQGDLHFLAANGEILLMEETRKKPLARVV

SEQ ID NO: 112256 - protein, 72 aa, Oryza sativa
  unsure (1)..(72): unsure at all Xaa locations
  Clone ID: PAT_MRT4530_16159C.1.pep
GPSLNREVLKIMPVQKQTRAXSAYSFKAFVAIGDNNGHIGLGVKCSKEVATAIRGAIILAKLSVLPVRRGYW

SEQ ID NO: 112257 - protein, 188 aa, Oryza sativa
  Clone ID: PAT_MRT4530_1615C.1.pep
MVGADGRRGNRRWAAVVRGRGDRRMVSTDRRCAGARGQVVGGGTGTSDGDGARRAVGSGAGTGGGRRCGDRRWAGGRLAWTGGVRWRGEDEVPLPPVAACLSITACLPRGFTALHAVDLPAFTVLCRRTGVAPPPLTVLQHFFTALGCPPRAWFFRAALDSRELDASPRRAKRMRNRRQKDEGSKPVL

SEQ ID NO: 112258 - protein, 51 aa, Oryza sativa
  Clone ID: PAT_MRT4530_16160C.1.pep
VRRQLGHSLGFLGARPCSPTLRWRCDPAIDQAIEFHVNWYKPFNGAAPYPI

SEQ ID NO: 112259 - protein, 36 aa, Oryza sativa
  Clone ID: PAT_MRT4530_16161C.1.pep
AAFFFFFFFGFFFFFFFFLLENTYSAVGFKKGQLNV

SEQ ID NO: 112260 - protein, 662 aa, Oryza sativa
  Clone ID: PAT_MRT4530_16162C.1.pep
MVDLLEEQKHVKEETHRLRQLLVEIHTALEAAKGCAITNSWLLRWLRELEDAACRGDQTLRNWRDMSSKVSSIIDSSNSFKRIKIAASQLIPSKESTMKVSATVKKLEAVASGIPKVVGRVDERKQAIEFLLHIDKNGSSSPDGWFLAMEDLGCMFMENALGGAHPEEYQKLLVIGKKIAVTLRVCSPLAAKVVSGLLRENLNEKYWYIVLNRCQQFVASSSRALRLRTTCSMECRGRVKHALRGADAAFRVLAGGRRGIHFVPGPTEDEEEEHATPPSRRWYRAAYARLLRLAGSLRGVERGDGGGPRHAETGSVVADARRVADRVAEFDALAARYLAAGQRAPPLKATSLSSLTRVCDVLGVSAQLRKSVRLAICPQLTQHHIWRGALEEVLRDLRADMAALGHPSPATQMADQIAAACVHFLSDTADEATSSSPSWMRPTPFNKPANSPPPPPAKTWQEVLDMFTDLAKSLDADARLAGHADKVAAMKEGLYQIRNVFVERDIAFKEARRQDCLVQKKLSKSLGHSSKCLYTLLLFYLYGNVRDVEVHAGKRLSGKGGKRVTVHAAKFLIDGDEPAIRNAVKQLSRAIGVFRFVWEAAHADNGDHANGNGKGGAMAKKGHGDDAKGLLKLQGHIWGLGVEEKEVTYRGDVFHVHQIQLP

SEQ ID NO: 112261 - protein, 89 aa, Oryza sativa
  unsure (1)..(89): unsure at all Xaa locations
  Clone ID: PAT_MRT4530_16163C.1.pep
EYLQASLVVTSPRRRLMIPSLIHSNMPDFAKDLDSXVRWICEXSCXTSWSLRXXXMVELPQSGPEHRLNIHHLVDVIPYDYDFQYLLPM

SEQ ID NO: 112262 - protein, 95 aa, Oryza sativa
  Clone ID: PAT_MRT4530_16164C.1.pep
MGLEVAARCSGARPRECETPTGTYSSLFAVLLVVFDGRLWTWAIIGPVPCMCIAGLVVHDPNPPARLVGQDRRVGDGFANGRAIVRDDQGRSPLH

SEQ ID NO: 112263 - protein, 250 aa, Oryza sativa
  Clone ID: PAT_MRT4530_16165C.1.pep
SARGYGLLHNRIEVLLLEDEPPALFEHARLIHNSASATASAADQVRFSLLILSLFFFFCVLHRFVFGVREVVKKGCEALHRCEDMVNNLGLFSPNETKEDISTTNLKYILVPFYLAELTEKLAQDDRIHILKASQAKLKEFISFCEAMELVPKEELESYIERASKTVADQRARKIARFKRQRAAESKLLEIKEQKERRGRSTKAAALSTPVEAREEEILDDDGEEEREAWITTISLAICKALDLLDMLKK

SEQ ID NO: 112264 - protein, 69 aa, Oryza sativa
  Clone ID: PAT_MRT4530_16166C.1.pep
ILRGRALYKVTCDFVDAAVKGAVGVINRYVHNNIFFSFAVDSDYEQLPKDQKPNGQNGSGRSVIGSSDP

SEQ ID NO: 112265 - protein, 340 aa, Oryza sativa
  unsure (1)..(340): unsure at all Xaa locations
  Clone ID: PAT_MRT4530_16167C.1.pep
GRVGERCLGLDHSDTAHSYGNMALFYHGRXQTELALRHMSRTLLLLSLASGPNHPDVAATLINVAMMYQDAGNMSTALRYLQEALTKNERLLGPDHIQTAICYHALAIAFSCMGAFKLSIQHEKKTYDILVKQLGSDDSRTKDAESWLNTFKSREQQVNAQKQKGQQGTNPPANPIELLKANPDLVRALKAAAKQPGEGSANVNRSLNAAVVGEGVPRVRGVDERAARATAEVRKKAAARGLNVRSGQAPDYMSNLSQILNYLGSAKAPTASGSTPATAAATSATASTQNASEGQQSNGPPQNGTAGNTNGPSSKKSGGSTPVGLGTSLELKKQKSKQKS

SEQ ID NO: 112266 - protein, 117 aa, Oryza sativa
  unsure (1)..(117): unsure at all Xaa locations
  Clone ID: PAT_MRT4530_16168C.1.pep
KVFPRVRGVDERAARATAEVRKKAAARGLNVRSGQAPDYMSNLSQILNXLGSAKAPTASGSTPATAAATSATASTQNASEGQQSNGPPQNGTAGNTNGPSSKKSGGSTPVGLGTPWS

SEQ ID NO: 112267 - protein, 520 aa, Oryza sativa
  Clone ID: PAT_MRT4530_16169C.1.pep
MATDTSWLLLLVALVLPLVVLLARRRRSGGGSRRIPPGPLAVPVLGSLLWLRHSSANLEPLLQRLIARYGPVVSLRVGSRLSIFVADRRVAHAALVERGAALADRPDVTRSLLGETGNTITRSSYGPVWRVLRRNLVAETLHPSRVRLFAPARSWVRRVLVDKLADGARPESEPPRPRVVVETFRYAMFCLLVLMCFGERLDEAAVRAIGAAQRDWLLYVARKTSVFAFYPAVTKHIFRRRLQIGLALRRQQKELFVPLIDARRARKNHIQQAGGPPVPEKETTFEHSYVDTLLDVSLPDTDGDSALTEDELVMLCSEFLNAGTDTTATALQWIMAELVKNPSIQSKLHDEIKSKTSDDEITEEDTHDMPYLKAVILEGLRKHPPAHFVLPHKAAEDVEVGGYLIPKGATVNFMVAEMGRDEREWEKPMEFIPERFLAGGDGEGVDVTGSREVRMMPFGVGRRICAGLGVAMLHLEYFVANLVKEFEWKEVAGDEVDLTEKNEFTTVMAKPLRAQLVKRA

SEQ ID NO: 112268 - protein, 1059 aa, Oryza sativa
  unsure (1)..(1059): unsure at all Xaa locations
  Clone ID: PAT_MRT4530_1616C.1.pep
GSRGGAATFWDXDILQHSDINIRNFSLSVRLTQRSSNTAFLLTNVYGPTDDADKENFLQEMCEVAPSGQTPWLIMGDFNLIYEARDKNNLNLDRRLMGRFKAAINRCELRELRLQNRRFTWSNERDAPTLEKLDRIFCNPDGDMLFSNHNLQALSSSNSDHCPLLLSPTHQLLRKPTFRFENFWPRPPGFLDTVQTAWSQPVSASHPVKRLSSKLKATAKALRSWSNRILSDSRIQFHLVNELILRLDIAQENRALSPLEISLRKDLKLQILGLAAVEKARRRQRSTLTWLKEGDANTKFFHLKVNACHRKNFIHKLHRGNVIPETHEAKERALHEHFSSLMGQRLPRSCTLNWEELHLPQVTPEDLDSPFTEEDVWEAIKRMLAEKAPGPDGFTGTFFRCCWEVIKSDIMELLDKFHSLSGGNFGSINRATLILIPKKNDACTMGDYRPISLIHSLAKLLAKILAIRLSRQINKVISQAQSAFIITRCIQDNFLYVSNLAKKMHRSKQPTLFFKLDIAKAFDSVSWEYLLTLLEKMGFSTRWRDWVALILSTSSSRVALNGIEGERIDHHRGLRQGDPLSPYLFILAMDPLHRLLKIATDEGLLSDLADRSARFRCSLYADDTAIFIKPSRQDVDSLISILNNFGSATGLLVNLHKSSVIPISCGEIDLDEMLHNFTGPRGTFPMRYLGMPLMISRLRKVHRQYLIDKIKARLASWKKKLLSAGGRRELVLSVPSSMPIYAMTALKIPKQIIQEIDKVRRKFLWDGGDEVNGGKPLKYDGLGVSNLTKMGRALRLRWLWYEWTSPDKPWIGMPTPCDEQDNELFAASTSVTIGDGRKALFWESPWACSSTLKAMAPNLFHHARKKKRTVAEALQDNKWIDDIRYNLTTVLVTDFFKVFEIIWTSGITLTQDIEDNIRWKWTTSGVYTTKSAYQIIWTADRLQQREWPNNYFCQLCFRNLETAHHLFYECPITRKIWDAIATRLGMPQLRPQNWSKTTILEDRWTQTVSTMPKEKRKGAKSILILLSWEIWKERNNMVFKNIETATQGIVEKAIDEIWL

SEQ ID NO: 112269 - protein, 1335 aa, Oryza sativa
  Clone ID: PAT_MRT4530_16170C.1.pep
MAGKSKGARNKAKAQGGSQAAVAAEPEVPVTDGVEDAKPEIEEVSEPAVVEGSDTGAEKEQGDAAGETQAAKKPAEGEVHLYPVSVKTQSGEKLELQLSPGDSVIDVKQFLLDAPETCFYTCYDLLLHTKDGSTHELEDYNEIAEIADITAGGCSLEIVAAIYDERSIRSHLRRVRELLSLSSLHVSLSTSLALQQESAQEKSADTAGDSGKTANQELDGLNFMEDSTGAVINLLPSVPAEIKCVGSIVFSSFNPPPSYRRCCNIAFILHIFVLAEHRRDAARAEDSVVLSYGTELIGMQRDWNEELQSCQEFPHSNPQERILRGRALYKVTCDFVDAAVKGAVGVINRCIPPINPTDPECFHMYVHNNIFFSFAVDSDYEQLPKDQKPNGQNGSGRSVIGSSDPGSKPNKNHADPSGTTNSKTEEPNGVLDNTSDASAEAQIADSEQATYASANNDLKGTKAYQESDIPGLYNLAMAIIDYRGHRVVAQSIIPGILQGDKSDSLLYGSVDNGKKISWNESFHSKVVEAAKRLHVKEHVVLDGSGNPVKLAATVECKGIVGSDDRHYILDLMRVTPRDSNYIGLQHRFCVLRPELVASFIEAESTNKSTTQKVADAPGESNGQLATTAEGPAKSDENSVPRPDKFDEDSGPRPGTSDDSSATKPAEHNESTAEILFNPNVFTEYKLAGSPEEIAADEALVKKVGSYLLDTVIPKFVQDLCSLDVSPMDGQTLTDVLHSNGINVRYLGKVADMIKHLPHLRGLLSSEIIVRSAKHVVKEILRQSADHDIGPAIAHFLNCFIGNVLAPSTKGSVDSTDTKTQKGHEKTQNQKSAEGQKSSLSASSKNIVPTFSHLTSDGIWSNIKEFAKHKYLFEVTDDAKTGAKRVAVLRNLCQKAGITIASRKYDLDAAAPFQPSDILNLQPVVKHSVPVCTDARNLMEAGKIRMAEGTLNEAYALFSEAFSLLQQITGPMHKDAANCCRYGNMALFYHGLNQTELALRHMSRTLLLLSLASGPNHPDVAATLINVAMMYQDAGNMSTALRYLQEALTKNERLLGPDHIQTAICYHALAIAFSCMGAFKLSIQHEKKTYDILVKQLGSDDSRTKDAESWLNTFKSREQQVNAQKQKGQQGTNPPANPIELLKLWKLFAPIFVPILFVCYSVHGLIPGTLGRLKVMANPDLVRALKAAAKQPGEGSANVNRSLNAAVVGEGVPRVRGVDERAARATAEVRKKAAARGLNVRSGQAPDYMSNLSQILNYLGSAKAPTASGSTPATAAATSATASTQNASEGQQSNGPPQNGTAGNTNGPSSKKSGGSTPVGLGTSLELKKQKSKQKS

SEQ ID NO: 112270 - protein, 304 aa, Oryza sativa
  unsure (1)..(304): unsure at all Xaa locations
  Clone ID: PAT_MRT4530_16171C.1.pep
QQQNTAEITQNPTYTINTKPNSSPYALAPLHRRLLPLSCVHGAARSSGHSLYLRSIPVCSPLKACRSHDSAHVVRVAAAEASSLFPHPRRLPSPPPLPPPPPPPQLRAWRRSLEWTLALPPLHPRVLPPQGMSQPRLCPRRPXAAAEASSLFPHPRRLPSPPPLPPQXPPSPPPPSPPSPRCRRQNPPTWLPLQLPPLPPASRTPAAPAPTPSSGSPWTPAGRRSAPAPATRSTPPSPPSARTPRAPSRRRTGPCSPWPPRSVSPPPSRSPGRWSGSSPCALQAPPPPGRRSRRRRAPPRGTRH

SEQ ID NO: 112271 - protein, 291 aa, Oryza sativa
  Clone ID: PAT_MRT4530_16172C.1.pep
MAGTNPKSSTSSSSSAARAFPRFCMIAHLVVCLCAPAYGGGGGAGEDYEQEQEMEVEALQAILMDDIKEIDPSESGLSTTARCFQIVLSPQDDDFDESAYVPVQLALIFAHTEKYPDEPPLLNVKSVRGMKSEDLASLKEKLEQEATENLGMAMVYTLVTSAQDWLSEKYGQNAGDGESEENEAEEEEVIVPHGEAVTVESFLAWRDRFEAELALQRAKLMPESALTAPKEKKLSGRQYFESGRHTMKGASTTADEEEEEEEDIDFDEDFDDDEEDMLEHYLAEQSGKSAA

SEQ ID NO: 112272 - protein, 782 aa, Oryza sativa
  Clone ID: PAT_MRT4530_16173C.1.pep
MAAHTVTDPLEELWNHTMSMDKTHLMCFYPSKITMGGVWTGDNPLDFSIPLLLFQILLITSTTRAATLLLSPLRLPTYISQILAGFLLGPSVLGHLPHFSNLVFPVRSLFVLESMALLGLVYYTFIVGVEIEVSAITRAGIRSFGFAIGCTLPPFLVGALTGYVALSTDDKHKGDTFLNKLSFPIFLGSTFSSTAFAVLARNIAELKLAGTDVGQLTLSASLINDTFAWTGLTVATVLGHSRCTITQTTWTLTSGVVIFGASYLLLRPMLLRLARRAAEGEAVGEDRECWILIGVMVAALVADAGGTHAIFGAFVFGLAVPNGPVGVALVKKVEDFVVGALLPLFFALSGLRTDTAKITNMHSAVLLMVAAMVAAVLKVVAAIGVAGVFGMPLGDGTSIGLLLNTKGIIELVILNIARNKGIMSDQSFTVLVFVSALITAMPIARGRPRPPPHRVRGPLLPALLLINASAPSSSSYDASVHGRSHTEMQFKHISHAFMAYEEQSVGVSARTMAAVSPYASMHEDITSAAENQHSALILLPFHKYRSVDGGLEVSHPAIQPLNCSVQSFSPCTVGILVDRGLAAVPGGGYRVVALFFGGSDDREVAALATRMVRNPTIDLTLLRFVQKGGSFTASEFDALKERKADEGCLRDFLERANEGGGATVEYRERGVFNASEMVGEIQSVEAMGNKDLFVVGKVPGGSGLTAGMAEWSESPELGPIGDLLASKDFQTTASVLVLQAYGRPAAVVGAGAGAMSVDFGGDSVAMAERTASGRRPWARPGV

SEQ ID NO: 112273 - protein, 875 aa, Oryza sativa
  unsure (1)..(875): unsure at all Xaa locations
  Clone ID: PAT_MRT4530_16174C.1.pep
MADSTKGTEEKGLGEQEQSLAVVVAPEPTVPPEDSSGSDVAHEDDEYSSPSDPCPSPSPKRRKKGDGEEGDKDYIPPKEGETAPRRSKRQPKKKVPSQIDEVLANTTGSKKSERSAKAKKRKGERSVNRKDEGFHVVTHVLPKGEPLAPKTARVKFSSQCGIIFPNGSEAAVRNCALQTMAKSWRGWKTILNTKFVKTGRTPFSMYANITPNQWDDFLALKNSPEEIQRSQKYAELAKKNKFPHRLGSAGYAPKVEQWTKEEEEMRKKGQPVPMEEWTQRSRNWVRARTPKITDEGKVSFEDPELQSVADKIENLSSSQKKGFFKPKREKDVLSTALGTPEHGGRVRAIAILGRTYNEEFIPDAYAKVQPQVVHEGFESYDIDFPTADGVSVLGDAVDLVILWHKNDVSFGLGTDATEKPVVPKPGLGKPPRPPKRKVTDKAEEPDMQKDNPVPEVPPEIAVPEAAMEIPVPEVPMEITVAEPEVQFVASVGSEIEEVLGLEWDGIEPEIFEDPSLAKDPEVQETMVPEKATTNSEMPRVLRSHDFKSKDENKEKFMVTVFRGGKERAKLRDDDPQKAAELAGPTYFATDDCPTEYEHGKTLLPEWALNEVPWEMKRLHTFYMQASKKGLGNITARSSADCFGEEGYVWLDFSDLHAIYRRDKMDVNYVGVWCMMQYMDAKKTKEPIGFLDPTQICQTQHTMRLAPGSDQLKGKTPKEIAEYKKGLHKEKLITVAQYIGRAFLHFQNKRAKIRXVVMAAYNFNDHYICLLIHPKDGTVXYQYYKFKGGEQTRTREKLLCHKQPQGTVLCGYYACEFLRVNGRYRTNAEDLPRLQCRTSFDDTGIKNVQCDLCHFIHHXCHVKGDFFDPEGALATS

SEQ ID NO: 112274 - protein, 151 aa, Oryza sativa
  unsure (1)..(151): unsure at all Xaa locations
  Clone ID: PAT_MRT4530_16175C.1.pep
QRPPQCHRPHLLPRATSALGGAAPPTALLLQLDQRLSPPCHDSAHVVRVAAAEASSLFPHPRRLPSPPPLPPPPPPPQLRAWRRSLEWTLALPPLHPRVLPPQGMSQPRLCPRRPCGGXEASSLFPHPRRLPSPPPLPPQLTAIPTAALAR

SEQ ID NO: 112275 - protein, 904 aa, Oryza sativa
  unsure (1)..(904): unsure at all Xaa locations
  Clone ID: PAT_MRT4530_16176C.1.pep
MERLIVHIVPQMVALGPLYLHQIWSYDRYMAVLKGYVRNRAHPEGSMVEGYSTEEVVECCIDYLKDGYAIGVPVPRHEGRLSGRGTIGKKRFVTHDHKSFQEAYFSVLHQFAIVEPGVRVEAIDEAREKQSYFGFIEEIWEIDYGHTMLFPIFKCQWVKYPNGVNVDKFGPTVVDLASVGHKDDPWKIKNVETSTQKTVKPYMRTDGCRKFSPPHASAVLRRRPPATFTLRPSSSAAADHRRPRAATETVVLRRRRPLSSTLPPPPPTPPPRTRSTAAGSSTATGPSTATGSSTARAAAGGPSTAAGPSTARTAAAGPSTTVGHPSTGAXPSAPPPPSATPPCKGERLHRPIVVHERRRPRPNDVFGQSSSTAEPRRRPFVVDGRSXRRPRPKLVVGRSSNTDEQSLAVVVAPEPMVPPEGSSNSDVGDEDEEYSSPSDPCPSPSPKRRKKGDGEEGDKDYIPPKEGANDGFCVKHMILPRPETKETEPDYPFDDLKENTPCRLHVPIGRSGKTLEAATAIAIPGRTYNEQFIPDAYAKVQPQVVHEGFESYDIDYPTADGVSVLGDAVDLVILWHKNDISFGLGTDATQKPVVPKPGLGKPPRPHKIKVTDKADDPEMQKENPLPKVQPEIALPEAAMEIAPQETAMEIPVPDVPMEITVAEPESQKIFEDLSPAKDPEVPRVLRSHDSKSKDENKEKFMVTVFRGGKERAKLRDDDPQKAAELAGPTYFATDDCPKKYEHGKALLPEWALEEAPWEMRRLHNFYMEASKKGLGNITARSPADCFDEEGYVWLDFSYLHAIYCRDKMDVNYVGVWCMMQYMDAKKKKEPIGFLDPTRICQTQHIVRLAPGSDQLKGKNPKEIAEYKKGLHKEKLINVAHVICATSSTMSAVMSKEISLTQRVP

SEQ ID NO: 112276 - protein, 103 aa, Oryza sativa
  unsure (1)..(103): unsure at all Xaa locations
  Clone ID: PAT_MRT4530_16177C.1.pep
LITKEVNPCPPKHGAAKEPVCCRLHRPWSVRALAIPAIVAXSHPGAACCENXPATRWPFFVVPPSTSTLNASYLACFWAAXSSRRXGSRSCRGGCLPEFMVSP

SEQ ID NO: 112277 - protein, 822 aa, Oryza sativa
  Clone ID: PAT_MRT4530_16178C.1.pep
MSMDKTHLMCFYPSKITMGGVWTGDNPLDFSIPLLLFQILLITSTTRAATLLLSPLRLPTYISQILASFLLGPSILGHLPHFSNLVFPVRSLFVLESMALLGLVYYTFIVGVEIEVSAITRAGIHSFGFAVGCALPPFLVGALTGYVALSTDDKRKGDTFLNKLSFPIFLGSTFSSTAFSVLARNIAELKLAGTDVGQLTLSASLINDTFAWTGLTVATVLGHSRCTITQTTWTLTSGVVIFGASYLLLRPMLLRLARRAAEGEAVGEDRECWILIGVMVAALVADAGGTHAIFGAFVFGLAVPNGPVGVALVEKVEDFVVGALLPLFFALSGLRTDTAKITNMHSAVLLMVAAMVAAVLKVAAAIGVAGVFGMPLSDGTSIGLLLNTKGIIELVILNIARNKGIMSDQSFTVLVFVSALITAMVSPFLGMVVKPARRLVFYKRRTVAWAHPESELRVLACVHVPRDVPALLTLLDVVTPSSRSPVGVLALHLIEFVGRSSALLLINASAPSSSSYDASVHGRSHTEMQFKHISHAFMAYEEQSVGVSARTMAAVSPYESMHEDITSAAENQHSALILLPFHKYRSVDGGLEVSHPAIQPLNCNVQSFSPCTVGILVDRGLAAVPGGGYRVVALFFGGSDDREVAALATRMVRNPTIDLTLLRFVQKGGSFTASEFDALKERKADEGCLRDFLERANEGGGATVEYRERGVFNASEMVGEIQSVEAMGNKDLFVVGKVPGGSGLTAGMAEWSESPELGPIGDLLASKDFQTTASVLVLQAYGRPVAVVGAGAGAMSVDFGGDSVAMAERTASGRRPWARPGV

SEQ ID NO: 112278 - protein, 158 aa, Oryza sativa
  unsure (1)..(158): unsure at all Xaa locations
  Clone ID: PAT_MRT4530_16179C.1.pep
MDGWVDDDDAVVVAGHGGDGVSSSPTSVLGCKERAKLRDDDPQKAAELAGPTYLVTDDCPEKYEHGKALLPDWALNKGPWEMRSAEGYVWLDFSDLHAIYHQDKMNVNYVGVWCMMQYMDAKKKKEPIGFXPTRICQTQHTVRLAPGRPLSIFVGGPD

SEQ ID NO: 112279 - protein, 397 aa, Oryza sativa
  Clone ID: PAT_MRT4530_1617C.1.pep
MTRLLQKDVKYKWSEECEQSFQELKNRLISAPILILPDPKKGFQVYCDASKLGLGCVLMQDGKVVAYASRQLRPHEKNYPTHDLELAAVVHALKIWRHYLFGTRTEVYTDHKSLKGFVAALEAKTTLIDQVREAQINDPDILEIKKNMRRGKAISFLKDEQGTVWLGERICVPDNKDLKDAILKEAHDTLYSIHPGSTKMYQDLKERFWWASMKREIAEYVAVCDVCQRVKAEHQKPAGLLQPLKIPEWKWEEIGMDFITGLSRTSSGHDSIWVIVDRLTKVAHFILTDGQTERVNQILEDMLRACALDFGGSWDKNLPYAEFSYNNSYQASLQMAPYEALYGRKCRTPLLWDQTGDRQIPTFPESPFSLEKNLKSSKASKASHTDLKQPFEHVDPI

SEQ ID NO: 112280 - protein, 738 aa, Oryza sativa
  Clone ID: PAT_MRT4530_16180C.1.pep
MDITEVTVVHHAALVLLALWAAVSAGWAHPAIFLAALLYLFAVNERYTMRLRKRIQHEERKCANQRRLLSDAETVRWLNYAVEKIWPVCMERVASEQFLLPIFPWFLEKFKPWTARKAVIQDLYLGRNPPMFTDIRVVRQSTDDDHLVLEIGMNFLSADDMNATMAVQLRKRLGFGITANMHITGMHVEGKVLVGVRFLRQWPYIGRVRVCFVEPPYFQMTVKPLFGHGLDVTELPGISGWLDRMLDVAFGQTLVESQTSEVLGINIVQNATFTVLPNMLVIDLEKFASESTDSWFSVDEKPPIAHAKVEILEGADMKPSDPNGLADPYVKGHLGPYRFQTKIHKKTLNPKWMEEFKIPVTSWAALNLLSLQVRDKDPIFDDTLGDCSISINKLRGGQRHDIWIALKNIKTGRIHIAVTVLEDENEKVPNDDDEQCGTPKGGKASTPRSSFSSRTNNESESSEEFRKISAEYEPVDIEGLEKVDVWVHRPGSDVAVTWEPRKGRARCQDSRILRENDVYCDSPKSCQSESQRSDSSTEEPANGKSRHHLHKVKKGLGKLAGAMFKSPKKESDDEASPCVTPHPNIKPLGEKRVSVRYVVDEDPSENLPDDQHSSPERGESESPTKRHLRKKAVHMVKHAGNKTAHNLKNMFSRKGSDKSKEGQDDQKDDPDTIVVEPSKVKKDNPDASEVDIDPSQVENDIPDSTAIDPLKVDSNVANNIVVDALEYASESDAKDKPQ

SEQ ID NO: 112281 - protein, 607 aa, Oryza sativa
  Clone ID: PAT_MRT4530_16181C.1.pep
MHLEGMKARSTLWRAARPHDHAVVDANGPRERYGGGLSWHGVIPVVGPTRQRRADKSIARAYPLDMESREWMYHWPRFLSPCRNEVSKFIGIAKAHAEKNNMRKIICPCADLKEHLVTRGFMDKYEIWTRHGEEQVDGPKNVVPTQVEDLVHDDGSVEDKIDLEEMLRHAEPEVLMGSARGLNNFEALLKAAKEVLYDESKGCDSEFTTLRKEYACLDECPTCDASWYKSNSNTGLEPSDTCDVGPRQSGIDIDVFLEPLLEDMADLWKEGLKVWDEYLREYFTVKAIIFVTINDYPAMFSVLDQIKVTKKLSKGTKCKKPEKTTKPEDSKKQDDSSKPDDKLPPPFKKHSIFFKYLPYWKDLEVRHAIDIMHLEKNVFDNIVETLLDMPKKTKDGLQSRMNLVEMGIREELHPQEGEKNGKVYLPPACFTLTSEEKKSFCKSLRDVRVPIGFSSNNSRLVSMKDFSVSGYNSHDCHVLLTVFLAIAIRAIKPEHLKVVITRLCYFFNAVSQKVISLEELGNLHTFAHETQCQLEMCFPPSFFDMMEHLIVHIVPQMVVLGPLYLHQMWSYERYMAVLKGYVRNRTHPEGSMVEGYSTEEVVECCID

SEQ ID NO: 112282 - protein, 299 aa, Oryza sativa
  Clone ID: PAT_MRT4530_16182C.1.pep
MSWKEGFKHDPHKKRDAYKDKLRDDGAADFQRQMMDFCVKHMLLPRPETKEPEPDYPFDDLKENTPCRLHVPIGRSGNTLEAATAIAIPGRTYNEEFIPAAYAKVQTQVVHEGFESYDIDFPTADGVSMHKENLVPEVPSEIEVPEVPMEIAVPDVQMDIKVAEPEVKFVASVGTEIEEVPGLEWDGTEPEIFEDPSPAKDPEVQQTTVPEKATTSSEVPRVLRSHDSKTKDENKEKFMVTVFRGGKERAKLRDDDPQKAAELAGPTYFATDDCPEKYEHGKALLPEWALKEGPWEMRR

SEQ ID NO: 112283 - protein, 1240 aa, Oryza sativa
  Clone ID: PAT_MRT4530_16183C.1.pep
MESREWMYHWPRFLSPYRNKVSKFIGIAKTHAEKNNMRKIICPCADSKNEIAWNFDNAFNVKEYLVTRGFMDKYEIWTCHGEEQVDGPENVVPTQVEDMVHDDGSIVDKIDLEEMLRHAEPEVLMGSARGLNNFEALQKAAKEVLYDESKGCDSEFTTLRSVLELMRLKARHGWSDTNFDSLLELLQKMLLRPNSLPSSTYQAKKLICPLSLGVEKIHACVNHCILYKKEYASLDECPISGASRYKLNSNTGLEPSDTTEGRQRKIPQLVMWYLLVKDRIKRIYSNLRDAELIRWHEEGRKKDGMIQHPTDARQWINFDAQYREFAKDPRNIRFALSTDGVNPFGDMSSSYSTWPVLLTMFETMADSTKGTEEKGLVEQEQSLTIVVAPEPTVPPEDSSGSDVAHEDDEYSSPSDPCPSPSPKRRKKGDGEEGDKDYIPPKEGVRNGATAIKTAVPSQIDEVPANTTGSKKSERSAKAKKRKGERSVNRKDEGFHVVTHVSPKGEPLASKTARAKFSSQCGIIVREKIPITVKDWDHVSNGDKEVLWKELKKIFQFPDGSEAAVRNCALQTMAKSWRGWKTTLNTKFVKTGRTPFSTYDNITPNQWDDFLMLKNSPKEIQRSQSSAGYAPKVEQWTKEEEKMRKKGQPVPMEEWTQRSRNWKKGFFKPKREKDVLSTALGTPEHGGRVRGVSRKMSWKEGFKHDPHKKREAYNDKLRDEGAAEFERQMMDFCVKHMILPRLETKEPEPDYPFDDLKENTPCRLHVPIGRSGKTLEAATTIAIPGRTYNEEFIPNAYAKVQPQVVHEGFESYDIDFLTADGVSVLGDAVDLVILWHNNDISFGLGTDATEKPLVPKPGLGKPLRPPKRKVTDKAEEPEMQKDNLVPEVPPEIVVPEAAMEIPVPEMPMEITVAEPEVQFVASVGSEIEEVPGLEWDGTEPEIFEDPSPAKDPEVQETTVPKKATTSSEVPRVLRSHDSKSKDENKEKFMASKKGLGNITARLPADCFGEEGYVWLDFSDLHAICRRDKMDVNYVGVWCMMQYMDAKKKKEPIGFLDPTRICQTQHTVRLAPESDQLKGMNPKEIAEYKKGLHKEKLITVAQYIGQAFLHFQNKRVVMAAYNFNDHYICLLIHPKDGTVVVLDPLDYRHQSYKEFLAILQYAYQYYKFKDGEQTRTREKLLLPRLERRTSFDDTGIKNVQRDLWHFIHHECCHVKGDFFDPEGALATSDEFKDLREWNSAMP

SEQ ID NO: 112284 - protein, 46 aa, Oryza sativa
  Clone ID: PAT_MRT4530_16184C.1.pep
PQLTYFFKSRGLFIVSTLPYPFFPRHTFNLPHPKFTSLALLLHLRD

SEQ ID NO: 112285 - protein, 45 aa, Oryza sativa
  Clone ID: PAT_MRT4530_16185C.1.pep
CTGLCILTMHVLMASLEKQVAAAAHAHGSHGGRVVTEALSTESTA

SEQ ID NO: 112286 - protein, 96 aa, Oryza sativa
  Clone ID: PAT_MRT4530_16186C.1.pep
YGRYKLCGQCNGKPTFFFISSPRELYIYRDLSQARKLINRGKITRSHAGRKTRNPHVSETILTPHRPLYIYISFSCFSIRARSPMPRRRWRRRSAG

SEQ ID NO: 112287 - protein, 1106 aa, Oryza sativa
  unsure (1)..(1106): unsure at all Xaa locations
  Clone ID: PAT_MRT4530_16187C.1.pep
LAKTMEQRRRRVKSHAGVPRVQMHPGRRLNGEGCMPKEDDFAISSPAARRPKGPSQPLXPIGQWASVRQLAPXGPMYLNYTTCPYRYPSHEGNHLSLRQQLAPTVGTSERNHXERMPPKKVAKEKVAKRKESEAGGEIATGEGAEPSAPIVEVGAAPSASAPAPQPPPSAPPASDGLVPNTVDAAKAAAAARALQTRTEILSTSQLVAPXAAPSQQTTTSTELVAVQINPNLEALAEADMEAMRXNMTRFQDMLRQMQEQQQAYEVARQAKVASAPILQYSAGYIPPQVYLQAPIHALPPQAMQAPVYFAGQPSAATAHPTPRVQPQVRPVAAQVHPSPPGQMSXAMAEGASALQAQLQAFLRQLNQPHNISSTTPSAQPKGNTSQGAPSWLPSNQPGPGTSLWGQRPQFDLSNATQAPAIPPQATTPGFGTAQAPNQVAMTWTQPSFDPSMAAHQTSPFSAGQPNTVTQPHAQAMTLPFATPYPQQGVMIKSDGEKGLPLSWGIKNHPIPPQFKFPHVPRYSGETDPKEFLSIYESTIEAAHGDENTKAKVIHLALDGIARSWYINLPTSSIYSWEQLRNVFVLNFRGTYEEPKTQXGLLGISQRPGESTREYVRRFSQARCQVQDITEASVINATSTGLLKGELTRKIARKEPRMLEHLFRIIDGYAXGEKDTKRRQEIQAEYDKTAAAETATAQAHAQAQIQAQVTSSAPVLIHSTPPVNQGQPLRPNHAPMTWXKFRTDRAGKAVMAGEEVQALRKEFDAQQAGGQQQPFRKKIRKDLYYAVHGHSSHTTEQCRNIRQQGNTQELRQQQARAEEATREAVLNQAPQAEQRQDAQQVSKRQKKMQLRAVHSIVSAGEGVPRYLTQQISFRPKDAEGVLFPHQDXVGAEMVGIEVRHILIYGGSSADVIFAGTYAKMGLPTLALSQAPTSLRGFGGEVVQVLGQAHLKVTFGTQENKREEEILFDIVDIPYNYNAIFGXGTLTKFEAVSYHNYLKLKMPSPAGVVVVKGSHPSATMVALVASFDRGVHTLEVERQERTRPTLKPVXHGKVVWLQIDDSDPAKIISLGGDLSEQEVNSILIVLKKTLISKLACLQVDSRGSPLKK

SEQ ID NO: 112288 - protein, 418 aa, Oryza sativa
  unsure (1)..(418): unsure at all Xaa locations
  Clone ID: PAT_MRT4530_16188C.1.pep
DPHKTREAYKDKLRDEGAADFEXKLMDFCVKHMLLPPPEIKEPEPDYPFDDLKNDISFGLGTDATQKPVVPKPGLGKPSRPPKRKVTDKVEEPEMHKENPMPKVPPEIAVPEVPVEIVVPDVPMEITVAEPELQLVALVGIEIEEVPGLEWDGTEPEILEDASPSKDPEVQKTTIPEKATTSSEVPRVLRSHDSKSKDENKEKFMVTIFSGGPWEMRRLHTFYMEASKKGLGNITARSPADCFGIEGYVWLDFSDLHSIYRRDKMDVNFVGVWCMMQYIDAKKKKEPIGFLDPTRICKTQHTVRLAPGSDELKGKTPKEIAEYKKGLHKEKLITVAYTYQYYKFKGGEQTRTREKLLLPRLERQTSFDDTCITNVQRDLCHFIYHECCHVKGDFFDPEGALATSDEFKDLREWNTAMP

SEQ ID NO: 112289 - protein, 1274 aa, Oryza sativa
  Clone ID: PAT_MRT4530_16189C.1.pep
MAKNKWTGLKMEYFTVKVIIFVTINDYPAMFLVSGQIKGKTGCVICLNGTYYRYLPGSNKLVYMRHRRFLRTNHKYRKMKAEFDGTEETDPAPKPTSGEKVCAMTEKIVCEFGKMTKKPSKGTKLKKSEKNMKQGDSKKQDDSSKPDDKLPPPFKKHSIFFKYLPYWKDLEVRHAIDVMHLEKNVFDNIVGTLLEMPKKTKDGLQSRMDLVEMGIREELHPQEGEKNGKVYLPPACFTLTPEEKKSFCNSLRDVRVPIGFSSNISRLVSMKDLWVSGYNSHDCHVLLTMFLAIAIRAIKPKHLKVAITRLCYFFNTVSQKMVALGPLYLHQMWSYERYMAVLKGYVRNRAHPEGSMVEGYSTEEVVECCIDYLKDGYAIGVPVPRHEGRLSGRGTKGKKRFVTHDHKSFQEAHFSVLHQFAIVEPYIDQHIELIRANNKGRTTDGVHVEAIDEAGEKQSYFGFIEEIWEIDYGHTMQFPIFKCQWVKYPNGVNVDKFGLTVVDLASVGHKDDPWKIKNVETSTQKTVKPYMRTDGCRIFFASAVLRHRPPATFTLRPSSSAAADRRCPRAVTETAAPCRRSTTRELHNSATAADPSTTRELYAARSTPAGPSTATGPSTAPATGPSTAHAAAAGPSTAAGPSTAPLAAPPLPPAATSLSISLAAERLHRPIVVHERRRPRPNDVFGRSSSTAEPRRRPFVVHDRSRSSSTAEPRRRPFLRHPRPKLVVGRSSNTDRFETMADSTKGTEEKGLGEQEQSLAVVVAPEPTVPPEGSSDSDVADEDEEYSSPSDPCPSPSPKRRKKGDSEEGDKDYIPPKEGTLKNSPEEIQRSQKYAELAKKNKFPHRLGSARYAPKVEQWTKEEEEMRKKGQPAPMEEWTQRSRNWVRARTPKITDEGKVSFENLELQSVADKIENLSSSQKKGSFKPKREKDVLSTALGTPEHGGRVRGVSSKMSWKEGFKNDPHKNREAYKDKLRDKGATEFERQMMDFCVKHMLLPCPKTKEPEPDYPFDDLKENTPCRLHVPIRRSGKTLEAATAIAILGRTYNEEFIPDAYAKVQSQVVHEGFESYDIDFPTADGVSVLGDAVDLVILWHKNDISFGLGTDATQKPVVPKPGLGKPQRPPKRKVTDKAEEPEMQKENPVPEVPPKIALLEATIEIAPPEAAMEIPVPDVPMEITVAEPEVQFVASVGSEIEEVPRLEWDGTEPEIFEDSSPAKDPEVQETTVPEKATTSSEVPRVLRSHNSKSKDENKEKFMVTVFRGGKERAKLRDDDP

SEQ ID NO: 112290 - protein, 119 aa, Oryza sativa
  unsure (1)..(119): unsure at all Xaa locations
  Clone ID: PAT_MRT4530_1618C.1.pep
MATARGERWAAARGQAVGGVAACLSITACLPRGFTALHAVDLPACAPPSPGAXAYFGLAPSXLTPSAWRLLASFTVLCRRTGVAPPPLTVLQHFFTALGCPPRAWFFRAALDSCEHGCC

SEQ ID NO: 112291 - protein, 647 aa, Oryza sativa
  Clone ID: PAT_MRT4530_16190C.1.pep
MATKQQDASTSGAAMSMKEYLKRYQSDDAQGKAKKKKKKKPKPAAAVGGGVLIVDEDPTWHKPVQIEEEPASSGDERPLVDEDIEVKRMRRLEAIRAARPYNAIAEDGSGWVTVAAPEDSDGGLTGRRRRNDTPSPERGGAGRKDLSPPRRRQRQDTPSPDPRDAAGKDLSPPRQRRRRQDTPSPKGSEVAGGHDDLSPPRKSRQQRDPSPPRRLSRHDSKESQDISPPRRRTRHDSEEPQDLSPPRRKGRHDSEEPKDLLPPWRRVRHDSEEPKDLSPPRRRTRHDSEEPEDLSPPRRRTRHDSHEPKDKLPPLKRQALGDGDISPPRKGRKEVAPKEVRKAGLMTAEEVKEDIRKIKEDERLKFAAQDPSVIGKGAKAVFRDKQGKRISEEDMRKAKEDTKPKEIHIEWGKGLVQKREAEARLQELESEKSKPFARTRDDPELDTMLKNRIRWGDPMAHLVKRNDTDLLLEDLGDDEKMKESGFIVPQNIPSHSWLKRGVDPPPNRYGIKPGRHWDGVDRSNGFEKDMFKLKNEKQATEQEAYLWSVADIFCSQADGKYTNLAKTMWKMLKHICNHHNDFSGCKQSQTICKEQQLKVLLENNNSSEDHHQHRPKRMKAGQDGTHAAPAMESLVFDSMWFKSNNID

SEQ ID NO: 112292 - protein, 54 aa, Oryza sativa
  Clone ID: PAT_MRT4530_16191C.1.pep
MLQRKATSLKLVGKRTPWPERPPTQERSQSPSSPPWEPPFFPCIKLKAVGWLFC

SEQ ID NO: 112293 - protein, 59 aa, Oryza sativa
  Clone ID: PAT_MRT4530_16192C.1.pep
STRGSAHTHNQISPKSTRRHLRSKMQIFVKTLTGQTITLEVDPPDTIDNDKAKIHHKED

SEQ ID NO: 112294 - protein, 410 aa, Oryza sativa
  Clone ID: PAT_MRT4530_16193C.1.pep
MAAGEQCKTMTELNGKRSPATATVTTTRHVGLRDMESREWMYHWPRFLSPYRNEVSKFIGIAKAHAEKNNMRKIICPCADCKNEIAWDFDDAFKVKEHLVTRRFMDKYEIWTRHGEEQVDGPEINVVPTQVEDMVHDNGSVEDKIDLEEMLCHAEPEVLMGSARGLNNFEALQKAAKEVLYDESKGCDSEFTTLWEYFTVKAIIFVTINDYPAMFLVSGQIKGKTGCVICLNGTYYMYLPGSNKLVYMRHQRFLCTNHKYRKMKAEFDGTEETDPAPKPTSGEKYLPYWKDLEVRHAIDVMHLEKNVFDNIVGTLLDMPNKTKDEHLIVHIVPQMVALGPLYLHQMWSYERYMAVLKGYKIKNVETSTQKIVKPHMHTDGRWQWRAECGGVKCQPVLEKATVVVGSGEEG

SEQ ID NO: 112295 - protein, 135 aa, Oryza sativa
  Clone ID: PAT_MRT4530_16194C.1.pep
MAGARSLLLRHLRVAVAPSSSSPAASLRPVVALREALCARRWMSSEEAKGSFLDKAEVTERIVKVVRNFQKIDDPAKVTPDAHFKNDLGLDSLDAVEVVMALEEEFGFEIPDNEADKIDSIKVAVDFIASHPQAK

SEQ ID NO: 112296 - protein, 182 aa, Oryza sativa
  Clone ID: PAT_MRT4530_16195C.1.pep
RAAPPAGAFLKASSEEAPYVGGETARRRCCVIVTEGRDGCRLYWDGGEARVAPFPAVQVDPTGAGDSFLAGFASGLLWGLSATDAALLGNFFGAAAVSQVGVPTFDPKMLQAVKQILEKAVKRPCTHINGNTFTFQRSSMHDELHKSLQEAAMLVCEQKQANSPATDNGDVCSINELTSLPS

SEQ ID NO: 112297 - protein, 57 aa, Oryza sativa
  Clone ID: PAT_MRT4530_16196C.1.pep
GTKPPKRFKNWGDFVFFGTPYAIPLDHRWGALFSDSLKKPRGGCWGFLGGKAPSFSP

SEQ ID NO: 112298 - protein, 88 aa, Oryza sativa
  unsure (1)..(88): unsure at all Xaa locations
  Clone ID: PAT_MRT4530_16197C.1.pep
GDHMGLLKELDMRMTSMVVQSQIHNSFRMSSSLADKXFAEGVVSFLTEYPRPTIGISLSRQCAEYVLTPPMRVGMRLAELTRGGPTPS

SEQ ID NO: 112299 - protein, 355 aa, Oryza sativa
  Clone ID: PAT_MRT4530_16198C.1.pep
MAPSPAAAMPLAAEPDEVVVEVEEEEERGVKGGGGVAGLDEVEGLVVGSYCHDVLLRGGRVVGETLGGAAAFVSNVLDAASPAGASLAVVSKVGHDFAYATAAAPARHPPVLCASPTTSFHARFSDDAASAHAPDRQLRRVHACDPIYPADLPDRRFAYGLAVGVAGEVLPETLERMIRLCRAVLVDAQALIRAFDGEAKGGGAVRHVALEATPYARLLPRVAFLKASSEEAPYVGVETARRRCCVIVTEGRDGCRLYWDGGEARVAPFPAVQVDPTGAGDSFLAGFASGLLWGLSATDAALLGNFFGAAAVSQVGVPTFDPKMLQVFTEPVYSNMHESELQTDTEIEETALGVK

SEQ ID NO: 112300 - protein, 157 aa, Oryza sativa
  Clone ID: PAT_MRT4530_16199C.1.pep
MGRSLSPLLRQELDNLDKDADSRRNAMKALKSYAKHLDSKSIPHFLAEVSDNKAAPGLPSGEFTISLYEVLARVHGRNIVPQVGNIMSTIMCTLSSSGGSFPLHQACSKVVPAIARYGIDPSTPDEEKAGIIASLCKPLCGALMGNQDGVASGAALC

SEQ ID NO: 112301 - protein, 493 aa, Oryza sativa
  unsure (1)..(493): unsure at all Xaa locations
  Clone ID: PAT_MRT4530_1619C.1.pep
MGSSGYFCGKERPYPEDLKGATVFSKIDLRSGYHQLRIKEEDIPKTAFTTRYGLFECTVMSFGLTNAPAFFMNLMNMVFMEYLDKFVVVFIDDILIYSRTKEEHEEHLRLALEKLREHQLYAKFSKCEFWLSEVKFLGHVISAGGVAVDPTPCNLAPPPPPPLQPCAAVDSAVAVAREGRHRGRQVVAVLVRRFAIVGDRRSIVAVVKPKNSAVSSSSPAPSVASPPSFWSSRRRSPASVRRPSRPLRQAAAAVGDVIADVIKMPRYKPEYLFGVEGFVQELRTIEDIPSVMFEAGGRNYIHACQEVARIAIGELRDRYSDQLADTEYRYHPRQPQGSDRGSYLETEGIENDATTRHLVEMLWAMDESRAETVLAAQDREDRNRGKICELEDKVDRLEKELAALKGEAPPQKARIRLTARKRALFVPRYQLAPKVRVVEKEVAPADPPIIIISSDEEEESKRNHSKIEWVATQDDEDEPNEPSIDXDARKNKS

SEQ ID NO: 112302 - protein, 661 aa, Oryza sativa
  unsure (1)..(661): unsure at all Xaa locations
  Clone ID: PAT_MRT4530_161C.1.pep
MDFDKSTSTNASLKKLQDDGALPGRGIMESELGGTEPEPVLGRMVAVEDYILCGFLPPPSEFLLPVMNFYGLSLLHLNPNSIAFLSIFSYLCEAYIGVESFLDLFRFYYELRWTEPKKIENSDPASVVPEEQPDKILEWTAKPALTPSLQSLIDIIDDLRVRGLSGYEVAADFIGLNSETVERRVGQALPLTDVIGPLADHQAAASLKEGVAKEVSDIAAAATTSGSNVPKKGRMFSSVLGNRRKAPTPSAMDASPPPQRRQRLVTLGEKAARXKAAQDGSSAASIASPAAASTDVVVVAREXGEDLLKMRELVTGNKRQRQGLEHRMSELENNLSEIRGSLRMTYTGLHQLAGECGVTSTITVNPDEFSLTSSLTELATAMEEIPCKHAARIGEEMFNGIYTGASHVLACMRLAHPNIDLQRILDQGAANDTRKGVMDEFGDLGDVDIEDVQQRGQLELPVVVPALVLKPYVPRDDVDQSLSVEADMVMTSLDLESVLADRDHRIQYWRMKFKVAELERTMVEVKKEQAVEALRGREVWFNSYLRSCCMAMAGVCRELRVPRGNPEESAAGYISWLNGACTQLEVIGKHIDEALKQECRRLSRYAGGHVLACVRDHRPQLHLEFLQEGFSRSRRTPAEIDNLAKSMAPLAEKVFQSMDWR

SEQ ID NO: 112303 - protein, 55 aa, Oryza sativa
  unsure (1)..(55): unsure at all Xaa locations
  Clone ID: PAT_MRT4530_16200C.1.pep
LLFLPRKFFYGKSTNYXPELSRSFELSPEIQNRTSFTTNYTNRTNYPPRLNPRWF

SEQ ID NO: 112304 - protein, 82 aa, Oryza sativa
  Clone ID: PAT_MRT4530_16201C.1.pep
GACMSIYCLYKQECMIPCINNNQRLMYSLHMWHNHLRSITASIPCEGLVCGIYSLYKQQYIIHDSISPCININQKLMYDLHC

SEQ ID NO: 112305 - protein, 360 aa, Oryza sativa
  Clone ID: PAT_MRT4530_16202C.1.pep
ISKSKGNLKFGETKDVQRANKKIVLRNHVTGFPKESDMELVAATGAAPSRVPEGTDGAVLVKNLYLSCDPYMRGRMSSHDGSYVDAFVVGEAITGYGVGKVVDSSHPGFKAGDLVWGMTGWEEYSLIKDPSRALFAIRHPDLPLSYYTGLLGMAGFTAYVGFHEICAPREGERVYVSAASGAVGQLVGQFAKLMGCYVVGSAGSDDKVRLLREKFGFDDAFNYKKESDLSAALKRCFPEGIDIYFENVGGAMLDAVLLNMRVRGRVAACGMISQYNLEHPDPVHNLTAIVTKRLRIEGFIVSDHYARYREYEEKAARYVKEGKIAYVEDVAEGLENAPAALIGLFSGRNVGKQVVVVARE

SEQ ID NO: 112306 - protein, 49 aa, Oryza sativa
  unsure (1)..(49): unsure at all Xaa locations
  Clone ID: PAT_MRT4530_16203C.1.pep
RTKTVCXTGAGGFVASWLVKLXXSRGXYTXHXTVRNPXILIFTAFCSCS

SEQ ID NO: 112307 - protein, 272 aa, Oryza sativa
  Clone ID: PAT_MRT4530_16204C.1.pep
ISTDLYGRAPLLRPTLRRPQAAGGMHVDVQGGARARVVRGLPQAHHRRRAQPEGVAGADTGARGGAPPDGVRLRKEERSEKKIGARMRKKREKKGADMWGHVFYYFSGIELHLTNSLLLYLLLYLSIHNSKSRLAIDELEPVVGYTIELVLRGGRVTATARFNGYRGNHAVTVRIKLSIDSGLVRICQHQPDHIQVVEGDATMERVDDDEDGMAARESIFFTGWNQNSVPGGVLNIFICVALILISLVLVAMALKELENDSTPTCFEQLSFG

SEQ ID NO: 112308 - protein, 392 aa, Oryza sativa
  unsure (1)..(392): unsure at all Xaa locations
  Clone ID: PAT_MRT4530_16205C.1.pep
CRCRLSQRARTRFSHEESNWERQEKRQHPKRKKXAPTGIVVAGPKAELSPKICLSQEXTPTRSAATTSENLRRTATAPAPRRQSIAMGKLEPXTHTGSIHAVGLDGERVREKNGCPLPHTSLPDVAXFADKVAVARGHMSRKVNVERTVAXLTVTSDHQTASPAPCHPPHRAVDXIRHSAPAVQNDAALERPPKHDXSRPKSGGGDRILPGGRQTPSCRAAPADQLLPPPTRLRRXCHRPLDSVGRRHHCLPPQTSSASATSARXRSHPGGLDPPPEWPDPSSLPPTVAVAASHAASHPAQMAPDTVAVVRFAQVPPVXLAALLERGRRSRRRRPCRRAALPATGAAPPRPWWLVPRERRRSLPPRQPTRAGSPRRRRQRRCWGVLRHGCGK

SEQ ID NO: 112309 - protein, 119 aa, Oryza sativa
  unsure (1)..(119): unsure at all Xaa locations
  Clone ID: PAT_MRT4530_16206C.1.pep
HHQAPPPPXSAPPPAPTPPPAQPPXPRLRRLLSPPSRLRRSPSPLPSATXPPRRRPPPPAGRSHPGGLDPPPEWPDPSSLPPTVAVAASHAASCQERHAPPDLAAIGPDPPPAEPDPPH

SEQ ID NO: 112310 - protein, 365 aa, Oryza sativa
  unsure (1)..(365): unsure at all Xaa locations
  Clone ID: PAT_MRT4530_16207C.1.pep
RSSRRHLRKGYDTKGAAVAGIVVAGPKAELSPKICLSQEXTPTRSAATTSENLRRTATAPAPRRQSIAMGKLEPXTHTGSIHAVGLDGERVREKNGCPLPHTSLPDVAXFADKVAVARGHINRWLRHESVVRVTSDHQTASPAPCHPPHRAVDXIRHSAPAVQXCGTRTSTEAXCSRPKSGGGDRILPGGRQTPSCRAALAAHRSLGSAAAITTRLHRRHHSAPPPAPTPPPAQPPCPATISHPASSTTGSRARRAMHAVAGPADQLLPPPTRLRRLLSPPSRLRRSPSPLPSATXPPRRRPPPPAGRSHPGGLDPPPEWPDPSSLPPTVAVAASHAASCQERHAPPDLAAIGPDPPPAEPDPPH

SEQ ID NO: 112311 - protein, 69 aa, Oryza sativa
  Clone ID: PAT_MRT4530_16208C.1.pep
MGHPCLRAGPARPDSWWAVPEREAQPMGQSADRAMPARWLVGRAWAEPCRAGLLAIYKASKDTGVVVPN

SEQ ID NO: 112312 - protein, 94 aa, Oryza sativa
  Clone ID: PAT_MRT4530_16209C.1.pep
MGHRYPMADPLSSRLLPPSEATAITPTVFGLGRSSTPMGTGGGSAQSETATPVILGLGGSITPVGADGDKLSLSLKEMSYRFELLVITDILFAS

SEQ ID NO: 112313 - protein, 207 aa, Oryza sativa
  Clone ID: PAT_MRT4530_1620C.1.pep
GAEISAADSSPSGRFLPLPVLYNCSPCLSPPFPPLAARSPRRIRARAVVLSLHRRRRASVRRRRRLGLPPVSASPPSASPRRRRPRPLLRFARRPPEHRRPRRPEPRRRLPPLRSSFPPSSSTRGEPRTAPFASPFPPLSRAPLRRAVGRRRRPSGRGCAAFRRPCRRGRLRARPAAARRCSFGRFALRGSRSRRLGKRARQVTSSL

SEQ ID NO: 112314 - protein, 482 aa, Oryza sativa
  Clone ID: PAT_MRT4530_16210C.1.pep
MADRTKGTEEKGLGEQEQSLAVVVALEPTVPPEGSSDSDVADEDEEYSSPSDPCPSPSPKRRKKGNGEEGDKDYIPPKEGETAPRRSKRQPKKKVPSKDDDVPANTTGTKKSERSAKAKKRKGERSVNRKDEGFHVVTHVSPKGEPLAPKTARAKFISQCGIIVREKIPITVKDCHYVSNGDKEVLWKELKKIFQFPDGSEAAVRNCALQTMAKSWCGWKTTLNKKFVKTGRTPFSTYANITPNQWNDFLTLKNSSEEIRRSQKYAELAKKNKFPHRLGSAGYAPKVEQWTKEEEEMRKKGQPVPMEEWTQRSRNWFTKKRSFKPKREKDVLSTALGTPEHGGRVRGMLSKMSWKEGFKNDPHKKREAYKDKLRDEGAAEFERQMMDFCVKHMLLPHPETKEPEPDYPFNDLKENTPCRLHVPRLECRTSFDDKGITNVQRDLCHFIHHECCRVKGHFFDPEGALAASDEFKDLQEWNTAMP

SEQ ID NO: 112315 - protein, 1598 aa, Oryza sativa
  unsure (1)..(1598): unsure at all Xaa locations
  Clone ID: PAT_MRT4530_16211C.1.pep
MAEAATGATDTSLPPPPPHVVLMASPGAGHLIPLAELARRLVSDHGFAVTVVTIASLSDPATDAAVLSSLPASVATAVLPPVALDDLPADIGFGSVMFELVRRSVPHLRPLVVGSPAAAIVCDFFGTPALALAAELGVPGYVFFPTSISFISVVRSVVELHDGAAAGEYRDLPDPLVLPGCAPLRHGDIPDGFRDSADPVYAYVLEEGRRYGGADGFLVNSFPEMEPGAAEAFRRDGENGAFPPVYLVGPFVRPRSDEDADESACLEWLDRQPAGSVVYVSFGSGGALSVEQTRELAAGLEMSGHRFLWVVRMPRKGGLLSSMGASYGNPMDFLPEGFVERTNGRGLAVASWAPQVRVLAHPATAAFVSHCGWNSALESVSSGVPMIAWPLHAEQKMNAAILTEVAGVALPLSPVAPGGVVSREEVAAAVKELMDPGEKGSAARRRARELQAAAAARAWSPDGASRRALEEVAGKDMESREWMYHWPRFLSTYRNEVAKFIGIAKAHPEKNNMRKIICPCADCKNEIAWDFDDAFKVKEHLVTRGFMDKYEIWTRHGEEQVDGPENVVPTQVEDMVHDDGSVEDKIDLEEMLRHAEPEGPRQSGIDIDVFLKPLLEDMADLWKEGLKVWDEYLREYFTVKAIIFMTINDYPTMFSVSGQIKGKTGCVICLNGTYYRYLPGYNKLVYMRHRRFLRTNHKYRKMKAEFDGTEETDPAPKPTSGEKVCAMTEKIVCEFGKMTKKPSKGTKRKKPEKKTKGGDSKKQDDSSKPDDKLPPPFNKHSIFFKYLPYWKDLEVQHAIDVMHLEKNVFDNIVGTLLDMPKKTKDGLQSRMNLVEMGIREELHPQEGEKNGKMVALGPLYLHQMWSYERYMAVLKGYVRNRAHPVLSMVEGYSTEEVVDGVRVEAIDEAGKKQSYFGFIEEIWEIDYGHTMQFPIFKCQWVKYPNGVNVDKFGFTVVDLASVGHKDDPWKIKNVETSTQKTVKPYMRTDGCRNFLLPHASAVLRRRPPATFTLRTSSSAAADRRRPGAVTETTAPCCRSTARDLHHSAAAAADPSTARPLHRRQLLHRHQLLHRHRPLHRARGHRWPLHCRQPLYRAHGMWVHRFETMADSTKGTEEKGSGEQEQSLAVVVAPEPTVAPEGSSDSDVGDEDEEYSSPSDPCPSPSPKRRKKGDGEEGNKDYIPPKEGCGIILREKIPITVKDWDHVSNGDKEVLWKELKKIFQFPDGSEAAPQVVHEGFESYDIDFPTADGVSVLGDAVDLVILWHKNDISFGLGTDAMQKPVVPKPGLGKPSRPPKRKVTDKAEEPEMQKENPVLEVPLEITLPEAAMEIAPPEAAMEIPVPDVPMEITVAEPEVSHDSKSKDENKEKFMVTVFRGGKERAKLRDDDPQKAAELAGPTYFATDDCPEKYEHGKALLLEWALKEAPWEMRRLHNFYMEASKKGLGNITARSPADCFGKEGYVWLDFSDLHAIYRQDKMDVNYVGIWCMMHYMDAKKKKEPIGFLDPTRICQTQHTVRLAPGSDQLKGKNPKEIAEYKKGLHKEKLITVAQYIGRAFLHFQNKRVVMAAYNFKVNGRYRTNAEDXITNVQRDLCHFIHH

SEQ ID NO: 112316 - protein, 647 aa, Oryza sativa
  unsure (1)..(647): unsure at all Xaa locations
  Clone ID: PAT_MRT4530_16212C.1.pep
RSKPMQLNPKARTRQNKTKAKRPDSDPADPICSRSGLPQGASPQSQLPQFDPSTAVQAPMTFAQAVPSGYGANQPMVFGTGHQSTAAAQPHLRPRTXQLSWPSQQGVMIKSDGEKGLPLSWGIKNHPIPPQFKFPHVPRYSGETDPKEFLSIYESTIEAAHGDENTKAKVIAFTHGSNCAMSLFLTFEALMRSRKHNKVFSALARGXGESTREYVRRFSQARCQVQDITEASVINATSTGLLKGELTRKIARKEPRMLEHLFRIIDGYAXGEKDTKRRQEIQAEYDKTAHAQAQIQAQVTSSAPVLIHSTPPVNQGQPLRPNHAPMTWKXFRTDRAGKAVMAGEEVQALRKEFDAQQAGGQQQQGNTQELRQQQARAEEATREAVLNQAPQAEQRQDAQXRVIXVITRSXPPSQVSKRQKKMQLRAVHSIVSAGEGVPRYLTQQISFRPKDAEGVLFPHQDXVGAEMVGIEVRHILIYGGSSADVIFAGTYAKMGLPTLALSQAPTSLRGFGTQENKREEEILFDIVDIPYNYNAIFGXGTLTKFEAVSYHNYLKLKMPSPAGVVVVKGSHPSATMVALVASFDRGVHTLEVERQERTRPTLKPXPHGKVVWLQIDDSDPAKIISLGGDLSEQEVNSIQEIYVYAAN

SEQ ID NO: 112317 - protein, 183 aa, Oryza sativa
  Clone ID: PAT_MRT4530_16213C.1.pep
MAHTVGDASIFLPNQMRSHQLSFSSLASTASPTIPLKPNVTPPSLNPKTLIHVFCALATRKMNQSLRGSHSHCWILRQGGLMRIGKDSDFDRAPISGVVGLGNPVQYRPLVRETFPVPCVGVRGEIPRCHCSRRMHDVMHPTHVVTPKQNQSRLGSYTFPNLDASHTRLSSHQLIADKGISVA

SEQ ID NO: 112318 - protein, 1420 aa, Oryza sativa
  Clone ID: PAT_MRT4530_16214C.1.pep
MAGLRKGIREHQLLHLRRDITTSPRDAYEVHDYNFEQVASKLPFYDGKYDSVAYIDWELAVDNEFDIYDFSDTQMIKAASNKFTSSALFWWTYVSNKPETWDELKTMMRKRSVTSYYKCTLREKLEHLKQGDRTVREYIHEFKVCIIYSGLKECNENTMRRFFNGLNSEIQVLLDNVTYNHIGHLFMLARSIESQIISKARMHDQCDLSPISESPIYLCNDDVQTLEEQSFVSPVTNVLQEDQHIQEKENGILEKKEDEAPAMSKESSQGKLNGAERNEGIGLICTDKINNPRRGVSIAKAQHNVSDMESREWMYHWPRFLSPYRNEVSKFIAIAKAHAEKNNMRKIICPCADCKNEIAWDFDDAFKVKERLVTRGFMDKYEIWTRHGEEQVDGPENVVPTQVEDMVHDDGSVEDKIDLEEMLRHAEPEVLMGSARALQKAAKEVLYDESKGCDSEFTTLRSVLELMRLKAKHGWSDTSFDSLLELLQKMLLRPNSLPSSTYQAKKLICPLSLGVEKIHVCVNHCILYRKEYASFDECPTCNASQYKSNSNTGLEPSDTTEGRQRKIPQLVMWYLPVKDRIKRIYSNPRDAELMCWHEEGHKKDGMIRHPADARQWINFDAQYREFAKDPRNIRFALSIDGGPRQSGIDIDVFLEPLLEDIADLWKEGLKVWDEYLREYFTMKAIIFVTINDYPAMFSVSGQIKGKTGCVICLNGTYYWYLPGSNKLVYMRHRRFLRTNHKYRKMKAEFEGTEEIDPAPKPTSGEKKPSKGTKRKKPEKTMWDSKKQDDSSKSDDKLPSPFKKHSIFFKYLPYWKDLEVRHAIDVMHLEKNVFDNIVGTLLDMPKKTKDGLQSRMDIVEMGIREELHPQEGEKNGKMVALGPLYLHQMWSYERYMAVLKGYVRNRAHPEGSMVEGYSTGEVVECCIDYLKDGYAIGVPVPRHEGRLSGRGTIGKKRFVTHDHKSFQEAHFSVLHQFAIVEPYIDQHIELIRANNKGRTTEWIMKEHKRLFIDWLRDLDLPKGQTTDEITMKRLACGPSTTVNSWQGYDINGYSFSTRARDNKTCTQNIGVRVEAIDEAREKQSYFGFIEEIWEIDYGHTMQFPIFKCQWQKYPNGVNVDKFGLIVVDLASVGHKDDPWVLANRVAQVFYVKVPSNLKKDIVLPGKQKILGVDGVEDVEDYNQYDSMTLYSQFVQKIKNVETSTQKTVKPYMRMDDGVSLLRDAVDLVILWHKNDISFGLGTDATQKPVVPKPELGKPPRPPKKKVTDKAEDPEMHKENPVPEVPPEIEVLEVPMEIPVLDVQMEIKVAELEVQFVASVGTEIEEVPGLEWNGTESEIFENPSPTKDPEVQDTTVPEKATTSSEVPRVLRSHDSKSKDENKEKFIVTVFRGGKERAKLRDDDPQKAAELAGPTYYVGVWCM

SEQ ID NO: 112319 - protein, 52 aa, Oryza sativa
  Clone ID: PAT_MRT4530_16215C.1.pep
MASTPSMNPSTLLPLRGAPENSVKTGGRLEKIVLQKWQLHFVSLEEAWHPGV

SEQ ID NO: 112320 - protein, 2203 aa, Oryza sativa
  unsure (1)..(2203): unsure at all Xaa locations
  Clone ID: PAT_MRT4530_16216C.1.pep
MESREWMYHWPRFLSPYRNEVSKFIGITKAHAEKNNMRKIICPCADCKNEITWDFDDAFKVKEHLITRGFMDKYEIWTRHGEEQVDGPENVVPTQVEDMVHDNGSIEDKIDLEEMLRHAEPEVLMGSARGLNNFEALQKASKEVLYDESKGCDSEFTTLRSVLELMRLKARHGWSDTSFDSLLELLQKMLPGPNSLPSSTYQAKKLICPLSLGVEKIHACVNHCILYRKEYASLDECQTCDRLKVWDEYSREYFTVEAIIFVTINDYPAMFSVLGQIKGERGRHRHAGPTRQRLRALVHGGSSPWTREKGRTTWRTRGTHAALTRRPRGGHAAAEPTAPIYPTAAESSRPARASGSSQPGAMARRRRGTGDDQWTAARHRRTAVKRLSGDATTEREEEEGRGNRPHRGSPTGEERGDGDRRRGATEGGRQAADGVRDDLRNEMERIREGERDHRGRERRPKAAAMAALTXRGGDEAPAGNLDGGVVDEVDLGHANPTMETKSEEEDAGMDFIGAERSGTAGGGPISSADVGEVEVEREAGFEFRILAISGAGAGEREGEWVREARRMRGRGRRGTEEAGTWARRHGREVGDGPDKWAPPVGDPGYLPGSNKLVYMRHRRFLRTNHKYRKMKAEFDGTEETDPALKPTSEEKVCAMTEKIACEFGKMTKKPSKGTKRKKPEKNTKQGDSKKQDNSSKPDDKLPPPFKKHSIFFKYLPYWKDLEVRHAIDVMHLEKNVFDNIVGTLLDMPKKTKDGLQSRMDLVEIGIREELHPQEGEKNGKVYLPPACFTLTPEEKKSFCNSLRDVRVPIGFSSNINRLVSMKDLSVSGYNSHDCHVLLTVFLAIAIRAVKPEHLKVAITRLCYFFNAVSQKVISLEELGNLRTFAHETQCQLEMCFPPSFFDMMEHLIAHIVPQMVALGPLYLHQMWSYECYMAVLKGYVQNRAHPEGSMVEGYSTEEVVECCIDYLKDGYAIGVPVPRHEGRLSGRGTIGKKRFVTHDHKSFQEAHFSVLHQFAIVEPYIDQHIELIRANNWLRDLDLPEGQTTDEITMKRLACGPSTTINSWQGYDINGYSFSTRARDNKTCTQNSSVRVEAIDEAGEKQSYFGFIEEIWEIDYGHTMQFPIFKCYQFVHKIKNIETSTQNTVKPYMRTDGVGKNVKGVYIFAVGRSSQADHPPAKIIALYKGKPAAPKFLSPGGNPRNFGATAAPCRRSTVRELHNSTADAADPSTARTASAGPSTACTAAPPPPPAATSLSISLTAERLHRPIVVHERRRPRPNDVFGRSSSTAEPRRRPFLRRPRPKLVVGRSSNTDRFETMADSTKGTEEKGLGEQEQSLAVVVAPEPTVPPEGSSDSDVADEDEEYSSPSDPCSSPSPKRRKKDDGEEGDKDYIPPKEGDWDHVSNGDKEVIWKELKKIFQFPDGSEAAVRNCALQTMAKSWRGWKTTLNKKFVKTGRTPFSTYANITPNQWDDFLTSKNSPEEIQRSQKYAELAKKNKFPHRLGSAGYAPKVEQWTKEEEEMRKKRQLVPMEEWTQRSRNWHGGRVRGVSSKMSWKEGFKNDPHKKREAYKDKLRDEGAAEFEWQMMDFCVKHMLLPRPETKEPEPDYPFDDLKENTPCRLHVPIGRSGKTLEAATTIVIPGRTYNEEFIPDAYVKVQPQVVHEGFESYDIDFPTTDGVSVLGDAVDLVILWHKNDISFGLGTDATQKPVVPKPGLGKPPGPPKRKVTDKAEEPEMQKENPVPEVLPEIALPEKAKEIAPPEAAMEIPVPDVPMEITVAEPEVQFVASVGSEIEEVSGLEWDGTEPEIFEDPSPAKDPEVQETTVPEKATTSSEVPRVLRSHDSKSKDENREKFMVTVFRGGKEHAKLRDDDPQKAAELAGPTYFAIDDCPEKYEHGKAFLPEWALKEGPWEMTRLHTFYMEASKKGLGNITARSPADCFDEEGYVWLDFSDLHAIYRRDKMDVNYVGVWCIMQYMDAKKKKEHIGFLDPTRICQTQHTMRLAPGSDQLKSKNPKEIAEYKKGLHKEKLITVAQYIGRAFLHFQNKRVVMAAYNFNDHYICLLIHPKDGTVVVLDPLDYSHKQYKEFLIILQYAYQYYKFKGGEQTRIREKLLCHKQPRGTVLCGYYACEFLRVNGRYRTNAEDLPRLECRTSFDDTGIPNVQRDLCHFIHHECCHVKEDFFDPEGVPATSDEFKDLREWNTAMP

SEQ ID NO: 112321 - protein, 2034 aa, Oryza sativa
  unsure (1)..(2034): unsure at all Xaa locations
  Clone ID: PAT_MRT4530_16217C.1.pep
MESREWMYHWPRFFSPYRNKVAKFIGITKAHAEKNNMRKIIYPCADCKNEIAWDFDDAFKVKEHLVTRGFMDKYEIWTRHGKEQVDGPESVVPTQVEDMVHDDSSVEDKIDLEEMLRHAEPEVLMGSARGLNNFESLQKAAKEVLYDESKGCDSEFTTLRSVLDLMRLKARHGWSDTSFDSLLELLQKMLPRPNSLPSSTYQAKKLICPLSLSVEKIHACVNHCILYRKEYASLDECPTCGASRYKSNSNTGLEPSEATEGRQRKIPQLVMWYLPVKDRIKRIYSNPRDAELMRWHEEGRKKDGMIRHPADARQWINFDAYGTLDLPXSTDGVNSFGDMSSSHSTWPVLLTMYNLPTWLCQKRKYVLLCILIQGPRQPGIDIDVFLEPLLEDMADLWKEGLKVWDEYLREYFTVKAIIFVTINDYPAMXSVSGQIKGKTGCVICLNGTYYRYLPGSNKLVYMRHRRFLRTNHKYRKMKAEFDGTEETDPAPKPTSGEKVCAMTEKIVCEFGKMTKKPSKGTKRKKPEKNTKGGDSKKQDDSTKPDDKLPPXFKKHSIFFKYLPYWKDLEIRHAIDVMHLEKNVFDNIVGTLLDMPKKTKDGLESRMDLVEMGIREELHPQEGEKNGKVYLPPACFTLXPEEKKSFCNSLRDVRVPIGFSSNISRLVSMKDLSVSGYNSHDCHVLLTVFLAIAIRAIQPEHLKVTIIRLCYFFNAVSQKVISLKELGNLRTFAHETQCQLEMCFPPSFFDMMEHLIVHIVPQMVALGPLYLHQMWSYERYMAVLKGYVRNRAHPEGSMVKGYSTEEVVECCIDYLKDGYAIGVPVPRHEGRLSGRGKKGKKRFVTHDHKSFQEAHFSVLHQFAIVEPYIDQHIELIRANNWLRDLDLPEGETTDEITMKRLACGPSTTVNSWQGYDINGYSFSTRARDNKTCTQNSNVRVEAIDEAGEKQSYFRFIEEIWEIDYGHTMQFPIFKCHQFVQKIKNVQTSTQKTVKPYMRTDGVGKNVKGXMIVELXRSSQADRTPAKIFALYKGKPTAPKFLSPGGNPRNFGAVRLPSARSSAAGSSTTHAAAGGPSTARPAAAGPSTAXAPLPPPPPPSATPPRKGERLDRPIVVHEQRRPRPNDVFGRSSSTAEPRRRPFVVHGRSXRRPRPKLVVSRSSNMDRFETMADSTKGTEEKGLGEQEQSLAVVVAPEPTVPPEGSSNSDVGDEDEEYLSPSDPCPSPSPKRRKKGDGEEGDKDYIPPKEGDWDHVSDGDKEVLWKELKKIFQFPDGSEAEVRNCALQTMAKSWGGWKTTLNKKFVKTGRTPFSTYANITPNQWDDFLTLKNSPEEIKRSQKYAELAKKNKFPHRLGSAGYAPKVEQWTKEEEEMRKKGQPVPMEEWTQRSRNXHGGRVRGVSSKMSWKEGFKNDPHKKREAYKDKLRDEGAAEFERQMMDFCVKHMILPRPKTKETEPDYPFDDLKENTPCRLHVPIGRSGKTLKAATAIVIPGRTYNEQFIPDAYAKVQPQVVHKGFESYDIDYPTADGVSVLGDAVDLVILWHKNDISFGLGTDAMPKPGLGKPPRPPKRKVTDKADDPEMQKENPVPEVPPEIALPEAAMEIAPPETAMEIPVPDVPMEITVAEPEVQFVASVGSDKEEVPGLEWDGTEPEIFEDPSPAKDPEVPRVLRSHDSKSKDENKEKFMVTVFRGGKERAKLRDDDPQKTAELAGPTYFATDDCPKKYEHGKALLPEWALEEAPWEMRRLYNFYMEASKKGLGNITARSPADCFGEEGYVWLDFLDLHAIYRRDKMDVNYVGVWCMMQYMDAKKKKEPIGFLDPTQICQTQHTVTLAPGSDQLKGKNPKEIAEYKKGLHKEKLITVAQYIGRAFLHFQNKRVVMAAYNFNDHYICLLIHPKDGTVVVLDPLDYNHKQYKEFLTILQYAYQYYKFKGGEQTRTREKLLCHKQPRGTVLCGYYACEFLGVNGRYRANAEDLPRLECRTSFDDTGITNVQRDLCHFIHHECCHVKGDFFDPEGAVVASDEFKDLREWNTAMP

SEQ ID NO: 112322 - protein, 629 aa, Oryza sativa
  unsure (1)..(629): unsure at all Xaa locations
  Clone ID: PAT_MRT4530_16218C.1.pep
MADSTKGTEEKGLGEQEQSLAVVVAPEPMVPPEDSSGSDIAHEXDPCPSPSPNRRKKGDGEEGDKDYIPPKEAFTDWDHISNGDKEVLWKELKKIFQFPDGSEAAVRNCALQTMAKSWHGWKTTLNTKFVKTGRTPFSTYANITPNQWDDFLTLKNSLEEIQRSQKLRGIRTKVEQWTKEEEEMRKKGQPVPMEEWTQRSRNWARARTPKITDEGKHGGRVRGVSSKMSWKEGFKHDPHKKREAYKDKLRDEGAAEFERQMMDFCVKHMILPHPESKEPEPDYPFDDLKANTPCRLHLQVVHEGFESYDIDFPTADGVSVLGDAVDLVILWHKNHISFGLGTDATQKPVVPKPGLGKSPRSPKRKVTDKVEEPEMQKENPVRKVPPKIAVPEAAMEIPVPEVPMEITVAEPEVQFVASVGMQYMDAKKTKEPIGFLDPTRIYQTHHTVRLAPGLDQLKDKTPKEIAEYKKGLHKEKLITVAHDHYICLLIHPKDRTVVVLDPLDYKHQSYKEFLTILQYAYQYYKFKGGEQTRTREKLLCYKQLRGTVLCGYYACEFLRVNGRYRTNAEDLPRLECRTSFNDTCIKNVQRDLCHFIHHECCHVKGYFFDPEGACHARNFYPKFQTLTCM

SEQ ID NO: 112323 - protein, 1187 aa, Oryza sativa
  Clone ID: PAT_MRT4530_16219C.1.pep
MGSARGLNNFEALQKAAKEVLYDESKDCDSEFTTLRDPVSLVIIFVTINDYPAMFSVSGQIKTGCVICLNGTYYRYLQDSNKLVYIRNQRFLRTNHKYRKMKAKFDGTEETDPAPKPTSGEKYLPYWKDREVRHAIDVMHLEKNLFDNIIGTLLDMPKKMRIKDGPSRDGNQGRVTPSRRREEWQLLQKVINLEELGNLRTFTHETQCQLEMCFPPSFFDMMEHLIVHIVPQMVALGPLYLHQMWSYERYMEVLKGYVRNRAHPEGSMVEGYSTEEVVECCIDYLKDGYATRVVPVPRHEGRLSGRGTIGKKRFVTHDHKSFQQAHFSVLHQFAIVEPYIDQHIELIRANNKGRTTEWIMKEQKHLFIDWLRDLDLPEGQTTDEITMKCGVRVEAIDEAREKQSYFGFIEEIWEIDYGHIMQFPIFKCQRKIKNVETYTQKTVKPYMRTDGCRIFSPPHASTVLRRRPPATFALRPSYSTAANRRCPRAADLRARAGRSTETTAPCRRSTDRLCRPLHRSAAAEPTHSPCMNSTTAHVRAIRHPFHRRRPLHRAAGRHLSLSISLVAERLHRPVVVHEQRRPRPNDVFGRSSSTAEPRRRPFLRHRRPFVVGRSSSTDKFETMADSTKGTEEKGLGEEEQSLAVVVAPEPTVPPEDSSDNDVADEDDEYSLPSDPCPSPSPKRREKGDGEEGDEDYLPPKEGISTLNKEKIPITVKDWDLVSNGDKEDLWKELKLCGIRSKGGAVDKREGNEEGGATGTNGAMDTEIKELGFKHDPHKTREAYKDNTPCRLHVPIGRSGKTLEATTAIAIPGRTYNEEFIPDAYAKVQPQVVHEGFESYDIDFPTQDGVSVLGDAVDLGKPLRPHKREVTDKAEEPEMHKENLVPEVPPEIAVPEVPMEIQMADVPMEITVVEPEVQFVASVETEIEEVPGLEWDSTEPEIFEDPSPAKDPEVQETTVPEKATTSSDVPRVLRSHDSKSKDENKEKFMVTVFRGGKEHAKLRDDDPQKAAKLAGPTYLATDDCPEKYEHGKALLPDWALNEGPWEMRRLHTFYMDASKKDLGNITARSPLPRLEHRTSFDDTGIKNVQRDLCHFIHHECCHVKGDFFDPEGALATSDEFKDLREWNLCHNAADSYFRRWTGLANVRLRKLSSQADGRPAYQDRRSSQSLAYMQTAAPPVKTVFSHLR

SEQ ID NO: 112324 - protein, 75 aa, Oryza sativa
  Clone ID: PAT_MRT4530_1621C.1.pep
NVLKVGLMIHEGSLVDIEEMFSGWGERVRTAVGIAVHGDVVDEPTGVFVHRALRGVVLLSKRLCVVIRRHVRLSC

SEQ ID NO: 112325 - protein, 82 aa, Oryza sativa
  Clone ID: PAT_MRT4530_16220C.1.pep
MAMMRRGGLTSPDRARDPHRAVAGRCAGADVVPERKFRGVRKQPWRKYGAEIHISQQSVRMWLGVFDTTEEATRDKTGIKTA

SEQ ID NO: 112326 - protein, 109 aa, Oryza sativa
  Clone ID: PAT_MRT4530_16221C.1.pep
MGYSLKKQMATVVEGSARQRCTFEWNTSDIEMAGRWRMLIMLLWRRRRGTRKGKESTWGHHTGRAFQTSSQWMRNCAGEVEPFKDRVFSAQLPAFLTPPAMMLAINRVS

SEQ ID NO: 112327 - protein, 70 aa, Oryza sativa
  Clone ID: PAT_MRT4530_16222C.1.pep
QAPGLRGVWWQLSRHRAYDEPRVNWFICWIAMDGLPTLFAWCSHVWLHRLFDFTRPCSAFVFVSPDLSLT

SEQ ID NO: 112328 - protein, 643 aa, Oryza sativa
  unsure (1)..(643): unsure at all Xaa locations
  Clone ID: PAT_MRT4530_16223C.1.pep
MADSTKGTEEKGLGEQEQSLTVVVAPVPTVPPEDSSDNDIADEDDEYSLPSDPCPSPSPSPKRRKKVDDEEDDKDYIPPKEGPELIRNFHVYLLVGNGATAIKTVAEEKSYVERRREGELLAPNTARAKFSSQCGIIVREKIPITVKDWDHVSNGDKEVLWKELKKIFQFLDGSEIAVWNCALQTMAKSWRGWKTTLSKKFVKTGCTPFWTYANITPNQWDDFLTLKNSPEEIQRSQKXAEYAPKVEQWTKEEEEMRKKGQPVLMEEWTQRSRXWVRARTLKITDEGKVSFEDPKLQSVADKIENLSSSEKKGLFKPKREKDVLSTVLGTPEHGGRVRGVSSKMSWKKGFKHDPHKKREAYKDKLRDEGAAEFERQMMDFCVKHMILPHPETKEHEPDYPFDDLMENTPCRLHVPIGHSGKTLEAAIAIAIPGRTYNEEFIPDAYAKVQPQVVHEGFESYDIDFSTADGVSVLGDAVDLVILWHKNDISFGLGTDATQKPVVPKPGLGKPPRPPKRKVTDKAEEPKMQKENPVLQVPPEIAVPAVAMEIPVPNVPMEITVAEPEVQFVASVGSEIEEVPGLEWDGTKLEIFENPSPAKDPEVQETTVPEKATTSSEVPRVLRSHDSKXKDENKEKFMDAIHGC

SEQ ID NO: 112329 - protein, 511 aa, Oryza sativa
  unsure (1)..(511): unsure at all Xaa locations
  Clone ID: PAT_MRT4530_16224C.1.pep
MADSTKGTEEKGSGEQEQSLAVVVAPEPTVAPEGSSDSDVGDEDEEYSSPSDPCPSPSPKRRKKGDGEEGNKDYIPPKEGNSPKEIQRSQKYAEXGQEEQISSSLRLRGIRTNGGAVDXRGGGNEEEGATGTNGGVDTEIKELXPQVVHEGFESYDIDFPTADGVSVLGDAVDLVILWHKNDISFGLGTDAMQKPVVPKPGLGKPSRPPKRKVTDKAEEPEMQKENPVLEVPLEITLPEAAMEIAPPEAAMEIPVPDVPMEITVAEPEVSHDSKSKDENKEKFMVTVFRGGKERAKLRDDDPQKAAELAGPTYFATDDCPEKYEHGKALLLEWALKEAPWEMRRLHNFYMEASKKGLGNITARSPADCFGKEGYVWLDFSDLHAIYRQDKMDVNYVGIWCMMHYMDAKKKKEPIGFLDPTRICQTQHTVRLAPGSDQLKGKNPKEIAEYKKGLHKEKLITVAQYIGRAFLHFQNKRVVMAAYNFKVNGRYRTNAEDXITNVQRDLCHFIHH

SEQ ID NO: 112330 - protein, 62 aa, Oryza sativa
  Clone ID: PAT_MRT4530_16225C.1.pep
FRALHKLDGSGLMRVSHLQGSKPEASRTTGEKSTGGLALPRCVNNNDYPGLSNGVPKARLAE

SEQ ID NO: 112331 - protein, 520 aa, Oryza sativa
  Clone ID: PAT_MRT4530_16226C.1.pep
MERESSTPASSWLGIDEAAPFAGKKATKDAAAADAFVRRWPKVVNATLVAFIMTMPPLLILLGGGRPGAPAVWIKSTVASLAARGEPKKDVLLGGLLLPGFDEQSCVSRYQSVYYRKNMTRPPSPHLLRRLRQQEALQRRCGPGTEPYRRASERLRSGQNAGDDFVATVDGCGYLVLISYRGLGNRILAITSAFLYAMLTGRVLLLDPGKTMADLFCEPFQATSWMLPGDFPLEHFRDLGEDAPESYGNVAVNRSGSVAGLRFVYAHLDHAATPANRLLYCDDHRQFLHRVQWVILRTDSYIAPGIFLNPAYKEELDMMFPNKDAVFYLLSRYLLHPTNDVWGMVTRFYHSYLKNADERLGVQIRVFDGDEPFQHILDQILECTSQEHLLPGVVVVSVHQPSHELHQHFFRSTHDMKALAEMYLLSLTDKIVTSGWSTFGYVGAGLGGLTPYIMIKPENHTVPNPPCVRAMSMEPCDHGPPYFECTKKEIDKIIDTGNLVPHVRSCEDVPWGRKLADPIS

SEQ ID NO: 112332 - protein, 200 aa, Oryza sativa
  Clone ID: PAT_MRT4530_16227C.1.pep
MAAAAAAKTTTRRRRRGVLDLEAQFAFFRSQHRHPVNAAAHALLAWPILFTGLLVLHFLPSPPALPLDPALALALAYAAAYVAADRRAGALAGLLLAAGWAASRALAARLGFALAWKAALATQLFCWTWQFLGHGLFEKRGPAVGDLPEVFLMEPFLILLQILNKQFGYEPYPGFSKNVDKKMEAILRENREELKQRKAT

SEQ ID NO: 112333 - protein, 565 aa, Oryza sativa
  Clone ID: PAT_MRT4530_16228C.1.pep
MERESSTPASSWLGIDEAAPFAGKKATKDAAAADAFVRRWPKVVNATLVAFIMTMPPLLILLGGGRPGAPAVWIKSTVASLAARGEPKKDVLLGGLLLPGFDEQSCVSRYQSVYYRKNMTRPPSPHLLRRLRQQEALQRRCGPGTEPYRRASERLRSGQNAGDDFVATVDGCGYLVLISYRGLGNRILAITSAFLYAMLTGRVLLLDPGKTMADLFCEPFQATSWMLPGDFPLEHFRDLGEDAPESYGNVAVNRSGSVAGLRFVYAHLDHAATPANRLLYCDDHRQFLHRVQWVILRTDSYIAPGIFLNPAYKEELDMMFPNKDAVFYLLSRYLLHPTNDVWGMVTRFYHSYLKNADERLGVQIRVFDGDEPFQHILDQILECTSQEHLLPGVVVSGHGGGVAPPPIARSKAVLTTGLNSWYHDSIRDMYWRSPSATGEVVSVHQPSHELHQHFFRSTHDMKALAEMYLLSLTDKIVTSGWSTFGYVGAGLGGLTPYIMIKPENHTVPNPPCVRAMSMEPCDHGPPYFECTKKEIDKIIDTGNLVPHVRSCEDVPWGRKLADPIS

SEQ ID NO: 112334 - protein, 40 aa, Oryza sativa
  unsure (1)..(40): unsure at all Xaa locations
  Clone ID: PAT_MRT4530_16229C.1.pep
MXSNWGQPTNSSMPPTAFAQVDNVGMLIFGTIIHQERLIG

SEQ ID NO: 112335 - protein, 345 aa, Oryza sativa
  unsure (1)..(345): unsure at all Xaa locations
  Clone ID: PAT_MRT4530_1622C.1.pep
SGRAAARVAFICLRDIHRRNDFIHLYPCPFVQDGPYSGRGATSKTLHLEPSGRGGDGRRGNDFGGDPWTKARRGRHKAXXRGGEDEDDDGAAAAHLTDADDGEERLDGGTNATTTGNDGRTTTTGAGEEATRVAGSSCTDARTAWNTPQRCPRRRRRRETTSRRGGTVKTTTDTGGVRSKGRRGRGRPCRCDAEGGDGXLDGARARRKGLPEEMSMRRKERPARRRRCXGGFRAKPGSSRRRGRRCDVDGGDGDVGCHTDDGQXPAGGSTVAPMPLVAGGGTVPASFRRGDGETGXRGRRCRAEGGDGTAGRRAGEAGEAAGGGRRHGRERXRRGEVVRRRGGSG

SEQ ID NO: 112336 - protein, 43 aa, Oryza sativa
  Clone ID: PAT_MRT4530_16230C.1.pep
MAMVQEELRRKEAKLRIGTRVLALPLYHPDRPCNLSTLTVRRH

SEQ ID NO: 112337 - protein, 45 aa, Oryza sativa
  Clone ID: PAT_MRT4530_16231C.1.pep
DALSFIADQTLYVFVNMGMSGSAILSIIERLKNPRALDSPHIPLF

SEQ ID NO: 112338 - protein, 98 aa, Oryza sativa
  Clone ID: PAT_MRT4530_16232C.1.pep
REKHIPREFYNLQEQKQNTLKKTLTTHRHSTSTKFLAMQRKEISPKLAPKTFFRFGGKQKKFSDGEGVQQGFLLVSAKKTRHGPHGENQIYNDRLGGD

SEQ ID NO: 112339 - protein, 65 aa, Oryza sativa
  Clone ID: PAT_MRT4530_16233C.1.pep
RGKPEKTTPSAWLPASMPGDGPNGLPRCVPRYSGTHGRSQALPDTPTARSGAPGPPPPALATLHA

SEQ ID NO: 112340 - protein, 61 aa, Oryza sativa
  Clone ID: PAT_MRT4530_16234C.1.pep
FFFFFFLKQLVIDIHTDTYSLTRPHGTALHVSRPTLPYLLRRRTTYLTFWGTTDLQTFHDT

SEQ ID NO: 112341 - protein, 57 aa, Oryza sativa
  Clone ID: PAT_MRT4530_16235C.1.pep
MELVETRTPPQEDENLECACTNCSGGFGKGMPRRRLQREKRRNTTTAIRQGLKENQD

SEQ ID NO: 112342 - protein, 54 aa, Oryza sativa
  Clone ID: PAT_MRT4530_16236C.1.pep
MAAAEEAMGGERADPSRASCAAAVGIGNRARELGATAYPHLGNQKTVSSLGKKG

SEQ ID NO: 112343 - protein, 49 aa, Oryza sativa
  Clone ID: PAT_MRT4530_16237C.1.pep
MARASSSLRAIVVTSSFRAIATAKFTRVEWEGRHIHGMEEESNGDGLKQ

SEQ ID NO: 112344 - protein, 56 aa, Oryza sativa
  Clone ID: PAT_MRT4530_16238C.1.pep
FIILLGKSTARRAIVASAMGNGALHTNGAGADTKGKPIKCKAAVAHGPGEALLMEE

SEQ ID NO: 112345 - protein, 88 aa, Oryza sativa
  Clone ID: PAT_MRT4530_16239C.1.pep
MARKAIIVFALLLVAALCFVASAQDPQANKQGGGGGGGGGGPPGYGHYPPWNGGYPGRDPWRHDDPWRHGCRWGCCHRGHHGECFRCC

SEQ ID NO: 112346 - protein, 100 aa, Oryza sativa
  unsure (1)..(100): unsure at all Xaa locations
  Clone ID: PAT_MRT4530_1623C.1.pep
MSTSAIEGGVEKGEREGEEMRWSTTKYGLFAIYGDPRTEKSVFLRPPPRVRDTTSGTRTRPALQLNASSHTIRPTQRGSKTEKTRGATELXRNIGADAQL

SEQ ID NO: 112347 - protein, 155 aa, Oryza sativa
  Clone ID: PAT_MRT4530_16240C.1.pep
MGLQEDFEEYAEKVKTLPESTSNEDKLILYGLYKQATVGDVNTSRPGIFAQRDRAKWDAWKAVEGKSKEEAMSDYITKVKQLQEEAAALKAVFRAYLVGEMNIFECHIGRLTRCRRGFRTQMKKQIVYSPGTREMNLLSLIKPSLAHVGYCSTYG

SEQ ID NO: 112348 - protein, 73 aa, Oryza sativa
  Clone ID: PAT_MRT4530_16241C.1.pep
TTKDGTNCNTLFDSNSLILIPFHGQPCHCAPGIAQALDLELLFNQDASMLMHAKTALSAGAVGRYLCDHGSAY

SEQ ID NO: 112349 - protein, 1526 aa, Oryza sativa
  Clone ID: PAT_MRT4530_16242C.1.pep
MYHWPRFLSPYRNEVSKFIGIAKAHAEKNNMRKIIGPCADCKNEIAWDFDDAFKVKEHLVTRRFMDKYEIWTRHGEEQVDGPENVVPTQVEDMVHDDGSVEDKIDLEEMLRHAEPEVLMGSARGLNNFEALQKAAKEVLYDESKGCDSEITTLRSVLELMRLKARHGWSDTSFDSLLELLQKMLPRPNSLPSSTYQAKKLICPLSLGVEKIHACVNHCILYRKDYASLDECPTCGASRYKSNSNTGLEPSEATEGRQRKIPQLVMWYLPVKDCIKRIYSNPRDAELMCWHEEGRKKDGMIRHPANAHMADLWKEGLKVWDEYLREYFTVKAIIFVTINDYPAMFSVSGQIKGKIGCVICLNGTYYRYLPGSNKLVYMRHRWFLRTNHKYRKMKAEFDGTEETDPAPKPTSGEKVCAMTEKIVCEFGKMTKKPSKGTKRKKPEKNTKGGDSKKQDDSSKPDDKLPPPFKKHSIFFKYLPYWKDLVVRHAIDVMHLEKNVFDNIVGTLLDMPKKTKYGLQSRMDLVEMRIREELHPQEGEKNGKVYLPPACFTLTPEEKKSFCNSLRDVRVPIGFSSNISRLVSMKDLSVSGYNSHDCHVLLTVFLAIAIRAIKPEHLKVAITRLCYFFNTVSQKGSMVEGYSTEEVVECCIDYLKDEYAIGVPVPRHEGRLSGRGTIGKKRFVTHDHKSFQEAHFSVLHQFAIVEPYIDQHIELIQANNKGRTTEWIMKEHKRLFIDWLRDLDLPEGQTTNEITMKQLACGPSTTAIDEAGEKQSYFGFIEEIWEIDYGHTMQFPIFKCQWVKYPNGVNVDKFGLTVVDLTSVGHKDDPWFVQKIKNVETSTQKTVKPYMRTNGVGKNVKGIIRFETMTDSTKGTEEKGLGEQEQSLAVVVAPEPTVPPEGSSDSDVADKDEEYSSPSDPCPSPSPKRRKKGDGEEGDKDYIPPKEGETAPRRSKRQPKKKVPSKDDDVPANTNGTKKSERSAKAKKMKGERSVNRKDEGFHVVTHVSPKGEPLTPKTAHAKFSSQCGIIVREKIPITVKDWDHVSNGDKEVLWKKLKKIFQFSDGSEAAVRNCALQTMAKSWRGWKTTLNKKFVKTGCTPFSTYANITPNQWDDFLTLKNFPEEIQRSQMFAELAKKNKFPHHLGSAGYAPKVEQWTKEEEEMRKKGQPPKREKDVLSTALGTPEHGGRVRGVSSKMSWKEGFKNDPHKKREAYKDKLRDEGAAEFERQMMDFCIKHMLLPCPETKEPEPDYPFDDLKENTPYRLHVPIGCSGKTLEAATASAIPGRTYNEEFIPDAYAKVQPQVVHEGFESYDIDFLTAYGVSVLGDAVDLVILWHKNDISFGLGTDATQKPVVPKPGLGKPPRPPKRKVIDKAEEPEMQKENPVPEVPPEIALPEAAMEIAPPEAAMEIPVPDVPMEITVAEPEVQFVASVGSEIEEVPGLEWDGTEPEIFEDPSPAKDPEVQETTVPEKATTSSEVPRVLRSHDSNSKDENKEKFMVTVFRGGKEHAKFRDDDPQKAAELAGC

SEQ ID NO: 112350 - protein, 915 aa, Oryza sativa
  unsure (1)..(915): unsure at all Xaa locations
  Clone ID: PAT_MRT4530_16243C.1.pep
MGAIGGDEVVQWDKMDGGEVVNGGGGGGVGKLERILVSVRLRPLSDKEIARGDPSEWECINDTTIISRSTFPDRPSAPTAYSFASIFAYGQTSSGKTYTMTGITEYTVADIYDYIGKHEERAFVLKFSAIEIYNEVVRDLLSAENTPLRLWDDAEKGTYVENLTEVVLRDWNHLKELISVCEAQRKTGETYLNENSSRSHQILKLTIESSAREFLGKDKSTTLVASVNFVDLAGSERASQALSAGARLKEGCHINRSLLTLGTVIRKLSKVRNGHIPYRDSKLTRILQPSLGGXCKNCNYLYNESCPXHMEQSRNTLLFASCAKEVVTNAQVNVVMSDKALVKQLQKELARLESELRCPASYSSLESLVKEKDNQIRKMEKEIKELKLQRDLAQSRLQDLLQVVGDNHVHVSKQSSVSGRNFTFDVPQTCEDEQSTTESSEVVDSVQNFRFQGRRVAQREHKPQQAENNVQFTTPSRYSVSSPPFSGMLPTNRSDHLSQISNEDSDDICKEVRCIETNETGGNECLESSAVGSNSLQDPNAGSSMHINNDSNSSMNSRLRDESPVTLEQHLENVRKPFANIVKDLGSSTRNSSSSKVLGRSRSCRSLTGSSLFEDLEKDDCTPPNRSFIDFAGRPQNCQRRGSALNYDAESETLSRAGSMLSEITTTRDGLKANSSVAGDTEFTGIGEFVAELKEMAQVQYQKQLGHSGNGDLAEGTIRSVGLDPITDALQSPSRWPLEFEKKQQEIIDFWHACNVSLVHRTYFFLLFKGDPADSIYMEVELRRLSFLKDTFSNGAIASIPNTSLVSSAKKLQREREMLCRQMQRRLSIEERESMYTKWGVSLASKRRRLQVARCLWTETKDLEHVRESASLVARLIGLLEPGKALREMFGLSFAPQQFTRRSYNSWRYGRSSLN

SEQ ID NO: 112351 - protein, 273 aa, Oryza sativa
  Clone ID: PAT_MRT4530_16244C.1.pep
PRGARDHGSEVPRVLRSHDSKSKDENKEKFMVTVFKGDKERAKLRDDDPQKAAELAGPTYFTTHDCPEKYEHGKALLLEWALNEGPWEMKRMQYMDAKKKKEPIGFLDLTRICQTQHTMRLAPGDHYICLLIHPEDGTVVVLDPLDYSHKQYKEFLTILQYVYQYYKFKGGEQTRTREKLLCHKQPRGTVLCGFYACEFLRVNGRYRTNPEDLPRLEHRTSFDDTGIKNVQRDLCHFIHHECCHVKVDFFDPEGALATSNEFKDLREWNSAMP

SEQ ID NO: 112352 - protein, 60 aa, Oryza sativa
  unsure (1)..(60): unsure at all Xaa locations
  Clone ID: PAT_MRT4530_16245C.1.pep
PVIHAFGPLGPVWRNNIWRSKDSXHFFMSHIHDLPKQINPWSALGHPPLYCYVSFLISGF

SEQ ID NO: 112353 - protein, 1301 aa, Oryza sativa
  Clone ID: PAT_MRT4530_16246C.1.pep
MDISRTNEGYTSCGPVVEMSWHRAGVLLLGAQSCLPVPEVPAEGGAGSGPRQPGIDIDIFLEPLLEDMTDLWKEGLRVWDEYLREYFTVKAIIFVTINDYPAMFSVSGQIKGKTGCVIFMNGAYYRYLPGSNKLVYMRHRRFLRTNHKYRKMKAEFDGTEETDPAPKPTSGEKVCAMIEKIVCEFGKVTKKPSKGTKRKKPEKNTKQGDSKKEDDSSKPDDKLPPPVKKHSIFFKYLPYWKHLEVRHAIDVMHLEKNVFDNIVGTLLDMPNKTKDAGEKQSYFGFIEEIWEIDYGHTMQFPIFKCQWVKYLNGKIKNVETSTQKIVKPYMRTDGGNPRNFGIVRLPNFFASAVLRRRPPATFTFRPSSSAAADRRPPSAAGLQAELALASRSTARRRPSIQLHRHPTAPAASRSTAELHRLYRHSTAPPPPPPSTARAQARSLALHRRHRPQPPPPSLSLSRSCPRARFETMADSTKGTEEKGLGEQEQSLAVVVASEPTVPPEDSSGSDIAHEDDEYSLPSDPCPSPSPKRRKKGDSEEGDKDYIPPKEGCGIIVREKIPITVKDWDHVSNGDKEVLWKELKKIFQFTDGSESIADKIENLSSSQKKGFFKPKREKDVLSTALGTPEHGGRVRGVSSKMSWKEGFKHDPHKKREAYKDKLRDEGAAEFERQMMDFCVKHMILPRPETKEPEPDYPFDDLKENTPCRLHPQVVHEGFDSYDIDFPTADGVSVLGDAVDLVILWHKNDISFGLGTDATEKPVVPKPGLGKPPRPPKRKVTDKAEEPEMQKDNPVPEVPPEIAVPEAAMEIPVPEVPMEITVAEPEVQFVASVGSEIEEVPGLEWDGTKPEIFDDPSPAKDPEVQETTIPKKATTSSEVPRMLRSHDSKSKDENKEKFMVTVFRGGKERGKPRDDDPQKAAELAGPTYFTTDDCPAEYEHGKALLPEWALNEVPWEMKRLHTFYMQASKKGLGNITARSPADCFGKEGYVWLDFSYLHAIYRWDKMDVNYVGVWCMKKDLADVSKGAAGADTRAPHVSGTKKGRGGGWQAGPTGSGSRAPVHRGPRPPRRSTVGPREPTARIGPKPIGRPRCGAAGARARPIPTRPAMARRLRARGQTTTGDGSASRWRAWGAADGEKGEGPVGILTEDGDGETTTGRWPAAEKMAATGTGGDGNGVPTTPDHGGAAAEGRQDLGKILERLGREIGDRTGEDRWFETTTAVAELGSTAESGRLKTAAAGERGGARGGGVPEAERGNGVEAGLRHGAAKPTVVADWRGGGWSGGIGRPELAGKRWCTGARWGGV

SEQ ID NO: 112354 - protein, 219 aa, Oryza sativa
  unsure (1)..(219): unsure at all Xaa locations
  Clone ID: PAT_MRT4530_16247C.1.pep
MEIAVPDVQMDIKVAEPEVKFVASVGTEIEEVPGLEWDGTEPEIFEDPSPAKDPEVQQTTVPEKATTSSEVPRVLRSHDSKTKDENKEKFMVTVFRGGKERAKLRDDDPQKAAELAGPTYFATDDCPEKYEHGKALLPEWALKEGPWEMRRMQYMDTKKKKEXPIGFLDPTRICQTQHTVRLAPGVTSNRKERSFVGITLANSLELMGGTGLTQRICQD

SEQ ID NO: 112355 - protein, 769 aa, Oryza sativa
  Clone ID: PAT_MRT4530_16248C.1.pep
MYHWPRFLSPYRDEVSKFTGIAKAHAEKNNMRKIICPCADCKNEIAWEDASKVMEQLVTRGFMEKYEIWTHHGKEQVDGPENVVPTQVEDMVHDDGSGEDKIDLDEMLCHPEPEVLMGSVIGLNNFEALQKAAKEVLYDESKGYDKLLQKMLLRPNSLPSSIYQAKKLRCPLSLGVEKIHACVNHYILYRKEYASLDECPTCGASHYKSNSNTGLEPSDTTEGTQRKIPQLVMWYLPVKERIKWIYSNPRDVELMRWHQEGRKKDGMIRDLADACQWINFDAQYREFAKDRRNIRFALSADGVSPFGEMSSSHSTWPVLLTMYNLPTWLCQKRKYVLLCILIQGPRQPGIDIDVFLEPLLEDMADLWKEGLKMWDEYLREYFTVKAIIFVTINDYPAMFSVSGQIKVSKKPSKGTKRKKPEKTKKPEDRKKLDDSMKLDDKLPLPFKKHSIFFKYLPYWKDLEVRHAIDIMHLEKNVFDNIVGTLLDMPKKTKDGLQSRIDLVEMGIREELHPQEGENNGKVYLPPACFTMTPEEKKSFCKSLRDVRVPIGFSSNISRLVSIKDLSVSGYNSHDCHVLLTVFLAITIRAIKPELLNVAITRFCYFFNAVSQKVISHEELANLCTFAHETQCQLEMCFPPSFFDTMEHLIIHIVSQMVALGPLYLHQMWSYECYMAVLKGYARNRAHPEGSMVEGYSTEEVVECCIDYLKDGNKIGVPVPRHEGRLSGRGTIGKKIFVTHDHKSFQEAHFSVLHQFAIVEPYIDQHIELL

SEQ ID NO: 112356 - protein, 982 aa, Oryza sativa
  unsure (1)..(982): unsure at all Xaa locations
  Clone ID: PAT_MRT4530_16249C.1.pep
MGSARGLNNFEALQKAAKEVLYDESKGCDSEFTTLRKCSRGLTHYHPAHIKQRNSYAPFHLGPRQPGIDIDVFLEPLLEDMVDLWKEGLKVWDEYLREYFTVKAIIFVTINDYPAMFSVSGQIKGKIGCVICLNGTYYRYLLGSNKLVYMRHRRFLRTNHKYRKMKAEFDGTEKTDPAPKTTSGEKYLSYWKDLEVRHAIDVMHLEKNVFDNIVGTLLDMPKKTKDGLQSRMDLVEMGIREELHPQEGEKNGKAINEAREKQLYFGFIEEIWEIDYGHTMQFPIFKCQWVKYPNGVNVDKFGLTIVDLASVGHKDDPWKIKNVETSTQKTMKPYIRTDDGPLAKIVKKIFASSQADRPPAKIVAQYKGKPAAPKFLSPGGNPRNFGTVRLPKFFAAARLRRPPPPPACDLHSPTVVLRRHRPSLSTRCHXTAAPCRRSTARDLHHSAAAAADPSTARXAPPPPAPPPPPAPPPPSATPPPPPAATSPSISLAAERLNRPIVVHERSRPRPNDVFDRSSSTAEPRLRPFVVHDRSRSSSTAEPRRRPFLRRPRPKLVVGRSSNTDRFETMADSTKGTEEKGLGEQELSLAVVVAPEPTVPPKGSSNCDVGDEDEDYSSPSDPCPSPSPKRRKKGNSEEDDKDYIPPKEGCGIIVREKIPITVKYWDYVSNGDKEVLWKELKKIFQFPDGSKAAVRNCALQTMAKSWRGWKTTLNKKFVKTGRTPFSTYANITPNQWDDFLTLKNSPEEIQRSQKYAELAKKNKFPHRLGSAGYAWEKDVLSTALGTPEHGGRVQGASSKMSWKEGFKNDPYKKREAYKDKLRDEGTAEFERQMMDFCVKHMILPRPETKEPEPDYPFDNLKENTPCRLHVPIGRSGKTLEAATAIAIPGRTYNEEFIPAVYAKVQPQVVHEGFESYDIDFPTADGVSVLGDAVDLVILWHKNDISFGLGTDATQKPVVPKPGLGKPPRPPKRKVTDKAEEPEM

SEQ ID NO: 112357 - protein, 1149 aa, Oryza sativa
  unsure (1)..(1149): unsure at all Xaa locations
  Clone ID: PAT_MRT4530_1624C.1.pep
WWDHFQXTQPEGQPITWAHFTAAFRRTHVPAGVMALKKREFRELKQGNRSVMEYLHEFNNLARYAPEDVREDEEKQEKFLAGMDPELSVPLVDKSIRLEAKHKELESHKRRLANFRNQQGANQRIRYTNPYPGGSSSQPQQQPRSALRPQFVVRVPQPQQQQNQQGAHAPRPPAPAVQPGQGRRDAQGQQCLCFNCFKPGHFADKCPKPRRQQGQAPPRPNNGGKDVTRGRVNHVTAEDVLRTPDIIVGTFLIHSIPATILFDSGASHSFISVPFMGRNQLGVERLRNPLLITTPGGVMTAKYYSPAVPIEIQGIAFPSDLILLDTKNLDVILGMNWLAQFQGVVDCARRTVTVYRGPDQPVVFFAPPTSAGSSVLHQLGLPEIPIVSEFGDVFPEELPGMPPKREIEFQIDLAPGTAPLYKRPYRMAANELAEPSTSPWGAPVIFVEKKEKTKRMCVDYRALNEVTIKKKYPLPRIDDLFDQLKGATVFSKIDLRSGYHQLRIREEDIPKTAFTTQYGLYEFTVMLFGLTNAPAFFMNLMNKVFMEYLDKFVVVFIDDILVYSQSEEDHQQHLRLVLGKLREHQLYAKLSKCEFWLPEVKFLGHVISAKGVVVDPETLLKKEEKFVWSPQCEKAFQTLKEKLVSLLVLILPDTRKDFLVYCDASRQGLGCVLMQKGHVVAYASRQLRPYEGNYPTHDLELAAVVHALKIRRQYLIGNRCEIYTDHKSLKYIFTQSDLNLRQRRWLELIKDYDVGIHYHPGKANVVADTLSRKSHCNTLGIRGIPPELNQQMEALNLSIVGRGFLATLEAKPTLLDRIREAQKNDPDIHGILKNMKQRKAAGFTEDEHGTLWNGNRVCVPDDKELKRLILQEAHESPYSIHPGSTKMYLDLKEKYWWVSMKRVSKQSTNDRPDFSNLSKYQNGNGMKLGWISSPDFQKPKADMILYGXVVDRLTKVARFIPVKTTYGGNKLAELYFARIVSLHGVPKKIVSDRGSQFTSHFWKKLQEELGTRLNFSTAYHPQTDGQTERLNQILEDMLRACVLDFGKTWDKSLPYAEFSYNNSYQASIQMAPYEALYGRKCRTPLLWDQVGESQVFGTDILREAEAKVRIIRDNLKVAQSRQKSYADNRRRDLEFAVDDFVYLRVTPLR

SEQ ID NO: 112358 - protein, 67 aa, Oryza sativa
  unsure (1)..(67): unsure at all Xaa locations
  Clone ID: PAT_MRT4530_16250C.1.pep
MGRVIRAXVXGAXSVXKSHTHXRKAPXGSXPSYFXERNGYLXGXVTXIIHDPXRGAPXXKVTXRQPF

SEQ ID NO: 112359 - protein, 856 aa, Oryza sativa
  unsure (1)..(856): unsure at all Xaa locations
  Clone ID: PAT_MRT4530_16251C.1.pep
DSSDSDVAHEDDEYSSPSDPCPSPSLKRRKKGDGEEGDKDYIPPKEGPELIRNFHVYLLVGNGATAIKKTAEEKVLSQIDEVPANTTSSKKSERSAKVKKRKRERSVNRKDEGFHVVTHVSPKGEPLAPKTARAKFSSQCGIIVREKIPITVKDWDHVSNGDKEVLWKELKKIFQFPDGSEAAWDDFLTLKNSPEEIQRSQKYAELAKKNKFPHRLGSTGYAPKVEQWTKEEEEMRKKGQPVPMEEWTQRSRNWVRARTPKITDEGKVSFEFPELQSVANKIENLSSSQKKGFFKPKREKDVLSTGLGTPEHGGRVRDVSSKMSWKEGFKHDPHKKREAYKDKLRDEGAAEFERQMMDFCVKHMILPRPETKEPEPDYPFDDLKENTPCRLHIPIGRSGKTLEAAIAIAIPGRTYNEEFIPDAYAKVQPQVVHDGFESYDIDFSTADGVSVLGDAVDLVILWHKNDISFGLGTDATQKPVVPKLGLGKPPRPPKRKVTDKAEEPEMQKENPVPEVPPEIAMPEAAMEIPVSEXPEIFEDPSPAKDPEVQETTVPEKATTCSEVPRVLRSHDSKXSKDENKERFMVIVFRGGKERAKLRDDDPQKAAELAGPTYFATDDCPAEYEHGKALLPEWALNEVPWEMKRLHTFYMQASKKGLGNITARSPADCFGEEGYVWLDFSYLHAIYRRDKMDVNYVGVWCMMQYIDAKKTKEPIGFLDPTRICQTQHTVSLAPGSDQLKGKTSKEIAEYKKGLHKEKLITVAQYIGRVFLHFQNKRVVLAAYNFNDHYICLLIHPKDGTVVVLDPLDYKHQSYKEFLTILQXCHKQPRGTVLCGYYACXFLKVNGXLPRLECRTSV

SEQ ID NO: 112360 - protein, 125 aa, Oryza sativa
  Clone ID: PAT_MRT4530_16252C.1.pep
MARVTAVGDGYEYDGVVVGHPVIQFGDGAPPAVVGYPLPKEPPPPPPPATLQRGRPEQRCSSRCGPCEIFTVTFMVVVAVESLTYFLLAMIGMASVTALTRVHPRGKFKLLGRSPIPKLLQTKHT

SEQ ID NO: 112361 - protein, 58 aa, Oryza sativa
  unsure (1)..(58): unsure at all Xaa locations
  Clone ID: PAT_MRT4530_16253C.1.pep
INRVEYMHSKGFIHRDIKPDNFLIGLGRKANQVYIIDYGLGXKYKDLQTHNTFLQGDK

SEQ ID NO: 112362 - protein, 962 aa, Oryza sativa
  Clone ID: PAT_MRT4530_16254C.1.pep
MCCNGLQHLEKYGIPVPNYALVNREYPYQELDYFIEQEDFVEVHGKRFMKPFVEKPVNGDDHRIMIYYPNSAGGGMKELFRKVGNRSSEFHPDVRRVRREGSYIYEEFMPTGGTDVKVYTVGPGYAHAEARKSPVVDGVVMRNPDGKEVRYPVLLTPTEKQMSRDVCSAFRQMVCGFDLLRCDGRSYVCDVNGWSFVKNSYKYYDDAACILRKIFLDAKAPHLSSTIPPSLPWKSNEPVQPTEGLTRQGSGIIGTFGQSEELRSVIVVIRHGDRTPKQKVKLKVTEEKLLNLMLKYNGGKPRAETKLKSAVQLQDLLDATRQLVPPTRSGRESDSDAEDLEHIEKLRQVKAVLEEGGHFSGIYRKVQLKPLKWIRVPKRCGDGEEERPIEALMILKYGGVLTHAGRKQKKNISIEGPTNSIGGGGMAEELGRFFRNNIYPGEGTGLLRLHSTYRHDLKIYSSDEGRVQMSAAAFAKGLLDLEGQLTPILVSLVSKDSSMLDGLEDASIEMDEAKARLHEIIITNAKAKNTNEPVEFPWMVDGAGLPANASQLLPKMAKLTKPVTAQVKLLAEDEEEKLALTNSLSRYDQAKAFGKTTIDVARIAAGLPCGSESFLSMFARWKKLERDLYNERKDRFDITQIPDVYDSCKYDLLHNAHLNLEGLEELFKVAQLLADGVIPNEYGINPKQKLKIGSKIARRLLGKILIDLRNTREEAISVSDPKFTEDEATFLPTKESEYQQKLQTRNEDGRRSSSTSEKSLDQEDEDDRETKYRLDPKYANVKTPDRHVRTRLYFTSESHIHSLMNVLRYCNLDECLQGEDSLVCQSALDRLHRTRELDYMSNIVLRMFENTEVPLEDEKRFRIEMTFSRGADLSPLEDKTSENTSLLQEHTLPIMGPERLQEVGSCLTLDKFEKMVRPFAMPPEDFPPAAAPQAFSGYFKGSGMLERLASLWPFHKGATNGK

SEQ ID NO: 112363 - protein, 1996 aa, Oryza sativa
  unsure (1)..(1996): unsure at all Xaa locations
  Clone ID: PAT_MRT4530_16255C.1.pep
MESREWMYHWPRFLSPYRNEVAKFIGIAKAHAEKNNMRKIICPCADCKNEIAWDFDDAFKVKEHLVTHGFMDKYEIWTRHGEEQLDGPENVVPTQVEDMVHDDGFVEDKIDLEEMLRHAEPEVLMGSARGLNNFEALQKAAKEVLYDVSKGCDSKFTALWSVLELMRLKARHGWSDTSFDSLLELLQKMLPRPNSLLSSTYQAKKLICPLSLGVEKIHACVNHCILYRKEYATLDECPTCGACRYKSNSNTGLKPFEATEGRQRKIPQLVMWYLPVKDCIKRIYSNPRDAELMRWHEEGRKKDGMIRHPADARRWINFDAQYREFAKDPRNIRFALSTDGVNPFGDEQXSHSTWPVLLTMYNLPTWLCQKRKYVLLCILIQGPRQPGIDIDVFLEQLLEDMADLWKEGLKVWDEYLREYFTVKAIIFVTINDYPAMFSVSGQTKGKTGCVIYLNGTYYRFLPGSNKLVYMRHRWFLRTNHKYRKMKAEFDGTEETDPAPKHTSGEKVCAMTEKIICEFGKMTKKPSKGIKRKKPEKNTKGGDSKKQDDSSKPDDKLPPLFKXHFIFFKYLPYWKDLEVRHAIDVMHLEKNVFDNIVGTLLDMPKKTKDGLQSSMDLVEMGIKEELHPQEGEKNGKVYLPPACFTLTPEEKKSFXNSLRGVRVPIGFSSNISRLVSMKDLSVSGYNSHDCHVLLTVFLAIAIRAIKPEHLKVVITRLCYFFNAMSQKVISLEELGNLRTFAHETQCQHEMCFPPSFFDMMEHLIVHIVPQMVALGPLYLHQMWSYERYMAVLKGYVRNRAHPEGSMVEGYSTEEVVECCIDYLKDGYAIGVPXPRHEGRLSGRGTIGKKRFVTYDHKSFQEAHFSVHHQFAIVEPYIDQHIDLIRANNKLRDLDLPEGETTDEITMKRLAFGPSTTVNSWQGYSFSTRARDNKTCTQNSGVRVEAIDEAREKQSYFGFIEEIWEINYGHTMQFPIFKCHQFVQKIKNVETSTQKTVKPYMRTDGVGKNVKGXMIVEWHXSSQADRPPAKIFALHKGKHAALKFLSPGGNPRNFGATARLLHRCRLLHRHRSLPPPPVPPPRARPRPNDVFGRSSSTAEPRRRPFLRRPXPKLVVGRSSNTDRFETMADSTKGTEEKGLGEQEQSLAVVVAPEPAVPPEGSSNSDVGDEDEEYSSPSDPCPCPSPKRRKKGDGEEGDKDYIPPKEGDWDHVSDGDKEVIWKELKKIFQFPEGSEAAVRNCALQTMAKSWRGWKTTLNKKFVKTGRTPFSTYANITPNQWDNFLTLKNSPEEIKRSQKFAELAEKNKFPHRLGSAGYAPKVEQWTKEEEKMRKKGQPVPMEEWTQRSRNWHGGRVRGVSSMMSWKEGFKNDPHKKHEAYKDKLRDEGAVEFERQMMDFCVKHMILPRLETKETEPDYPFDDLKENTPCRLHVPIGRSGKTLEAATAIAIPGRTYNEQFIPDAYAKVQPQVVHEGFESYDIDYRTADGVSVLGDAVDLVILWQKNDISFGLGTDATQKPVVPKSGLGKPPRPPKRKVTDKADDPEMQKENPVPEVPPEIALPEAAMEIAPPETAMEIPVPDVPMEITVAEPEVQFVASVGSDKEEVPGLEWDGTXPEIFEDPSPAKDPEVPRVLRSHDSKSKYENKEKFMLTVFRGGKERAKLRDDDPQKASELAGPTYFATDDCPEKYEHGKALLPEWALKEAPWEMRRLHNFYMEASKKGLGNITARSPADCFGEEGYVWLDFSDIHAIYRRDKMDVNFVGVWCMMQYMDAKKKKXPIGFLDPTQICQTQHTVTLAPGSDQLKGKNPTEIAEYKKGLHKEKLITVAQYIGRAFLHFQNKRVVMAAYNFNDHYICLLIHPKDGTVVVLDPLDYNHKQYKEFLTILQYAYQYYKFKGGEQTRTREKLLCHKQPXGTVLCRYYACEFLRVNGRYRTNAEDLPRLECRTSFDDTGITNVQRDLCHFIHHECCHVKGDFFDPEGALAASDEFKDLWEWNTAMP

SEQ ID NO: 112364 - protein, 331 aa, Oryza sativa
  Clone ID: PAT_MRT4530_16256C.1.pep
MAKSWRGWKAALNMGFVKMGRTPFSMYANITPNQRDDFLTLKNSSEEIQRSQKYAELVKKNKFPHRLGSAGYAPKVERWTKEEEEMRKKGQSVPMEEWTQRSSNWVRARTPKITDEGKVSFEDPELQSVANKMENLSSSQKKGFFKPKRKKDVLSTALGTPEHGGRVRGVSSKMSWKEGFKHDPHKKREAYKDKLRDKGAVEFERQMMDFCVKHMILPRPETKEPEPDYPFDDLKENTPCRLHVPIGRSGKTLEAATAIAIPGRTYNEDFIPDAYAKVQPQVVHEGFESYDIDFPTTDGVSVLGVAVDLVILWHKNDISFGLGTDATQKPV

SEQ ID NO: 112365 - protein, 1148 aa, Oryza sativa
  Clone ID: PAT_MRT4530_16257C.1.pep
MECGGGSTAGDDLGFDRSSGGMRQQRGHARRSEERGGGVFAWAKIMVNTSLLVKVLPSVWWRGPKQCLRLNHRRPPPSTATVSSSSSIVCRRSVGWDGVVDGAPGGDRADRTSASLCMRRPPHRAVGMKVAAHTERNNMRKIICPCADCKNEISWDFDDAFKVKEHLVTRGFMDKYEIWTRHGEEQVDGHENVVPTQVEDMVHDDGSVEDKIDLEEMLRHVEPEVLMGSARGLNNFEALQKAAKEVLYDESKGCHSEFTTLRKEYASLDECPTCGASRYKSNSNTGLEPSEATEGRQRKIPQLGPRQPGIDIDVFLEPLLEDMANLWKEGLKVWDEYLREYFTVKAIIFVTINDYAAMFSVSGQIKGRTGCVICLNGMYYRYLPGSNKLVYMRHRRFLRTNHKYRKMKAEFDGTEETDPAPKPTSGGNVCAMTEKIVCEFGKMTKKPSKGTKRKKPEKNTKGGDSKKQDDSSKPDDKLPPPFKKHSIFFKYLPYWKDLEVRHAIDVMHLEKNVFDNIVGTLLNMPKKTKDGLQSRIDLVEMGIREELHPQEGEKNGKVYLPPAYFTLTPEEKKSFCNSLRDVRVPIGFSSNISRLVSVKDLSVSGYNSHDCHVLLTMFLAIAIRAIKSEHLKVAITRLCYFFNAVSQKELGLEELGNLRTFAHETRCQLEMCFPPSFFDMMEHLIVHIVPQMVALGPLYLHQMWSYERYMAVLKGYVRNRAHPVGSMVEGYSTEEVVECCIDYLKDGYAIGVPVPRHEGRLSGRGTIGKKRFVTHDHKSFQEAHFSVLHQFAIVEPYIDQHIELIRANNKGRSTEWIMKEHKRLFIDWLRDLDLPEGETTDEITMKRGVRVEAIDEAGEKQLYFGFIEGIWEIDYGHTMQFPIFKCQWVKYPNRFNVDKFGLTVVDLASVGHKDDPWKIKNIETSTQKTVKPYMRMDGCRNFPPPHASVVLRRCPPATFTLRPSSSAAADCRHPRAATETVVLRRRRPSSSTLPPPSPTPPPCARSTAAGSSTATGPSTATGSSTARAAAGGPSTATGPSTARTAAAGPSTAAGPSTAVGHLSTAVGHPSARGRTASSADRRLRAKTSSAERRLRPVVVHGRSSSSAVRRPRPKPVVVHGRTSSLALPSSSTTEARRRPFVEHGRACM

SEQ ID NO: 112366 - protein, 276 aa, Oryza sativa
  Clone ID: PAT_MRT4530_16258C.1.pep
MGISARRMIDRSMEKGTRQASPGPTQIEVLLHLADRWIHVMSCRPGKRSPLLGLGPRYTCVAASIPCHMMHPDVTHVYARDGTVVAVVDDCTCECSLKNERWMDERGISHRQITRGSGGRLYVRVGGREIYYSTSILAYKTRDKGISLKNQRKPYKIMTVSIFEHWIGVYKCLAFDIYDGKKINCKRWGSNPPERTPAAPIKKAVWCHHDASFYPGNSELHVIASIGLHIAFRAVTSVVVGGCNLLKLKLNMQTCHLIMYPLSLKLNMQTYHLIIY

SEQ ID NO: 112367 - protein, 105 aa, Oryza sativa
  Clone ID: PAT_MRT4530_16259C.1.pep
ENRNLNNNNNNNNNNNNNNNNNNNNNNNNNNNNNNNNNNNNNNNNNNNNNTTTKKNNNESNDMKRINNYLNFLNKTNGQTRTKKSTAIPASRVLFGPLSFPVLLL

SEQ ID NO: 112368 - protein, 791 aa, Oryza sativa
  Clone ID: PAT_MRT4530_1625C.1.pep
MPPKREIKFRIDLAPGTTPLYKRPYRMAANELAEVKKLLEELKEKGALNEVTIKNKYPLPRIDDLFDQLKGATVFSKIDLRSGYHQLLIREEDIPKAAFTTRYGLYEFTVMSFGLTNAPAFFMNLVNKVFMEYLDKFVVVFIDDILEGHVVAYATRQLRPHEGNYPTHDLELAAVVHALKIWRHYLIGNCCEICTDHKSLKYIFTQSDLNLRQRRWLELIKDYDVGIHYHPGKANVVADALSRKSHCNTLGVRGIPPELNQQMDALNLSIVGRGFLATLEAKPTLLDRIREAQKNDPDMHGILKNMKQCKAAGFIEDEHGTLWNGNRVCVPDDKELKHLILQEAHESPYSIHPSSTKMYLDLKGKYWWVSMKREIAEFMALCDVCQCVKAEHQRPAGLLQPLQVPEWKWDEIGMDFITGLPKTQGGYDSIWVVVDRLTKVARFIPVKTTYGGNKLAELYFARIVSLHGVPKKIVSDRGNQFTSHFWKKLQEELGTRLNFSTAYHPQTDGQTERLNKILEDMLRACVLDFGKTWDKSLPYAEFSYNNSYQASIQMAPYEALYGRKCWTPLLWDQVGESQVFGTDNLREAEAKTKGKLAPRFVGPFRIIARRGEVAYQLELPASLGNVHDVFHVSQLKKCLRVPSEQADSEQIEVREDLTYVERPVKILDTMERRTKNRARPPPSLTGGAHPSSPFSHRSRRLPRTLAPPPPRIPPPPAVPACNKGEPWTVASFPPSLPSLGRRSAVPVVAGGDHRGAGAPPPADRASVAALVRAEWLPRGARPSAARALGCG

SEQ ID NO: 112369 - protein, 118 aa, Oryza sativa
  Clone ID: PAT_MRT4530_16260C.1.pep
MALVISEWQTTAATGTMPLGMPSATKEARSSPAVPAVFGTTVTFAAWGRMENPASRRRRCGLHVELQSSLLQVRVAVAAAGCRLAAATVASGNVEMEASAEEATVAREEMKLAGADAV

SEQ ID NO: 112370 - protein, 58 aa, Oryza sativa
  Clone ID: PAT_MRT4530_16261C.1.pep
ACPVTRGFPPLSFLRFFLHCSLYAFYFSSGVCFRENKAIFMCSIGLAIFSFGFGRANF

SEQ ID NO: 112371 - protein, 37 aa, Oryza sativa
  Clone ID: PAT_MRT4530_16262C.1.pep
MAAAGCFEDGIKLTLCSCSYTSILLSKRDARVREANG

SEQ ID NO: 112372 - protein, 281 aa, Oryza sativa
  Clone ID: PAT_MRT4530_16263C.1.pep
MGPDNGANNNSNLAARQRLRWTNELHERFVEAVTQLGGPDRATPKGVLRIMGVQGLTIYHVKSHLQKYRLAKYIPDSSADGNKAENKDPGDLLAGLEGSSGLQISEALKLQMEVQKRLHEQLEVQRQLQLRIEAQGKYLKKIIEEQQRLGGVKSETPAAGASVTLPSDQFPDSERTDPSTPAPTSESPTQGVPSNRDNGGQNEATKSPQRDDSLSRHEPLTPDSNCQPGSPTASPKHERAAKRQRGNGAEFSETDFALPHSIFESSSGSEFQQCSMSYSGH

SEQ ID NO: 112373 - protein, 328 aa, Oryza sativa
  Clone ID: PAT_MRT4530_16264C.1.pep
MGAGASSMMGPEGYGRGWGQTSLGDMPESCVAAVLLYLDPPEICKVARLNRAFRGAASADCVWAAKLPANYRYLAALAAAADDDSGGDGATEGNGSRCSSAAMIKKEIYARLCRPTPFDGGTKVEERTSRFLLIGIIAFLMWKRGTSRILDGEDKGGLCISISSKAMAITGIDDRRYWSHLSTEESRFHHVAYLQQIWWLEVAGEIDFCFPAGSYSLFFRLQLGRPHKYMGRRVYGYESIHGWNIKPTRFQLSTSDDQQATSQYYLNEPGNWILYHVGDFVVSSSDQLTNLKFSMMQIDCTHTKGGLCVDSVFIYPKGHRHEDCTICK

SEQ ID NO: 112374 - protein, 187 aa, Oryza sativa
  Clone ID: PAT_MRT4530_16265C.1.pep
AATVFATATSVGGAEGGLDEEDDGFGCDIGTIGNFKKAKGTINISATYETRHHDFETSVVARGDLWRLESSRGGSNSGDENAPLFLVQLGPLLFVRDSTLLLPIHLSKQHLLWYGYDRKNKMHSLCPAIWSKHRRWMVMSMMCLNPVTCSFMDVQFPNGQLTYVAGEGITASGFFPFFGGLLQAHGK

SEQ ID NO: 112375 - protein, 115 aa, Oryza sativa
  Clone ID: PAT_MRT4530_16266C.1.pep
MGCCRMGTTVGNGTIDAHGESWEAEQLYVCNDSVLPTAVGINPMITVQSVAYCVANGIADSLSGSSKSTTGRVPAQQSSDYKSKTADQYYYNSISSSKSQQLGGAGAKSSEQKSI

SEQ ID NO: 112376 - protein, 82 aa, Oryza sativa
  Clone ID: PAT_MRT4530_16267C.1.pep
IRCSHYNRNKNMVLLIYGTRLKIGWKSYWEYRTVLPLRVEISWTAPQRVHVSILRGLDTGTGPALIPALGIFHQAGVRRLDS

SEQ ID NO: 112377 - protein, 58 aa, Oryza sativa
  Clone ID: PAT_MRT4530_16268C.1.pep
RRPLVEFAETLAQVARRNQGAPYNPCVGDLLPIGRFMGVLSSPAGHSAPRRGGGGSLG

SEQ ID NO: 112378 - protein, 399 aa, Oryza sativa
  Clone ID: PAT_MRT4530_16269C.1.pep
PRPPPKRQVTGKAEEPEMHKENPVPEVPPEIAVPEVPMEIAVPDVQIEIKVAEPEVQFVVSVGTDIEEVPGLQWDGTEPEIFEDPSPAKDPEVQETPVPEKATTSSEVPRVLRSHDYKSKYENKEKFMVTVFRGGKERAKHKDDDPQKAAELAGPTYWLTDDCPEKMQNMDAKKKKEPIGFLDPTQICQTQHTVRLAPGSDQLKGKTPKEIAEYQKGLHKEKLITVAQYIERAFLHFQNKRVVMAAHNFDDHYICLLIHPKDGTVVVLDPLDYKHQSYKEFLTILQYVYQYYKFKGGEQTRIREELLCHKQPRGTVLCEYYAWEFLRVNGRYRVNAEDLPRLERRTSFDDTGITNVQHDLCHFIHSECCHVKGDFFDPDGALATSDEFKDLLEWNTAMP

SEQ ID NO: 112379 - protein, 63 aa, Oryza sativa
  Clone ID: PAT_MRT4530_1626C.1.pep
MTRRSPRWRRCPTARPRAPPPRRSPPPTARPRAPGRPLPRRHAPPPPPPPRRRPERQRMRHPR

SEQ ID NO: 112380 - protein, 244 aa, Oryza sativa
  Clone ID: PAT_MRT4530_16270C.1.pep
MAYHARFFGLRSHFVFHDAGGVSPAVRAALEPWVRAGRATLQDVRAQAEYDGWYYNQFLVVNDCLHRYRHAARWTFFFDVDEYIFLPDGRSLEAVLAELEPYTQFTIEQNPMSSRLCARNPDEPETDYSNEWGFEKLVFRNSITGVRRDRKYAIQAKNAYATGVHMSENVIGNTTHKTEHLIRYYHYHNTINVIGEVCREFVPIPPNGGLIWSEKTPWYYDDSMKRIADTVREFERKTIGDVRV

SEQ ID NO: 112381 - protein, 939 aa, Oryza sativa
  unsure (1)..(939): unsure at all Xaa locations
  Clone ID: PAT_MRT4530_16271C.1.pep
MADSTKGTEEKGLGEQEQSLAVVVAPEPTVPPDGSSDNDVGDEDEEYSSPSDPCPSPSPKRRKKGDGEEGDKDYIPPKEGETAPRRSKRQPKKKVPSKDEDVPASTIGTQKSERSAKAKRRKGKRSVNRKDEGFHVVTHVSPKGEPLAPKTARVKFSSQCGIIVREKISITVKDWDHVTDGDKEVLWKELKKIFQFPEGSEAARGWKTTLNKKFVKTGRTPFSTYANITPNQWDDFLTLKNSPEEIKRSQKYSELAKKNKFPHRLGSAGYAPKVEQWTKEEEEMRKKGQPSVADKIENLSSSQKKGYFKPKREKDVLSTTLGTPEHGGRVRGVSSKISWKEGFKNDPHKKREAYKDKLRDEGAAEFERQMMDFCIKHMILPRPETKETEPDYPFDDFKENTPCRLHVLIGRSGKTLEAATAIAIPGRTYNEQFIPDAYAKVQPQVVHEGFESYDIDYPTADGISVLGDAVDLVILWHKNDIFFGLGTNAGEKPVLPKPGLGKPPRPPKRKVTDKADDPELDKKNPVPEVPPEIALPETAKEIALPETAMEIAPPETVMEIQVPDVPIEITVAEPEVEFVASVGSDKDEVPGLEWDGTEPEIFEDPSPAKEPEEKFMLTVFRGGKEHAKLRHDDPQKASVLAGPTFFATDDCPEKYEHGKALLPEWALKEAPWEMRRLHNFYMEASKKGLGNITARSPADCFGEEGYIWLDFSDLHAIYRRDKMDVNYVGVWCMMQYMDAKKKKEPIGFLDPTRICQTQHTVTLAPGSDQLKGKNPKEIAEYKKGLHKEKLITVAQYIGRAFLHFQNKRVVMAAYNFNDHFICLLIHPKDGTVVVLDPLDYSHKQYKEFLTILQXCHKQPRGTVVCGYYACEFLRVNGRYRTNAEDLPRLQCRTSFDDTVRQSTSKDDQLHGYQMGKYLFLGVGAQPHRSHGTGEGQDCC

SEQ ID NO: 112382 - protein, 1094 aa, Oryza sativa
  unsure (1)..(1094): unsure at all Xaa locations
  Clone ID: PAT_MRT4530_16272C.1.pep
LHPIGPKGQKDAYADHIEEIWEINYGHTMQFPIFKCHQFVQKIKNVETSTQKTVKPYIRTDGVGKNVKGXMIVELXRSSQADGPLAKIVVLYKGKPAAPKFLSPGGNPRNFGASHGPSSTATGRSTTELRPRAPPPPAAPPPRAGRQPAPPPPATPTLPLSLSLNRGIAAERLLRPVVVHERTRPWPNDVFGRSSSTVEPRRRPFXRPRTCVHVGACFLYVKFETMADSTKGIEEKGLGEQEQSLAVVVAPEPMVPPEDSSDSDVADEDDEYSSPNDPCPSPSPKRRKMGDCAEGDKDYIPPKEGDWDHVSNGDKEVLWKELKKIFQFPDGSEAAVRNCALQTMAKSWRGWKTTLNKKFVKTGRTPFLTYANITPNQWDDFLTLKNSPEEIQRSQKYSELAKKNKFPHRLGSAGYAPKVEQWTKDEEEMRKMGQPVPMEEWTHRSRNWHGGRVRGVSSKMSWKEGFKHDPHKKREAYKDKLRDEGVVDFERQIMDFCVKQMILPRPETKEPEPDYPFDDLKENTPCRLHVPIGRFGKTLEAATAIAILGRTYNEEFIPDAYAKVQPQVVHEGFESYDIDFPTADGVSVLGDVVDLVILWHKNDISFGLGTDATRKPVVPKPGLGKPPRPPKKKVTDKAEEPEMHKENPVPEVPPEIEVPEVPMEIVVLDVXMEIKVAEPEVXASVETEIEEVPGLEWNGTEPEIFEDPSPAKDPEVQEITVXEVPRVLRSHDSKSKDENKEKFMVTVFKGDKERAKLRDDDPQKAAELAGPTYFTTHDCPEKYEHGKALLLEWALNEGPWEMKRLHTFYMEASKKGXGNITARSPADCFGEEGYIWLYFLDLHAIYHRDKMDVNYVGVWCMMQYMDAKKKKEPIGFLDLTRICQTQHTMRLAPGSDQLKGKNPKEIAKYKKGLHKEKLITVAQYIGRAFLHFQNKRVVMAAYNFNDHYICLLIHPEDGTVVVLDPLDYSHKQYKEFLTILQYVYQYYKFKGGEQTRTREKLLCHKQPRGTVLCGFYACEFLRVNGRYRTNPEDLPRLEHRTSFDDTGIKNVQRDLCHFIHHECCHVKVDFFDPEGALATSNEFKDLREWNSAMP

SEQ ID NO: 112383 - protein, 279 aa, Oryza sativa
  Clone ID: PAT_MRT4530_16273C.1.pep
MDVNVVVLPTVVSRSCRLTVVVEPFDKVVEIKQKVESCYGIPVAARFCWIHGLAKWSGGDRMHDTVHVTAYLPPASWGRKVTVFARREESVAALKLRIHGAQKVDMPLPECMWNDFVCGSLMVMMDHWPLGAYVEFDSGVVEVTIVDCKKMVETGSSSGSNRNTNVDANNNKIEQLNDNFEGDPETPLLAEGDYHFELNGVAMNEELSLEVWGPGPSCPTPGSAPANTHTGTGGYFDNNLRLGMEEQELVDGQGIEYYPILHVSHILLLVRWLVIEAWH

SEQ ID NO: 112384 - protein, 1061 aa, Oryza sativa
  Clone ID: PAT_MRT4530_16274C.1.pep
MYHWPRFLSPYRNEVAKFIGIAKVHAEKNNMRKIICPCADCKNEIAWDFDDAFKVKEHLVTHGFMDKYEIWTRHGEEQVDEPENVVPTQVEDMVHDDGSVEDKIDLEKMLRNAEPEVLMGSARGLNNFEALQKAAKEVLYDESKGCDSDFTTLRSVLELMRLKARHGWSDTSFDSLLELLQKMLPRPNSLPSSTYQAKKLICPLSLGVEKIHACVNHCILYRKEYASLDECPTCGASWYKSNSNTSLEPSEATEGRQRKIPQLVMWYLPVKDRITRIYSNPRDAELMHWHEEGRKKDGMIRHPADARQWRTFDAQYREFAKDPRNIRFALSTDGVNPFGDMSSSHNMADLWKEGLKVWDEYLREYFTVKAIIFVTINDYPAMFLVSGQIKGKTGCVICLNGTSYRYLPGSNKLVYMRHRRFLRTNHKYRKMKAEFDGTEETDPAPKPTSGENVCAMIEKIVCEFGKMTKKPSKGTKRKKPEKNTKGGDSKKQDDSSKPDDKLPPPFKKHSIFFKYLPYWKDLEVQHAIDVMHLEKNVFDNIVGTLLDMPKKTKDGLQSTMDLVEMGIREELHPQEGEKNGKVYLPPACFTLTPKEKKSFCNSLRNVRLPIGFSSNISRLVSMKDLSVSGYNSHDCHVLLTVFLAIAIRAIKPEHLKVAITRLCYFFNAVSQKVISLEELGNLRTFAHETQCQLEMCFPPSFFDMMEHLIVHIVPQMVALGPLYLHQMWSYERYMAVLKGYVRNRAHLEGSMVEDYSTEEVVECCIDYLKDGYAIGVPVPQHEGRLSGRGTIGKKRFVTHDHKSFQEAHFSVLHQFAIVEPYIDQHIELIRANNKGRSTEWIMKEHKRLFIDWLRDLDLPEGETTDEITMKRLACGPSTTVNSWQGYDINGYSFSTRARDNKTCTQNSGVRVEAIDEAGEKQSYFGFIEEIWEIDYGHTMQFPIFKCQWVKYPNRVNVDKFGLTVVDLARVGHKDDPWVLANRVAQVFYVKDPSNLKKDIVLPGKQKILGVDGVEDVEDYNQYDSMPLYSQFVQKIKNVETSTQKTVKPYMRTDGVGKNVKG

SEQ ID NO: 112385 - protein, 84 aa, Oryza sativa
  unsure (1)..(84): unsure at all Xaa locations
  Clone ID: PAT_MRT4530_16275C.1.pep
SLINTGQNTLIPNHSIILLIKMKQEIRNPQHDLEIRRRKTFQESRXKKXERSRAALLIQVSXIYKSSSSSSSSSAAAAAAALSA

SEQ ID NO: 112386 - protein, 927 aa, Oryza sativa
  Clone ID: PAT_MRT4530_16276C.1.pep
MEEEADGQHLQVTDLVEGEVPGVVAGDGGDAAHGELGGVVEVVDDDGAEVDDDGAEAGEEQLQHGVAADVPRPAHMESWEWMYHWPRFLSSYRNEVSKFIGIAKAHAEKNNMRKIICSSADCKNEIAWENASKVKEHLVTRGFMDNYEIWILHGEEQVDGPKNVVPTQVEDMVHDDGSVEDKIDLEEILRHAEPEVLMGLARGLNNFEALQKAAKEVLYDEFTTLWSVLKLMRLKARHGWSDTSFDSLLELLQKILPRPNSLPSSTYQAKKLICPVSLDVEKIHACVNHCILYRKEYASLDECPTCGASRYKLNSNTGLEPSDTTEERQRKIPQLVMWYLPVKDRIKQIYSNPRDAELMRWHEEGHKKDGMIRHPADAHQWINFDAQYREFAKDPWNIRFALSTDGVNPFGDMSSSHSTWPVLLAMYNLSTWLCQKQKYVLLCILIQGPRQPGIDIDVFLEPLLEDMADLWKERLKVWDEYLREYFTVKAIIFVTINDYPAMFSVSGQIKGKTGCVICLNGTYYRYLPGSNKLVYMRHRRFLLTNHTYRKMKAEFDGTEETDPAPKPTTGEKVCAMTEKIVCEFGKVTKKPSKGTKRKKPEKTTKPEDCKKQDDSSKPDDKLPPPFKKHSIFFKYLPYWKDLEIRHGIDVMHLEKNVFDNIVGTLLDMPKKTKDGLQSRMDLVEMGIGEELDPQRREEWQSRTTEWIMKEHKRLFIDWLRDLDLPEGQSSDEITMKRLACGPSTTVNSWQGYDINGYSFSIRARDNKTCTQNNGVRVEAIDEVGEKQSYFGFIEEIWEIDYGHTMQFPIFKCQWVKYPNGVNVDKFGLTVVDLASVGHKDDPWVLANRVAQVFYVKDPSNLKKDIVLPGKQKILGVDGVEDVEDYNQYDSMPLYSQFVQKIKNVETSTQKTLKPYMRTDGVGKNVKG

SEQ ID NO: 112387 - protein, 660 aa, Oryza sativa
  unsure (1)..(660): unsure at all Xaa locations
  Clone ID: PAT_MRT4530_16277C.1.pep
MADSIKGTEEKGLGEQEQSLAVVVALEPTVPPESSSDSDIANEDEEYSSPNDPCPSPSPKRRKKGDGEEGDKDYIPPKEGNSPEEIQRSQKYAELAKKNKFPHRLGSVGYAPKVEQWTKEEEEMRKKRQPVPMEEWIQRSRNWEGFKNDPHKKREAYKDKLRDEGAGEFKGQMMDFCVKHMLLPRPETKEPEPDYPFDDLKENTPCRLHVPIGRSGKTLEAATAIAIPGRTYNEEFIPDAYAKVQPQVVHEGFESYDIDFPTADGVSVLGDAVDLVILWHKNDISFGLGTDATQKPVVPKPGLGKPPRPPKRKVTNKAEEPEMHKENPVPEVPPEIALPEAAMEIAXPPEAAMEIPVPDVPMEITVAEPEXPEIFEDPSPAKDPEVQETTVPEKATTSSEVPRVLRSHDSKSKDENKEKFMVTIFRGGKERAKLRDDDHQKAAELAGPTYFATDDCPEKYKHGKAFLLEWALKEGPWEMRRLHIFYMEASKKGLGNITARSPADCFGEEELKKCMPPEFEQGLKFRMPLSFPIPISLATVARQLPGDLDAGWSCGLRRSASPVKLITAALWRRQRTCSSPVAGAEVPRFRARRQQQRPSDVRWLHGSLRTASMSRAGDMLISVGKISSNLYVNHAGLRSVVEGLVAGCAPNHVVKKALLV

SEQ ID NO: 112388 - protein, 164 aa, Oryza sativa
  unsure (1)..(164): unsure at all Xaa locations
  Clone ID: PAT_MRT4530_16278C.1.pep
GEXXSRLLPWXPSXPPPXRRRACIRLRPXAEAILIRRRTIRALPPHRRGGXVPDAGCXKKXEAXXPVVAAAAGAGXGXXXKXXXLLLGCDYNHWLIXXEFPXXXGGXGXILLYSXSXXAXXXFFFFXXFXXXTXNGSXXSXKXXEXXSVIXXCXGXPDTIXXFM

SEQ ID NO: 112389 - protein, 1088 aa, Oryza sativa
  unsure (1)..(1088): unsure at all Xaa locations
  Clone ID: PAT_MRT4530_16279C.1.pep
MESREWMYHWPRFLSPYRNEVSKFIGIAKAHAEKNNMRKIICPCADCKNEIAWDIDDAFKVKEHLVTRGFMDKYEIXTCHGEEQVDGPENIVPTQVEDMVHDDGSIEDKIDLEEMLRHAEPKVLIGSARGLNNFEALQKAAKEVLYDESKGCDSEFTTLRSVLELMRLKARHGWSDTNFDSLLELLQKMLSRPNSLPSNTYQAKKLICPLSLGVEKIHMCVNHCILYKKEYASLDECPTCGASRYKSNSNTGLEPSEATEGRQRKXPQLVIWYLPVKDRIKRIYSNPRDAELMRWHEEGRKKDGMIRHPADARQWIYFDAQYIEFAKDPRNIRFALSTDGVNPFGDMSSSHSTWPVLLTMYNLPTWLCQKRKYVLLRILIXGPRQSGIDIDVFLEPLLEDMADLWKEGLKVWDEYLREYFIVKAIIFVTINDYPAMFSVSGQIKGKTGCVICLNGTYYRYLPGSNXLMYMRHRRFLHTNHKYRKMKAEFDGTEETDPAPKSTSGEKVCAMTEKIVCEFGKMTKKPKKNTKQGDSKKQDDSSKPDDKLPPPFKKHSIFFKYLPYWKDLEVRHTIDVMHLQKNVFDNIVGTLLDMPKKTKDGLQSRMDLVEMGIRVELHPQEGEKNGKVYLPPACFTLTPEEKKSFCNSLRDVRVPIGFSSNISRLVSMKDLSVSVYNSHDCHVLLTVFLAIAIRAIKPEHLKVAITRLCYFFNAVSQKVISLEELGNLCTFAHETQCQLEMCFPPSFFDMMEHLIVHIVPQMVALDPLYLHQMWSYEHYMAVLKGYVRNRARPEGSMVEGYSTEEVVECCIDYLKDGYAIGVPVPRHEGRLSGRGTIGKKRFVTHDHKSFQEAHFSVLHQFXIVEPYIDQHIELIRANNWLRDLDLPEGQTTDEIIMKRLACGPSTTVNSWQGYDINGYSFSTRARDNKTCTQNSSDRVEAIDEAGKKQSYFGFIEEIWEIDYGHIMQFPIFKCQWVKYTNGVNVDKFGLTVVDLASLGHKDDPWVLANRVAQVFYVKYPXNLKKDRVLPGKQKILGVYGVEDVEEYNQYNSMPLYSQFVQKIKNVETSTXKTVKPYMRTDGVGKNVKG

SEQ ID NO: 112390 - protein, 109 aa, Oryza sativa
  unsure (1)..(109): unsure at all Xaa locations
  Clone ID: PAT_MRT4530_1627C.1.pep
XGTPPFRTXKTPLGFPFFFWSSIRXEPXXLVGPXTRXWXGXGXSXYLRXRGDRERRGGRPRRGSPAVGGWGVKARRSLPGGDTRGWMRCERESSGRVGRTPAGGVRVTX

SEQ ID NO: 112391 - protein, 97 aa, Oryza sativa
  Clone ID: PAT_MRT4530_16280C.1.pep
SSSISKISTFATVRSLIFSGQISRHKFNPSSLFPVFLNNILDLLLLFSLHSSQLYGRTTTCCRRVHMSEHLKKLLVPSYRDFGWMFRFIVLRYVISI

SEQ ID NO: 112392 - protein, 809 aa, Oryza sativa
  Clone ID: PAT_MRT4530_16281C.1.pep
MRLKARYGWSDTSFDSLLELMQKMLRRPNSLPSSTYQAKKLICPLSLGVEKIHACVNHCILYRKEYASLDECPTCGASRYKSNSNTGLEPSDTTEGRQRKIPQLVMWYLPVKDCIKRIYSNPRDAELMRWHEEGRKKDGMIRHPADARQWINFDAQYREFAKDPRNIRFALSTDGGPRQPGIDIDVFLEPLLEDMADLWKEGLKVWDEYLREYFTVKAIIFVTINDYPAMFSVSGQIKGKTGCVICLNGTYYRYLPGSNKLVYMRHRRFLRTNHKYRKMKAEFDGTEETDPAPKPTSGEKVRLAIDVMHLEKNVFDNIVGTLLDMPRKTKDGLQSRMDLVEMGIREELHPQEGEKNGKVYLPPACFTPTPEEKKSFCNSLCDVRVPIGFSSNISRLVSMKDLSVSGYNSHDCHVLLTVFLAIAIRAIKPEHLKVAITRLCYFFNAVSQKVISLEELRNLRTFTHETQCQLEMCFPPSFFDMMEHLIVHIVPQMVALGPLYLHQMWSYERYMAVLKGYVRNRAHPEGSMVEGYSTEEVVECCIDYLKDGYAIGVPVPRHEGRLSGRGTIGKKRFVTHDHKSFQEAHFSVLHQFAIVEPYIDQHIELIRANNKGRTTEWIMKEHKRLFVDWLRDLDLPEGQITDEITMKRLACGPSTTVNSWQGYDINGYSFSTRARDNKTCTQNSGVRVEAIDEAGEKQLYFGFIEEIWEIDYGHTMQFPIFKCQWVKYPNGVNVDKFGLTVVDLASVGHKDDPWVLANRVAQVFYVKDPSNLKKDIVLPGKQKILGVDGVEDVEDYNQYDSMPLYSQFV

SEQ ID NO: 112393 - protein, 2031 aa, Oryza sativa
  unsure (1)..(2031): unsure at all Xaa locations
  Clone ID: PAT_MRT4530_16282C.1.pep
TESREWMYYWPRFLSPYRNEVSKFISIAKAHAEKNNTTKIICSCADCKNEIAWDFDDAFKVKEHLVTRGFMDKXEIWTRHGEEQVDGPENVVPTQVEDMVHDDGSVEDKIDLEKMLRHAEPEVLMGSDRGLNNFEALQKAAKEVLYDESKGCDSEFTTLRSVLELVRLKARHGWSDTSFDSLLKPLQKMLPRPNSLPSSTYQAKKLICLLSLGVEKIHVCVNHYIMYRKEYASLDECPTCGVSRYKSNSNTGLQPSDTTXEDRKIPQLVMWYLPVKDRIKRIYSNPXDAELMRWHEEGRKKDGMIPHPIDARQWINFDAQYREFAKDSRNIRFALSTDGVNPFGDMSSSHSTWPVLLIMYNLPTWLCQKRKYVLLCILIQGPRQPGIDIDIFLEPLLEDMADLWKEGLKVWDEYLREYFTVKAIIFVTINDYLTMFSVSGQIKGKTGCVICLNGTYYRYLPGSNKLVYMRHRRFLCTNHKYRKMKAEFDGTEETDPAPKPTSGEKVCATTEKIVCEFGKVAKKPSKGTKRKKPEKTTKPGDSKKQDDSSKPDDKLPPPFKKHSIFFNYLLYWKDLEVRHAIDVKHLEKNVFNNIVGTLLDMPKKTKDGLQSRMDLVEMGIREELHPQEGEKNGKVYLPPACFTLTPEEKKSFCKSLRDVRVPIGFSSNISRLVSMKDLSVSGYNSHDCHVLLTVFLAIAIRAIKPENLKVAITRLCYFFNAVSQKVISLEELGSLHTFAHETQCQLEICFPLSFFDMMEHLIVHIVPQMVAVGPLXLHQMWSYERYMAVLKGYVRNRAHLEGSMVEGYSTEEVGECCIDYLKDGYAIGVPVPRHEGRLSGXGTIGKKRFVTHDHKSFQEAHFSVLHQFAIVEPYIDQHIELIRANNWLXDLDLPEGQTTDEITMKRLACGPSTTVNSWQGYDITGYSFSARARDNKTCTQNSGVHVEAIDEAWEKQSYFGFIKELWEIDYGHIMQFLIFKCHQFVQKIKNIETSTQKTVKPYKRTDGVGKNVKGVYIFASGSSSQADRPPAKIVSLYKGKPXAAPKFLSPGGNPRNFGAAAPPLRRRRAVHRIATTGRAPLPPLHHSVAAAPSTASPPPAPQPPAAASPPADLAAERLHWPFVIHERRRPRPNGFIGRSSSTAELRRWPFVRRPRPKLVVGRSSSTDKFETMADSTKGTEEKGLGEEEQSIAVVVADEDGEYSSPSDPCPSPSPKRRKKGDGEEGNKDYIPPIKGDWDHVSNGDKKVLWKELKKIFQFPDGSEPAVRNCALQTMAKSWRGWKTTLNKKFVKTGCIPFSTYANITPNQWEDFLTLKNSPKEIQRSQKYSELAKKNKFPHRLGSAGYAPKVEQWTKEEEEMRKAGLPVPMKEWTQRSRNWHGGRVRGVSSKMSWKEGFKHDPHXKRDAYKDKLRDEGAADFERQMMDFCVKHMLLPRPETKEPEPDYPFDDLKENTPCRLHVPIGRSGKTLEAATAIAIPRRTYNEEFIPDAYAKVQPQVVHEGFESYDIDFPTADGVSVLGDAVDLVILWHKNDISFGLGTDATRKPEVPKPGLGKPPKPPKKKVIEKAEEPEMHKENIVPEVAPKIEVPEVPMEIALPDVQMEIKVAEPEVQFVASVGTEIEEVPGLEWDGTDLEIFEDPSPAKDPEVQETTVPEKATTSSEVPRVLRSHDSKSKDKNKEKFMVTVFRGGKERAKLRDDDPQKAAELAGPTYFATDDCPEKYEHGKALLPEWALKKGPWEMRRLHTFYMEASKKGLGNXRSSADCFGEQGYVWLDFSNLHAIYRRDKMDVNYVGVWCMMQYMDAKKKKEPIGFLDPTRICQTQHTERLAPGSDQLKGKNPKQIAEYKKGLHKEXLITVAXYIGRAFLHFQNKRVVMAAYNFNDHYICLLIHPKDGTVVVLDPLDYSHKQYKEFLTILQYAYQYYKFKGGEQTRTREKLLCHKQPRGTVLCGYYACEFLRVNGRYKTNVEDLPRLERRTSFDDIGITNVXRDPCHFIYHECCHVKGDFFDPEGALAASDEFKDLREWNTAMP

SEQ ID NO: 112394 - protein, 157 aa, Oryza sativa
  Clone ID: PAT_MRT4530_16283C.1.pep
MRKLRFHEQKLLKKTNFLDFKREKGHRDAIVTQRYLLVERDDYKKYNGICLMVQKLVNIIKQMDPRDPYRAEMTDMLLDKLRRLATVMVKLKFAEHLKEAVTYIQQGHVRVGPETVTDPAFLVTRNMEDFITWVDSSKIKRKVQEYNGELDDFDAMA

SEQ ID NO: 112395 - protein, 1152 aa, Oryza sativa
  Clone ID: PAT_MRT4530_16284C.1.pep
MAGLRKGIREHQLLHLRRDITTSPRDAYEVHDYNFEQVASKLPFYDGKYDSVAYIDWELAVDNEFDIYDFSDTQMIKAASNKFTSSALFWWTYVSNKPETWDELKTMMRKRSVTSYYKCTLREKLEHLKQGDRTVREYIHEFKVCIIYSGLKECNENTMRRFFNGLNSEIQVLLDNVTYNHIGHLFMLARSIESQIISKARMHDQCDLSPISESPIYLCNDDVQTLEEQSFVSPVTNVLQEDQHIQEKENGILEKKEDEAPAMSKESSQGKLNGAERNEGIGLICTDKINNPRRGVSIAKAQHNVSDMESREWMYHWPRFLSPYRNEVSKFIAIAKAHAEKNNMRKIICPCADCKNEIAWDFDDAFKVKERLVTRGFMDKYEIWTRHGEEQVDGPENVVPTQVEDMVHDDGSVEDKIDLEEMLRHAEPEVLMGSARALQKAAKEVLYDESKGCDSEFTTLRSVLELMRLKAKHGWSDTSFDSLLELLQKMLLRPNSLPSSTYQAKKLICPLSLGVEKIHVCVNHCILYRKEYASFDECPTCNASQYKSNSNTGLEPSDTTEGRQRKIPQLVMWYLPVKDRIKRIYSNPRDAELMCWHEEGHKKDGMIRHPADARQWINFDAQYREFAKDPRNIRFALSIDGVNPFGDMSSSHSTWPVLSPCIIFLPGFVKSENTYYSGSSYRDPVNLKIVCEFGNVTKKPSKGTKRKKPEKTMWDSKKQDDSSKSDDKLPSPFKKHSIFFKYLPYWKDLEVRHAIDVMHLEKNVFDNIVGTLLDMPKKTKDGLQSRMDIVEMGIREELHPQEGEKNGKMVALGPLYLHQMWSYERYMAVLKGYVRNRAHPEGSMVEGYSTGEVVECCIDYLKDGYAIGVPVPRHEGRLSGRGTIGKKRFVTHDHKSFQEAHFSVLHQFAIVEPYIDQHIELIRANNKGRTTEWIMKEHKRLFIDWLRDLDLPKGQTTDEITMKRLACGPSTTVNSWQGYDINGYSFSTRARDNKTCTQNIGVRVEAIDEAREKQSYFGFIEEIWEIDYGHTMQFPIFKCQWQKYPNGVNVDKFGLIVVDLASVGHKDDPWVLANRVAQVFYVKVPSNLKKDIVLPGKQKILGVDGVEDVEDYNQYDSMTLYSQFVQKIKNVETSTQKTVKPYMRMDGVGKKC

SEQ ID NO: 112396 - protein, 395 aa, Oryza sativa
  Clone ID: PAT_MRT4530_16285C.1.pep
MGDPYTNFLRGYHHHHRSHHPLHFPPPPPPPPPPYAASFSGLYSSYLHPPPPPSSPPIREALPLLSLTPSTTHDDDHHHRRHDQDHHHHHKQGQEKNSHGGGGAASCSNNDDKRESPSAAAAADDQAAEVTVALHIGLPSPSPSDAAAAAGNQAAAAAAAEASAAGGGSSRMQVEEEGGEEEDEDEAAAAAATATLPLGCASIGIGKLTKGQYWIPTPSQILIGPTQFSCPVCYKTFNRYNNMQMHMWGHGSQYRKGPESLRGTQPTAMLRLPCYCCAAGCRNNIDHPRARPLKDFRTLQTHYKRKHGIKPFMCRKCGKAFAVRGDWRTHEKNCGKLWYCACGSDFKHKRSLKDHIRAFGRGHAACGIDSFDDLDADDDPSSDLDHASASASRVG

SEQ ID NO: 112397 - protein, 79 aa, Oryza sativa
  Clone ID: PAT_MRT4530_16286C.1.pep
MAETLTGEARLIQTKAMLTGSCHHDHSSVIAVTIFTTLVITACILVKAAFLSPDLRHSRSQQQQQRNLTIKENLYPDSD

SEQ ID NO: 112398 - protein, 182 aa, Oryza sativa
  Clone ID: PAT_MRT4530_16287C.1.pep
MRKLRFHEQKLLKKTNFLDFKREKGHRDAIVTQRYLLVERDDYKKYNGICLMVQKLVNIIKQMDPRDPYRAEMTDMLLDKLYNMGVIPTKKSLLTCEKLSVSSFCRRRLATVMVKLKFAEHLKEAVTYIQQGHVRVGPETVTDPAFLVTRNMEDFITWVDSSKIKRKVQEYNGELDDFDAMA

SEQ ID NO: 112399 - protein, 96 aa, Oryza sativa
  unsure (1)..(96): unsure at all Xaa locations
  Clone ID: PAT_MRT4530_16288C.1.pep
NNILVSTINGAGCGDLRRLYVVVFLVFXASTHKTRLRTLGLAAAVASVFAAVALVSLLALHGQHRKLLCXVADTVCSICMYASPLSIMRLVIKTKS

SEQ ID NO: 112400 - protein, 332 aa, Oryza sativa
  Clone ID: PAT_MRT4530_16289C.1.pep
MAAATIASKHPAADGGGDACSGASHCSTLTNIYNYDSLGTLGAGACSVVRKARDRRTGDTVAIKCFHPPGGDLDDGQQQQQHDAVALAGRERDCLAACRGSPSVVQLLDVAADPWNSGDVYLVMEFVGTRTLRDLTVGRPFSEAETRALMRQLLAGAAAIHGAGLIHRDVKPANILVGPGCVLKYCDFGDATPVMPPYEEFLVGTLRFTSPEEVAGDRFYGQGVDMWALGCVMAELLTGRFVFTSSETCEDHVLDLLDLRECDVGAEDSPAFGGLPGLSPAGREVLAGLLAFDHRERMTAEAALEHRWFTAAADSPAVLRRLADLAAGKNNM

SEQ ID NO: 112401 - protein, 211 aa, Oryza sativa
  Clone ID: PAT_MRT4530_1628C.1.pep
MRVSSVVGVGQQGCRRLSEPLSRAQTSTTKERDIEIAVLDLEAIEAGTGTRVASHRRPLPLSALPPRLLTPLAASCLEGDRKSGKEVEREGNSTVNSPREQIDRSHRCSRIPSWRVRTGNAHAAQPSRDSPRLTPFKNFSTLTELVAPHRETAQAPLCRFGRGLRVKSQALSRLHASSGLRRVPRGFRLDGMGQGVRQTASRHLTRDLTGL

SEQ ID NO: 112402 - protein, 60 aa, Oryza sativa
  Clone ID: PAT_MRT4530_16290C.1.pep
KVHHRSLNLYRCVIPVHKLANRPFRSSNLFDYVIPVPKLTDHSFRSSILFSCVTPVPKQD

SEQ ID NO: 112403 - protein, 181 aa, Oryza sativa
  Clone ID: PAT_MRT4530_16291C.1.pep
PQDLRHKPGAHQYKINYFPNSQPRPPKSPPAPGMRQPRQVPPPETSKPYPAYHDSMIPPERAQKSRSIGAQIGARKKKAKRGTLARHVPWGPSGIRRMRRKTRRGSSPPWLRLPLAWAVGIRRRRLEEALNRGEREREMERGYGNGREETFGPKANVEYDYECMTDSVRLLAVTRTRRTTR

SEQ ID NO: 112404 - protein, 41 aa, Oryza sativa
  Clone ID: PAT_MRT4530_16292C.1.pep
MSSGFSNRLCDTSLPRPYTDSFLTVGAYELVTGRVQSSSAR

SEQ ID NO: 112405 - protein, 644 aa, Oryza sativa
  Clone ID: PAT_MRT4530_16293C.1.pep
MPSLALLRAVAMALLLLLARSMEGVDGAGGGGNATCPLDLSYVTTFPWDADLCAGGAGNMTRCCNTLLSVLAIGLAEQVRATGHFRIPSVGESAACLKDYGAKLSAAPLSLPGASLVQTCFPSPEQFVSSPSFCAGVTTAAEYRAVVGNDSVAALDSACGDLSSTPHCLRCLDAGIAATSRLKAAANISANATTDGAATTRNCFYLTVTYAAGISNVAGPTNPPTAACTLGLALSNPPAAPPKSHDTVIYATAIPVAFLLLASLLAFLVWRRHDKKKKKKKIHEISKEGSAKRRSHPRPNTGSILYDIAELSKATDAFADRNLVGRGGFGAVYCGVLADGSVVAVKKMLDPDVEGGDEEFTNEVEIISHLRHRNLVPLRGCCIVDDDAEEGKQKFLVYDFMPNGALEDFIFRDGKRPALTWAQRRSIIMDVAKGLEYLHYGVKPAIYHRDIKATNILLDGDMRARVADFGLARRSREGQSHLTTRVAGTHGYLAPEYALYGQLTEKSDVYSFGVLVLEVLSARRVLDMSAPSGPVLITDWAWAHVKAGQAREVLDGALSTADSPRGGAMERFVLVGILCAHVMVALRPTITEAVKMLEGDMDIPELPDRPLPYGHSAMFSEAGSNFSASPAFSGPFIDNGDMLR

SEQ ID NO: 112406 - protein, 101 aa, Oryza sativa
  Clone ID: PAT_MRT4530_16294C.1.pep
MDDGGTRGGWGGQGRQLRRKRATTVADAADEGASETSAEDEVGGPGATMDYAAAANAVDGDSEASEAMAAVAVTMAMVAIADEDGDSGNPVRLRRSVQPGD

SEQ ID NO: 112407 - protein, 364 aa, Oryza sativa
  Clone ID: PAT_MRT4530_16295C.1.pep
MALDNYHSYYVDDHFVLPPPPPPQLDWDWDQLQLHTLGGGGGDAAQDGIHGAFLPAMRLESPESSSSEASSGYLQDAVAHWSDRCNKRQRMAEAAAPPRRPAAAAANEDLHCLLQSFWDSSSSGGEGGLMHELNIMIPESGSFVSGDEDDASGWEQEQRGPISAAAAAATSAVQVPAAQGGGGGEAADPILHNHNSSPATSRTTTGQGAAQQLQLQKATSAAGAGHAAAAAGRPGRRGNYSCEEHVIVGKQQQQPSPSSRAASASSPRRSSSLTGKEKRDTGVLYPFAVVKPLGLEGGGAATLNDVNQRILKRPARPVRHPVGQFACSPAVYAHGLGLSGKAVVSLTRIRTAGKGTITIIRTRG

SEQ ID NO: 112408 - protein, 1499 aa, Oryza sativa
  unsure (1)..(1499): unsure at all Xaa locations
  Clone ID: PAT_MRT4530_16296C.1.pep
MRSEQAHLKVVKVLKXASGDKGDGLQDGAIEDLGEDGTEVQEEPPRRMNFQDQVDYAVQHALINQSGVPVNTLTNIIKSVIDGTIAEHQTTGPVFLPGGVFPNYRSLATSNQHSTPNAPQVQPMAAASTPTPAAPSSAQRQTVNNPRLLSREQTQHPGQNINRLSQEQIASLFLPTQPTGGPVQQTPPRQLRIQPIWQQTVQQMPTGFRTPDSRQTSKCDSNQSVAAQVIPEHLVRNIQPNFQNYQGGNLNYQYQPPSPHVQYQQGGSPQSQYAPQFNQFESIQQQVQGAPQQRQWADMIADVMREQFALKPKDTGNLYRHPYTVWFERVPLPNRYKVPNFSKFSRQDIASTYEHVSRLLASVVDALKKQFHSYFYNGTHEMKLSDLTAGLIAPIKEKFLSQEFESLSHHAQKVTLHEQRFAEAKKNFKKINHVCPYICDSDEEDDSEVAAAEWVRSNVIPCQWVKNSGKEERYDFDITKADRIXIFYFGRNRYSFLPIQAAIEGGKIKFDDSKKPMKIINKYQRRHDKQQERYYEQEGDGFDPHWGCEFFRFYWNEGMRLPSIEDCPGCSNDTGSSSRSYNRGNRLSRKRVPVHQRLGPVNREYYQSEDEDRATQWCPSGIFMKNQKRRVQRMGNRERFQEVEQEINHRLKKAKPKQEWRVKSKVAMADEVEADKAKRLAKGQSVVTASVNMVFLLPTEYEAKQANVDEVEEASTRLVLSPEQEVFEKPEGTENRHLKPLYINGYVNGKPMSKIMVEGGAAVNLMPDATFRKLGRNSDDLIKTNMVLKDFGGNPSETKGVLNVELTVGSMIVPAIFFVIDGKGSYSLLLGRDWIHANCCIPSTMHQCLIQWQDDKIEIVPADSQLKMETPNYYFECVVEGSNVYTKDTVDDLDDKQGQVFMSADDLEEVDIGPGDRPRPTFIRHKIISFMDGNEGYNQIFMAEEDIHKTAFRCLGAIGLFEWVVMTFGLKSAGATYQRAMNYIFHDLISWLVEVYIDDVVIKSNEIENHIADLRKIFERTRKYSLKMNPTKCAFGVSASQFLGFFVHERGIEVTQRSINAIKKIKLPEDKKKLQELIGXRLEPFTPLLRLKADQEFXWGAEQQKALDNIKEYLSSPPVLIPPQKGIPFRLYLSAKTRHSPMEKLCLCLYFSCTKLRHYLLSNECTVICKADVVKYMLSAPILKGRVGKWIFALMEFDLRYESPKAIKGQAIADFIVDHRDDSIGSVEIVAWTLFFDGSVCTHDCGIGLVIISPRGPSFEFAYTIKPYATNNQAEYEAVLKGLQLLKEVEADAIEIMGDLLMVISQLAGEYECKNDTLIIYNEKCRELMNSFRLWVEAIPLKKVDSGDAIQFVKEHIIYRFGIXRLLQPIRGLSLCXDEFVQFADSMGIKLLNSSPYYAQANGQAEASNKSLIKLINRKILDFPRQWHTRLAEALWSYRMACHGSIQVPPYKLVYGHEAVLPWEVKIGSRRTXLQNGFTADEYYNLMADEREDLAQSRL

SEQ ID NO: 112409 - protein, 69 aa, Oryza sativa
  Clone ID: PAT_MRT4530_16297C.1.pep
IGGLGGHQAPPAPPLPEGIGGVPPPPPVGGLGGPPAPPPPAAPPMPPGVPGGPPPPPGGRGLPAPPLSP

SEQ ID NO: 112410 - protein, 58 aa, Oryza sativa
  unsure (1)..(58): unsure at all Xaa locations
  Clone ID: PAT_MRT4530_16298C.1.pep
KYFPIVLYQFTLNIHXGSLNHQGKIQAITSRQNXHVLKVLILTXSNKQEYFLYPRGTC

SEQ ID NO: 112411 - protein, 427 aa, Oryza sativa
  Clone ID: PAT_MRT4530_16299C.1.pep
MGKKKKRVEKVFCYYCDREFDDEKILVQHQKAKHFKCHVCHKKLSTAGGMAIHVLQVHKESVTKVPNAKPERESTEIEIFGMQGIPPDVLAAHYGEEEDPSSKVAKVEVPSLRPPVMPNPAGMVYPPRPAYGVAPPMYNPALNPLMARPPIWPAPPPQPWFTQPVVSVPQMASGLAPQQPLFPIQNMPAPMTSAPANLLQTSFPMAHVGVPSPVTPQVSQPLFPVSTSAGNGAVSSPYVASVAPGSIPTSSPSVAPAGVGYAATNQGTGGPAAVPPPASNNKAPATQPGANEVYLVWDDEAMSMEERRLSLIKYQVHAETSQEFQVGIYIVLPGGARVLRPDELLLDHYYYHHSSSSDPYYSTPILPPYGDAFSPPNPPPPPPPMSPSDLISPIIPAPTFTYSSPPPPPLYYPPPPDISPSPPPSIP

SEQ ID NO: 112412 - protein, 60 aa, Oryza sativa
  Clone ID: PAT_MRT4530_1629C.1.pep
KNSSFTTMGAEKLPDQMHDLKIRDDNEVQVTNINGKGAETGHIIVTTTGGRNGQPKLVIS

SEQ ID NO: 112413 - protein, 271 aa, Oryza sativa
  Clone ID: PAT_MRT4530_162C.1.pep
MVLGSPEVGMEDSSATHLSDEVQDPGRGSSDASVRTSLRDSTGKEAVAAVEPVREELVQSAVGFLKHPKVVASSDVQRRSFLEKKGLTVDEIDEAFRRLLSPSSNSMSPNYCTYQGVSDHSSKITQENPSTVTKCMDDDSGRPEPETESVDPVVPRHPKSYMEIMEMIQRGERPDDIQDINDDPPNPYQPISESRMAPKPKPWEKQGQESSIWELKSQSMDTIESRSEIQLDSANQFTETENRSNQGDSLLLEETVAGSEAHTDDAASTKS

SEQ ID NO: 112414 - protein, 67 aa, Oryza sativa
  Clone ID: PAT_MRT4530_16300C.1.pep
MAPAGAEAGRTATARWVQRPVRRCGRPLASWPGDGEEEAARGSGGGGCSGARIRVFPHTDPESAAAA

SEQ ID NO: 112415 - protein, 136 aa, Oryza sativa
  Clone ID: PAT_MRT4530_16301C.1.pep
RREGKGTGRRGSERARRHRGEVRLRCRRRLRIRVGEYPDPRARAAAATGSTRLSRRCRIRARERPQLPPPPPPSEAAASPTTPSRPPNRTEPPHGFLLSVTRPRRQRPAAAPHRPLHPPRRRRPSGLCTRWWREPR

SEQ ID NO: 112416 - protein, 151 aa, Oryza sativa
  Clone ID: PAT_MRT4530_16302C.1.pep
EENKLSSTDFDSLEFLYYHNLVRLARWELPLAWSPRLESYARWWAAQRRGDCALRHSFPEGQFALGENIFWGGAGGAWRPGDAVKDWAAEGVDYSYAANACAAGRECGHYTQIVWRGTTSVGCARVACDDGGVFMTCNYYPPGNVVGERPY

SEQ ID NO: 112417 - protein, 50 aa, Oryza sativa
  Clone ID: PAT_MRT4530_16303C.1.pep
AVSDDKKYQINIQIRLLQLQMTRLRQAGRDRKPFISSHRSFSCQCSLLPI

SEQ ID NO: 112418 - protein, 554 aa, Oryza sativa
  unsure (1)..(554): unsure at all Xaa locations
  Clone ID: PAT_MRT4530_16304C.1.pep
MVEQWTKEEEKMRKAGLPVPMEEWTQRSRNXGKVSFEDPELVVVADTIENLSSAQKKGAFKPKREKDVLSTALSTPEHRGRVRGVSSKMSWKEGFKHDPYKTRETFKDKLRDEGAADFERQMMDFCVKHMLLPPPETKEPEPDYPFDDLKENTPCRLHVPIGHAGKTLEAAIAIAITGRTYNEEFIGNAYAKVQPQVVHEGMTYPFELGTDATRKSVVPKPGLGKPPRQPKRKVTDKAEEPEMHKDNPVPEVPPEIAVPKVPMEIVVPDVHMEITVAEPEVQFVASVGTDIEEVPGLEWDGTEPEIFEDPSPAKYPEVQDTPVTEKATTNSEVPRVLRSHHSKSKDENKEKFMVTVFRGGKERAKLRDDDPQKAAALAGPTCLPTNDCPEKYEHGKALLPEWALNEGPWEMRRLNTFYMEASKKGLGNITARSPADCFGAEGYVWLDISDLNTIYHRHKMGVNYVGVWCMMQYMDAKKKKEPIGFLDPTRICQTQHTVRLAPGSNQLKGKTPKEIAKYKKGLHKEKLIIVAQYIGRAFLHFQNKRVVMAAYNFE

SEQ ID NO: 112419 - protein, 164 aa, Oryza sativa
  Clone ID: PAT_MRT4530_16305C.1.pep
VRVARHHLSFPLFSPFLLSQSSLGRQAGRAGRGGARRGRPATRPHPKTHTCEAGRRRGGGGHHSRSVSLCLHIRRRSRRRTSARPGGEGAAGGHHSRSVSLRLHLRRYSRRRRSQRRHRRCISKARTAASARVGVLPPPRRAAVPHAATRAAGGRGARRLHRRR

SEQ ID NO: 112420 - protein, 825 aa, Oryza sativa
  unsure (1)..(825): unsure at all Xaa locations
  Clone ID: PAT_MRT4530_16306C.1.pep
EQSLAVMVAPEPTVPPDGSSDSDVGDEDEEYSLPSDPCQSPSPKKRKKGDGEEGDKDYIPPKEGCGIIVREKISITVKDWDHVTDGDKEVLWKELKKIFQFPEGSEAAVRNCALQTMAKSWHGWKTTLNKKFVKTGRTPFSTYANITPNQWDDFLTLKNSPEEIKRSQKYSELAKKNKFPHRLGSAGYAPKVEQWTKEEEEMRKKGQPVPMEEWTQRSRNWVRGRTPKITDEGKVSFENPELQSVSDKIENLSSSQKKGYFKPKREKDVLSTALGTPEHGGRVRGVSSKISWKEGFKNDPHKKREAYKDKLRDEGAAEFERKMMDFCIKHMILPRPETKETEPDYPFDNLKENTPCRLHVPIGRSGKTLEAATAIAIPDGISVLGDAIDLVILWHKNDIFFGLGTDAGEKPVLPKPGLGKPPRPPKRMVTDKADDPELDKENPVPEVPPEIALPETAKEIAPPKTANGDCTXETAMEIQVPDVPIEITVAEPEVEFVAPVGXFEDPSPAKXPRGGKERAKLRDDDPQKASVLAGPTYFATDDCPEKYEHGKALLPEWALKEAPWEMRRLHNFYMEASKKGLGNITARSPPDCFGEEGYVWLDFSDLHAIYRQDKMDVNYVSVWCMTNAEDIFASTTIPMAGLESDAPETNYHRRSPSSSLAVAPVCPPPPPHRPPAVRTPLPVTLCRELAVVRTPLLVGEPRRSHPPPLPPLAVEPAAESRPEEEEKEARATPGPPTAIASPPPRAARRRRRRHTAPRHRRRRRLAGHSQAKAWRIMDRVASAGLTESGGSRDQMAAGSNHLACRQRGFRWRFTKAEGRTGSTMT

SEQ ID NO: 112421 - protein, 1017 aa, Oryza sativa
  Clone ID: PAT_MRT4530_16307C.1.pep
MESREWMYHWLRFLSPYRNEVAKFIGIAKVHAEKNNMRKIICPCADCKNEIVWDFDDAFKVKEHLVTRGFMDKYEIWTRHGEEQVDEPENVVPTQVEDMVHDDGYVEDKIDLEEMLRHAEPEVLMGSARGLNNFEALQKAAKEVLYDESKGCDSDFTTLRSVLELMRLKARHGWSDTSFDSLLKLLQKMLPRPNSLPSSTYQAKKLICPFHLVWKRFMHRITRIYSNPRDAELMRWHEEGRKKDGMIRHPADARQWINFNAQYREFAKDPRNIRFALSTDGVNPFGDMSSSHSTWPVLLTMYNLPTWLCQKRKYVLLCILIQGPRQPGIDIDVFLEPLLEDMADLWKEGLKVWDEYLREYFTVKAIIFVTINDYLAMFSVSGQIKGKTGCVICLNGTYYRYLPGSNKLVYMRHRRFLRTNHKYRKMKAEFDGTEETDPAPKPTSGENVCAMTEKIVCEFGKMTKKPSKGTKRKKPEKNTKGGDSKKQDDSSKPDDKLLPPFKKHSIFFKYLPYWKDLEVRHAINVMHLEKNVFDNIVGTLLDMPKKTKDGLQSRMDLIEMGIREELHPQEGEKNGKVYLPPACFTLTPEEKKSFCNSLRNVRVPIGFSSNISRLVSMKDLSVSGYNSHDCHVLLTVFLAMAIRAIKPEHLKVAITRLCYFFNVVSQKVISLEELGNLRTFAHETQCQLEMCFPPSFFDMMEHLIVHIVPQMVAFGPLYLHQMWSYERYMAVLKGYVRNRAHPEGSMVEGYSTEEVVECCIDYLKDGYAIGFAIVEPYIDQHIELIRANNKGRSTEWIMKEHKRLFIDWLRDLDLPEGETTDEITMKRLACGPSTTVNSWQGYDINGYSFSTRARDNKTCTQNSGVRVEAIDDAGEKQSYFGFIEEIWEIDYGHTMQFPIFKCQWVKYPNGVNVDKFGLTVVDHARVGHKDDPWVLANRVAQVFYVKDPSNLKKDIVLPGKQKILGVDGVEDVEDYNQYDSMPLYSQFVQKIKNVETSTQKTVKPYMRTDGVGKNVKG

SEQ ID NO: 112422 - protein, 112 aa, Oryza sativa
  Clone ID: PAT_MRT4530_16308C.1.pep
VGGGGGGPGIWGGSLEGATIFFLEGLIKVWGKNGITFSWGEIVCRYNFHKKKNPNVYGEMGGGPIGGASKFFLGGVYWVFLKQKTGGASFFIKPPTPLGGGVRVLAPMVFFF

SEQ ID NO: 112423 - protein, 1024 aa, Oryza sativa
  Clone ID: PAT_MRT4530_16309C.1.pep
DIESREWMYHWPRFLSPYRNEVAKFIGIAKVHAEKNNMRKIICPCADCKNEIAWDFDDAFKVKEHLVTRGFMDKYEIWTRHGEEHVDEPENVVPKQVEDMVHDDGSVEDKIDLEEMLRHAEPEVLMGSARGLNNFEALQKAAKEVLYNESKGSDSEFTTLRSVLELMRLKVRHGWSDTSFDSLLELLQKMLPRPNSLPSSTYQAKKLICPLSLGVEKIHACVNHCILYRKEYTSLDECPTCGASRYKSNSNTGLKPSEATEGRQRKIPQLVMWYLPVKDRIKRLYSNPRDAELMRWHEEGRKKDGMIRHSADAQMADLWKEGLKVWDEYLREYFTVKAIIFVTIIFTVSGQIKVSFGYESKNDESLIYIENMEIMKAGLTGPVSRSDWRDKAGLTGPTEPPESQPVRPSRWRSDRAVDGLTGYYTAFLRTNHKYRKMKAEFDGTKETDPAPKPTSGEKVCAMTEKIVCEFGKMTKKPSKGTKRKKPEKNTKQGDSKKQDDSSKPDDKLPPPFKKHSIFFKYLPYWKDLEVRHAIDVMHLEKNVFDNIVVTLLDMPKKTKDGLQSRMDLVEMGIREELHPQEGEKNGKVYLPLAYFTLTPEEKKSFCNSLRDVRVPIGFSSNISRLVSMKDLSVSGYNSHDCHVLLTVFLAIAIRAIKPEHLKVAITRLCYFFNAVSQKMVALGPLYLHQMWSYERYMAVLKGYVRNRAHPEGSMVEGYSTEEVVECCIDYLKDGYAIGVPMPRHEGRLSGRGTIGKKRFVTHDHKSFQEAHFSVLHQFAIVEPYIDQHVELIRVNNKGRTTEWIMKEHKRLFIDWLRDLDLPEGQTTDEITMKRLAFGPSTTVNSWQGYDINGYSFSTRARDNKTCTQNSGVRVETIDEAGEKQSYFGFIEEIWEIDYGHTMQFPIFKCQWVKYPNGVNVDKFGLTVVDLASVGHKDDPWVLANRVAQVFYVKDPSNLKKDIVLPGKQKILGVDGVEDVEDYNQYDSMPLYSQFVQKIKNVETSTQKTVKPYMRMDGVGKNVKG

SEQ ID NO: 112424 - protein, 231 aa, Oryza sativa
  Clone ID: PAT_MRT4530_1630C.1.pep
MACIIFECANAHEPKGFICCPCKKCKNQKKYSSSRTLHIQLLKTVFMPSYNCWTSHEELGVPMEEDEEEGDNIPDWAQYDRFVENTIGEAEGVIEENDGSDDLGQMLYDVKKDCESEKEVRKLEHTCLIKEQLMGKAPIKKAMEEDLKHSYAIGAPLVKPELVKELSTQMYRCIDSINGTWINQLMVGLCSLKDLKIKTSVGCTMWIKFKDVYNVYQQDALDVSLVNCWVL

SEQ ID NO: 112425 - protein, 1086 aa, Oryza sativa
  unsure (1)..(1086): unsure at all Xaa locations
  Clone ID: PAT_MRT4530_16310C.1.pep
MESREWMYHWPRFLSPYRNEVSKFIGIAKSHAEKNNMRKIICPCADCKNEIAWDIDDAFKVKEHLVTRGFMDEYEIWTRHGEEQVDGPENVVPIQVEDMVHDNGSVEDKIDLEEMLRHAEPEVLMGSARGLNNFEALQKAAKEVLYDESKGYDNEFIILWSVLELMRLKARHGWSGTSFDSLLELMQKMLPRPNSLPSSTYQANKLICPLSLGVEKIHARVNHCILYKKEYAPLDKCPTYGASRYKSNSNTGLEPSDTTEGRERKIPQLVMWYLPVKDRIKRIYSNPRDAELIRWHEEGRKKDGMIRHPADACQWINFDAQYREFAKDPRNIRFALSTDGVNPFGDMSSSHSTWPGPRQPGIDIDVFLEPLLEDMTDLWKEGSKVWDEYLREYFTVKAIIFVTINDYPTMFLVLGQIKGKTGCVIYLNGTYYRYLLGSNKLVYMRHRRFLCTNHKYRKMKAEFDGTEETDPAPKPTLGEKVCAMTEKIVCEFAKVTKKPSKGTKRKKPEKNTKQGDSKKQDDSSKPDDKLPPPFKKHSIFFKYLLYWKDLEVRHAIDVMHLEKNVFDNIVGTLLDMPXKTKDGLQSRMDLVEMGIREELNPXEGEKNGKVYLPPACFTLTPEEKKSFCNSLCDVRVPIVSXNIISLEELGNLHTFAHETQCQLEMCFPPSFFDMMEHLIIHIVLQMVALGPLYLHQMWSYERYMAVLKGYVRNHAHPEGSMVEGYSTEEVVECCIDYLKDGYAIGVPMPRHEGRLSGRGMIGKKRFVTHDHKSFQEAHFSVLHQFAIVEPYIDQHIELIRANNWLRDLDLPEGQTTDEITMKRLACGPSTTVNSWQGYDINGYSFSTRAXDNKTCMQNSGVRVEAIDEAEEKQSYFGFIEEIWEIDYGHTMQFPIFMCHQFVQKIKIVKTSTQKTVKPYMRIDGVGKNVIGVYIFASGPSAGRDRPPAKIISLYKGKPAAPKFLSPGGIPRNFGASSTSCARASAPPLAPSTAAGRFPLAPPPCRQPLHRRRSLHSRRRHLSLSLSLSRSRPRGPSLAFHRPRAKTSSAEHLHLPVVVHGRTSLSALPSSSTTEARRRPFVVHGQV

SEQ ID NO: 112426 - protein, 89 aa, Oryza sativa
  Clone ID: PAT_MRT4530_16311C.1.pep
EPKKRANPFFCSGLLERDGGADGLELGGERREASPPHSSASPHPPSPLSHLHPRHLLMRWRCAALVVVIVGQGGRGGLLAAGLLRPQRH

SEQ ID NO: 112427 - protein, 164 aa, Oryza sativa
  unsure (1)..(164): unsure at all Xaa locations
  Clone ID: PAT_MRT4530_16312C.1.pep
LSPGGNPRNFDAIRLPNFFAAARLRRPPPPPXLRPSLSDRRPLPPPTVVVRALSPRPPPLAAAPPCASSTTLPPPPSTPPPRASYRPPAPPPPAPPPPPAPLPRRPPAPPPRVRSPLAPPPPPAPPPRARPPVLGRTTSSAGRRPRPNHVVGRSSSTTEAGRRP

SEQ ID NO: 112428 - protein, 168 aa, Oryza sativa
  unsure (1)..(168): unsure at all Xaa locations
  Clone ID: PAT_MRT4530_16313C.1.pep
FEKKYPNLYNLVRNKNEVVAKVMSRIPLNVSFRRSILGRNLKPGMSXVEGIKLVSKVVNTVLTDXKDRFFWKNNKDGLSTVKSMYKLLMYEGVVPKKNFIWKLKIPLKIKIFLWYLKEGVILTKDNLAKRRWKGSLSCFCNSKVTIXHLLFDCSMARYIWSALLFTFE

SEQ ID NO: 112429 - protein, 916 aa, Oryza sativa
  Clone ID: PAT_MRT4530_16314C.1.pep
MVHDDGSVVDKIDIEEMLRHAEPEVLMGSARGLNNFDALQKAAKEVLYDESKGCDSEFTTLRKCSRGLTHYHLAHIKRRNSYAPFHLGPCQPGIDIDVFLEPLLEDMADLWKEGLKVWDEYLREYFTVKVIIFVTINDYPAMFSVLGQIKGKTGCVICLNGMYYTYLPGSNKFVYMWHRQFLRTNHRYRKMKAEFDGTEETDPAPKPTSGEKVCAMIEKIVCEFGKVTKKPSKGTKRKKPEKTKKPEDSKKQDDSTKLDDKLPPPFKKHSIFFKYLSYWKDLEVRHAIDIMHLEKNVFDNIVGTLLDMPKKTKDGLQSRMDLVEMGIREELHPQEGEKNGKVYLPPTCFTLTPEEKSFCKSLHDVRVPIGFSSNISRLVSMKDLSVSGYNSHDYHVFLNVFLAIAIRAIKPEHLKVAITRLCYFLNALSQKMVALGPLYLHQMWSYERYMAVLKGYVRNRAHPEGSMVEGYSTEEVVDGVRVEAIDEAEEKQSYFGFSEEIWEIDYGHTMQFPIFKCQWVKYPNGVNVDKFSLTVVDLASVGHKDDPWKIKNVETSTQKTVKPYMRTDGGNPRNFGAVRLPNFFTAARLRPSLSDHRPPPPPIVVVRAPPTFEPLPELPRGRTTSPRLLLLSLRCRPASSRLSLLARAPSGRAVASSSVAAASSPPACPPFRAVTAGGAFPPSSSGVAATVPPPAAPAAPLSGKVALGLASPLSKPLRGPSSSSPFVLVVDVPSLARLVVWLRCHRRGHCCGVSLAVLTSVQLLPAALVASSPAPVVVVVVLSSFRVAAAPVVVFVLGSASSSLVPAASRLHPRIAAEVVPSPSVSAAPVRRCRSLASSRGGKDLSSRCPVLILSVSPVPVVRLSTPLLSFRRFQKRGSRSSPKELRPGSRDVMAQGWCPAARGLNPACLSRGFRP

SEQ ID NO: 112430 - protein, 864 aa, Oryza sativa
  Clone ID: PAT_MRT4530_16315C.1.pep
MRQDLHGSGAREGPAGTRQGTDRHAHKRERGKRGDGSRWRSGGSGGHPTARRGLGIIAAADPTARRGLGIADRNQESDAAARLRTWLQSGIRKEKIYTDGTVKWGLLTSTGVSENLQDALKDKNWKLAMDAEYMALIKNNTSHLVPPQKGRNVIDCKWVYKIKRKEDGGAVDKRGGENEEGGASGTNGGMDTEIKELGKVSFEDPELVVVADTIENLSSAQKKGAFKPKREKDVLSTALSTPEHRGRVRGVSSKMSWKEGFKHDPYKTRETFKDKLRDEGAADFERQMMDFCVKHMLLPPPETKEPEPDYPFDDLKENTPCRLHVPIGHAGKTLEAAIAIAITGRTYNEEFIGNAYAKVQPQVVHEGFESYDIDFPTQDAVSILGDAVDLVILWHKNDISFELGTDATRKSVVPKPGLGKPPRQPKRKVTDKAEEPEMHKDNPVPEVPPEIAVPKVPMEIVVPDVHMEITVAEPEVQFVASVGTDIEEVPGLEWDGTEPEIFEDPSPAKYPEVQDTPVTEKATTNSEVPRVLRSHHSKSKDENKEKFMVTVFRGGKERAKLRDDDPQKAAALAGPTCLPTNDCPEKYEHGKALLPEWALNEGPWEMRRLNTFYMEASKKGLGNITARSPADCFGAEGYVWLDISDLNTIYHRHKMGVNYVGVWCMMQYMDAKKKKEPIGFLDPTRICQTQHTVRLAPGSNQLKGKTPKEIAKYKKGLHKEKLIIVAQYIGRAFLHFQNKRVVMAAYNFDDHYICLLIHPKDGTVVVLDPLDYRHQSYKEFLTILQYAYQYYKFKGGEQTQTREKLLQLRGTVLCGYYACEFLRVNERYRVNAEDLPRLERRTSFNDTGITNVQCDLCNFIHHEC

SEQ ID NO: 112431 - protein, 141 aa, Oryza sativa
  unsure (1)..(141): unsure at all Xaa locations
  Clone ID: PAT_MRT4530_16316C.1.pep
GDVWQSLSTLEKYMRGGETGVGPGDFTGFAHTSCGSARAHQRHTHDLFVREQELAASKSIARKPNDDDGGGGXRSPKETASGAESETPAGPIRVGARRQRDDSLFCAXWLARRRSPAFQRRTRFSHQPSPSVGRDTRVSRG

SEQ ID NO: 112432 - protein, 176 aa, Oryza sativa
  Clone ID: PAT_MRT4530_16317C.1.pep
SGCRIFSPSHAAAVLRRRPPATIALRPPSSAAADRRPPRATRRPSSSRRPLHRPTTATGCSTAELHSHGPSSTATGRSTTELRPRAPPPPAAPPPRAGRQPAPPPPATPTLPLSLSLNRGIAAERLLRPVVVHERTRPWPNDVFGRSSSTVEPRRRPFVVHGRVCMWVLAFYMCVH

SEQ ID NO: 112433 - protein, 147 aa, Oryza sativa
  Clone ID: PAT_MRT4530_16318C.1.pep
MHKENPVPEVPPEIEVLEVPMEIPVLDVQMEIKVAELEVQFVASVGTEIEEVPGLEWNGTESEIFENPSPTKDPEVQDTTVPEKATTSSEVPRVLRSHDSKSKDENKEKFIVTVFRGGKERAKLRDDDPQKAAELAGPTYYVGVWCM

SEQ ID NO: 112434 - protein, 66 aa, Oryza sativa
  unsure (1)..(66): unsure at all Xaa locations
  Clone ID: PAT_MRT4530_16319C.1.pep
MSFVISFTLLTIIKDAITGNNLISSWFGMVYSWFGDRTVQPGXWLYRMVGPMQQGMLYSVGLILFN

SEQ ID NO: 112435 - protein, 98 aa, Oryza sativa
  Clone ID: PAT_MRT4530_1631C.1.pep
YGKACEAFADGLKLDPLPSRVPSRPARSPTAIALPPTTPAGPKVPTVPVRPPPLPASLLPFSFPSLSSSSFIGALPAFDPAALIMLPPPTAGLPPPTA

SEQ ID NO: 112436 - protein, 86 aa, Oryza sativa
  unsure (1)..(86): unsure at all Xaa locations
  Clone ID: PAT_MRT4530_16320C.1.pep
IGQAEFFYDQSPDCMRSLXCSAFALVTXSLGSYLSSFILTLVSYFTTRDDNPGWIPDNLNEGHLDRFFWLIAGLSFLNLLLFIYSA

SEQ ID NO: 112437 - protein, 57 aa, Oryza sativa
  Clone ID: PAT_MRT4530_16321C.1.pep
MEEDDGTVAVEAKMMDGCYFASSSSSLYHAATSFYDSIIDYRSPPSCPIHYQSQDID

SEQ ID NO: 112438 - protein, 179 aa, Oryza sativa
  Clone ID: PAT_MRT4530_16322C.1.pep
MARRLSLLAVVLAMVAAVSASTAAAQSCGCASDQCCSKWGFCGTGSDYCGTGCQAGPCDVPATNDVSVASIVTPEFFAALVAQADDGCAAKGFYTRDAFLTAAGGYPSFGRTGSVDDSKREIAAFFAHANHETIKFCYIEEIDGPSKNYCDETSTQWPCMAGEGYYGRGPAEISWNFNY

SEQ ID NO: 112439 - protein, 362 aa, Oryza sativa
  Clone ID: PAT_MRT4530_16323C.1.pep
MGKAEARSREHGGGGGGGSGSAGKIFVGGLPRDTTEADFVKHFGQYGEIVDSVIMRDKHTSQPRGFGFITYSNPAVVDRVMDDIHEFNGKQVEIKRTIPKDSVQSKDFKTKKIFVGGLPQALTEDDFKHFFQKYGPVVDHQIMRDHQTKRSRGFGFIVFSSDQVVDDLLANGNMIDLAGAKVEIKKAEPKKSSNPPPSSHGSASRSAYGRDSRGHSSGNDYGGLANAYSNYNSGGFGPYRNHGVYGGGSLSGYGGIGEYGVQYGRYYPGLGGSGSMPSFGYASRVGPYGGGFDGPYAGGNLSGYRRGGDESFGGLSSSSFGGAMYGGAAYDPALGGYASGSTPERSRGNLAGGSGRYNPYGR

SEQ ID NO: 112440 - protein, 120 aa, Oryza sativa
  unsure (1)..(120): unsure at all Xaa locations
  Clone ID: PAT_MRT4530_16324C.1.pep
EHEASVHPGFGRQQPPRXVFSKWLMVLEGSRRDTGSRTPATTRRSPSEKTTTSAPMQHPSSPTGERAAAHACRRHRERTSKETNREPPPPVGERCTTRKPPALEYPSRPKLTVPTSVQMS

SEQ ID NO: 112441 - protein, 93 aa, Oryza sativa
  Clone ID: PAT_MRT4530_16325C.1.pep
PSSDLADSTGPVVLCTGTCLTKSAPPLLLIPLISVLHLIWHTMRSMCCHTHITLRRLSMAVNKTPTRSATPTTDNDMSIYDRIDICPSCLHIE

SEQ ID NO: 112442 - protein, 114 aa, Oryza sativa
  Clone ID: PAT_MRT4530_16326C.1.pep
EHTRTNYRENKLKWMKYVTCRIFESSTKKLLASKIQSCKQNLEVLISTNLAKMGRIGCNFLCRCPWIYYLPDSESKERAGGPRGGGGGGWVGGGRRTTPDRRDDAASDSGAPIR

SEQ ID NO: 112443 - protein, 122 aa, Oryza sativa
  Clone ID: PAT_MRT4530_16327C.1.pep
MTERGAPHRETAQAPLCQFGRGPWPGIYLTGSNVPPPGANTPTPARDECLEALILTGWGEASGGPPAAAAQWVDVPKLTQVGCSCELRVDDAKVIAAAAMAHGRLRPGPVWAVESNCDNTDA

SEQ ID NO: 112444 - protein, 182 aa, Oryza sativa
  Clone ID: PAT_MRT4530_16328C.1.pep
MDLDADMIPSSPSADYSSPSSSDLDTESTGSFFPDRSTTLGTLMGVSAFGGGGQRRAARTPARTERERAPLAARPAGEEEEGRRAGGWRRRRRRRQRRGSRSLGGSWWRLCRDDAGGPPTSLGEFLDMERQLAGADFLCDGFGGCGSDREAFVAVAPQLQFLQFRGTAVYKLQHWQLQSLLA

SEQ ID NO: 112445 - protein, 38 aa, Oryza sativa
  Clone ID: PAT_MRT4530_16329C.1.pep
SAFFHRPALGLTGVPQNKKDHPDAGVHSPRYFSNPTPQ

SEQ ID NO: 112446 - protein, 1666 aa, Oryza sativa
  Clone ID: PAT_MRT4530_1632C.1.pep
MPLVFEGVIMIQEAPGLEWLIPGLEVELCSRDGCSEWLGLYNRMPRYKHEYLFGVEGFVQELRTMSFVIGFGTAPFYAQIPHDRHEEKCRVKVTLNSNSEDVPSVMFEAGGRNYIHACQEVARIAIGELRDRYSDQLADTEYRYHPRQPQGSDRGSYLEIEGIENDATTRHLVEMLWAMDESRAETVLAAQDREDRNRGKICKLEDKVDRLEKELAALKGEAPPQKARIRLTARKRALFVPRYQLAPKMVNTRSNGNGPNHPNNNNNGENPTLAQVLAQQTQLMNMMMQQFQNQQNQGNNHVPPQNKLAEFLRVRPPVFSSTTNPVEAGDWLHAIEKKLDLLQCTDQEKVSFASHQLHGPASEWWDHFRLNRINAEPITWLEFAAAFRKTHIPSGVVSLKKKEFRSLTQGSRSVTEYLHEFNRLARYAPEDVRNDEERQEKFLGGLNDELSYPLMGGSSSVVRPQRQFFNNNAGNNIRNQAPRPVAAPTQQQPTKREQGSKPVVCFNCGDPGHYADKCPKPRRVKVVPAQNNSAVPASKARVNHVAAAEAQDAPDVILGTFPVNSVPATVLFDSGATHSFLSMSFAGNNGMEVEDLRRPLMVSTPSNQALSLQCSPSVRIEIQGIPFLANLILLESKDLDVILGMDWLARHRGVIDCANRKVTLTSNDGRVVTVHALSSESLRSRLNQITLEEIPIVREYPDVFPDDLPGMPPKRDIEFRIDLVPGTTPIHKRPYRMAANELAEVKRQVDDLLQKGYIRPSSSPWGAPVIFVEKKDHTQRMCVDYRALNDVTIKNKYPLPRIDDLFDQLKGATVFSKIDLRSGYHQLRIKEEDIPKTAFTTRYGLFECTVMSFGLTNAPAFFMNLMNKVFMEYLDKFVVVFIDDILIYSRTKEEHEEHLRLALEKLREHQLYAKFSKCEFWLSEVKFLGHVISAGGVAVDPSNVESVTNWKQPKTVSEIRSFLGLAGYYRRFIENFSKIAKPMTRLLQKDVKYKWSEECEQSFQELKSRLISAPILILPDPKKGFQVYCDASKFGLGCVLMQDGKVVAYASRQLRPHEKNYPTHDLELAAVVHAFKIWRHYLFGTRTEVYTDHKSLKYIFTQPDLNMRQRRWLELIKDYDMGIHYHPGKANVVADALSRKSYCNATEGRQLPLELCKEFERLNLGIVSRGFVTALEAKPTLIDQVREAQINDPDIQEIKKNMRRGKAIGFLEDEQGTIWLGERICVPDNKDLKDAILKEAHDTLYSIHPGSTKMYQDLKERFWWASMKREIAEYVAVCDVCQRVKAEHQKPAGLLQPLKIPEWKWEEIGMDFITGLPRTSSGHDSIWVIVDRLTKVAHFIPVKTTYSESRLAELYMARIVCSHGVPKKIVSDRGSQFTSNFWKKLQEEMGSKLNFSTAYHPQTDGQTERVNQILEDMLRACALDFGGNWDKNLPYAEFSYNNSYQASIQMAPYEALYGRKCRTPLLWDQTGERQVFGTDILREAEEKVKIIQERLRVAQSRHKSYADNRRRDLSFEEGDYVYLRVTPFRGVHRFHTKGKLAPRFVGPYKNVSRRGEVAYQLELPQSLAGVHNVFHVSQLKKCLRVPTEEANLEQIEVQEDLTYVEKPIRILETNERRTRNRVIRFCKVQWSNHSEEESTWEREDELKSAHPHLFASSSESRGRDSV

SEQ ID NO: 112447 - protein, 89 aa, Oryza sativa
  Clone ID: PAT_MRT4530_16330C.1.pep
MADGGEQLCGRGGNGAMGVRRAKNKRNEEGLGFIEVAMSNQDDIEESKQATYGGPGRPGPGPRDSWKTGCGSISCYMGVPVLASSSATI

SEQ ID NO: 112448 - protein, 175 aa, Oryza sativa
  unsure (1)..(175): unsure at all Xaa locations
  Clone ID: PAT_MRT4530_16331C.1.pep
MPSSPPPPRPXPPPPSPPSNPPPSPPSPSPSTPSSPPPPSPPPSPLPSTPSSPPPPRPXPPPPSTPSCVRRSPSPPTATPTFPTPAXHRRPSRPSSSPRPRPPKTTSGSTTPTXHRRPPPPRPPRHRDPRHRPAPPTIKXSSSPCPRPPKTTSGATTPATALPTTASPTSPTPGS

SEQ ID NO: 112449 - protein, 46 aa, Oryza sativa
  Clone ID: PAT_MRT4530_16332C.1.pep
GVLAWQLRIYRGHRLLHRRCRCCSRLWLLIYPHELIRPYKMSSMFE

SEQ ID NO: 112450 - protein, 67 aa, Oryza sativa
  unsure (1)..(67): unsure at all Xaa locations
  Clone ID: PAT_MRT4530_16333C.1.pep
STVEGGSAVRCQYQKDRNVCLGSLQRDRVKRGPCHRRIPXLNGSHDIKGLFSCCGMVPAPGQLHWAL

SEQ ID NO: 112451 - protein, 228 aa, Oryza sativa
  unsure (1)..(228): unsure at all Xaa locations
  Clone ID: PAT_MRT4530_16334C.1.pep
ASNLALTPHCLDPTRICQTQHTVRLAPGSDQLEGKTPKEIAKYKKGLHKEKLIIVAQNIGRGFLHFQNKRVVMAAYNFNDXYICLLIHPKDGTVVVLDPLDYGHKQYKEFLAILRYAYQYYKFKGGEXTRTREKLLAHKXPRGMVLCGYYVCEFLRVNGRYKINAEDLPRLERRTSFDDTDITNVQRDLCHFIHHECCHVKGDFFDPEGALATSDEFKDLWEWNTAMP

SEQ ID NO: 112452 - protein, 446 aa, Oryza sativa
  Clone ID: PAT_MRT4530_16335C.1.pep
MEQFVTRGFMDKYVIWTRHGEEQVDGTENIVPTKVEDMVYNDGSGEDKINLEEMLRHAEPEVPMGSGPRQLGIDIDVFLEPLLEDMADLWKEGLKVWDEYLREYFTVEAIILVTINDYPAMFLVSGQIKGKTGCVIYLNGTYYRYLPGSNKLVFMRHRWFLCTNHKYRKMKAEFDGTKESDPAPKPTSGEKVCAMTEKIVCEFGKVTKKPSKGTKRKKLEKTKKPKDSKKPDDSMKPDDKLPPPFKKHSIFFKGLFGTAPAPAPAPPLLELELSQTVSAPLKLGVELGGALSQDGRLSGKGTIGKKRFVTHDHKAFQETHFSTLHQFAIVEPYTDQHIKLLRATNKGHTTEWIMKENKSLFIDWLRDLDLPDGQTTDEITMKRLACGPSTTVNSWEGYDINGYSFSTRARDSKTLTENSGVRVEAIDSPGEKQSYFGFIEEIWEID

SEQ ID NO: 112453 - protein, 259 aa, Oryza sativa
  Clone ID: PAT_MRT4530_16336C.1.pep
MEPSSQPQPVMGVATGGSQAYPPPAAAYPPQAMVPGAPAVVPPGSQPSAPFPTNPAQLSAQHQLVYQQAQQFHQQLQQQQQQQLREFWANQMEEIEQTTDFKNHSLPLARIKKIMKADEDVRMISAEAPVVFAKACEVFILELTLRSWMHTEENKRRTLQKNDIAAAITRTDIYDFLVDIVPRDEMKEEGLGLPRVGLPPNVGGAADTYPYYYVPAQQGPGSGMMYGGQQGHPVTYVWQQPQEQQEEAPEEQHSLPESS

SEQ ID NO: 112454 - protein, 64 aa, Oryza sativa
  Clone ID: PAT_MRT4530_16337C.1.pep
SPTRPPTRTVSRSSTEDEDELIILGDAEIQAQLTWNVIQDQYEAWIRAHGLSSYRYQRCLRALR

SEQ ID NO: 112455 - protein, 243 aa, Oryza sativa
  Clone ID: PAT_MRT4530_16338C.1.pep
MRKKGRGERGIELGGGQEGIADAQQGEGDGPRRGRLAVAMDTTTSTHNVGCLDREKKERGEVAFFIYLFLDWFIRHHAVGQNHSGLGQGDAVVGVADGVGGGGAEVDAGGEGEEEGTLEDEGVTVGGVDEEAENEQMHLMTFMEVAKLRCIDVTIFFVATNDFSSSDSYTEYLKDIEAGKIENVPTPPIAIDYWRLPADATLKDVVVVVCADEAHHRDVNHFASDVHFQGMDLKDTPALLDYH

SEQ ID NO: 112456 - protein, 2042 aa, Oryza sativa
  unsure (1)..(2042): unsure at all Xaa locations
  Clone ID: PAT_MRT4530_16339C.1.pep
MESREWMYHLPRFLSPYRNEVSKFIGIAKAHADKNNMRKIICPCADCKNEIAWDFDDAFKVKEHLVTRGFMDKYEIWTHHGKEQVDGPENVVPTQVEDMVHDDGSVEDKIDLEEMLCHAEPEVLMGSARGLNNFEALQKAAKEVLYDESKGCDSEFTTLRSVLELMRLKARHGWSDTSFDSLLELLQKMLPRPNSLPSSTYQAKKLXCPLSLGVEKIHACINHCILYRKXYASLDEXPTCGASRYKSNSNTGLEPSDTTEGRQRKIPQLVMWYLPVKDRIKRIYSNPRDAVLMRWHEEGRKKDGMIRHPADARQWINFDAQYREFAKHPWNIRFALSTDGVNPFGDMSSSHSTWPVLLTMYNLPTWLCQKRKYVLLCILIQGPRQPCIDIDIFLEPLLEDMADXMKRRIESVGRVPKGILHSXAIIFVTINDYPTMFSVSGQIKGKTGCVICLNGTYYRYLPGSNKLVYMRHRRFLLTNHKYRKMKAEFDGTEETNPAPKPTSGEKVCAMTKKIVCEFGKVAKKPSKGTKRKKPEKTTKPGDSKKQDDKLPPPYKKYSIFFKYLPYWKDLEVRHAIDVMHLEKNVFDNIVGTLLDMPKKTKDGLQSRMDLVEMGTREELHPQEGEKNGKVYLPPACFTLTPEEKKSFCKSLRDVRVPIVFSSNISRLVSMKDLSVSGYNSHDCHVLVTMFLAIAIRAIKQEHLKDAITRLCYFFNAVSQKVISLEELGNLRTFAHEKQCQLEMCFPPSFFDMMEHLIVHIVPQMVALGPLYLHQMWSYERYMAVLKGYIQNRAHPERSIVEGYSTEEVVEYCIDYLKDGYAIGVPVPQHEGRLSGRGTIGKKRFVTHDHKSFQEAHFNVLYQFAIVEPYTDQYIELIRANNWLRNLDLPEGQTTDEITMKRLACGPSTTVNSWQGYDINGYSFSTRARDNNTYTQNSDVRVEAIDEAGEKQSYFGFIEEIWEIDYGHTMQFPIFKCHQFVRKIKNVETSTQKTVKPYMRTDGVGKNVKGVYIFXADRPPAKILSLYKGKTTAPKFLSPGGNPRNFGVTVRLCRRSTAPSPPPSTAXAAVGPSTASGRFPPGPFTAPPASPPPPAASLSRSRGLAAERLHRPIVVHERRCPRPNGFISRSSSTAEPRHRPFVRCPRPKLVVGRSSSTNKFETMADSTKGTEEKGLGEEEXSLAVVVAPEPTVPPEDSSDSDVADEDDEYSSPSDPCPSPSPKRRKKGDSEEGDNDYIPPIEGDXDHVSNGDKEVLWKELKKIFQFPDGSEAAVRNCALQTMAKSWHGWKTTLNKKFVKTGRTPFSTYANITPNQWEDFLTLKNSPEEIQRSQKYSELAKNNKFPHRLGFTGYAPKVEQWTKEGEEMRKAGLPVPMEKWTQRSRNWHGGRVXGVSSKMSWKEGFKHDPHKKRDAYKDKLRDEGAADFERQMMDFYVKHMLLPRPETKEPELDYPFDDLKENTPCRLHVPIGRSGKTLELLXAVTAIAIPERTYNEEFIPDAYAKVQQQVVHEGFESYDIDFPTADGVSVLGDAVDIVIIWHKNDISFGLGTDATRKPLVPKPGLGKPPRPPKKKVTDKAEEPEMHKENLVPEVPPEIEVPEVPMEIAVPDVQMEIKVTEPEVQVVASVGTEIEEVLGLEWDVTEPEIFEDPSPAKDPEVQETTVPEKATTSSEVPRVVRSHDSKSKDENKEKFMVTVCRGGKERAKLRDDEPQKAAELTGPTYFTTDDCPEKYEHGKSLLPKWALKEGPWEMRRLHTFYMEASKKGLGNITAXSPADYFSEQGYVWLDFSDLHAIYRRGKMDINYVGVWCMMQYMDAKKKKEPIDFLDPTRICQTQHTVRLAPGSDQLKGKNPKEIAEYKKGLHKEKLISVTQYIGRAFLHFQNKRVVMAAYNFNDHYICLLIHPKDGTVVVLDPLDYSHKQYKEFLTILXYAYQYYKFKGGEQTRTREKLLCHKQLRGTVRCKYYACEFLRVNVRYKTNAEDLPRLECRTSFDDTGITNIQRDLCHFIHHKYCHVKGDFFDPEVALAASDEFKDLWEWNTAMP

SEQ ID NO: 112457 - protein, 658 aa, Oryza sativa
  Clone ID: PAT_MRT4530_1633C.1.pep
MASIGAALSGLKNSSFTTMGAEKLPDQMHDLKIRDDKEVEATIINGKGTETGHIIVTTTGGRNGQPKQTVSYMAERIVGQGSFGIVFQAKCLETGETVAIKKVLQDKRYKNRELQTMRLLDHPNVVALKHCFFSTTEKDELYLNLVLEYVPETVHRVVKHYNKMNQRMPLIYVKLYMYQICRALAYIHNSIGVCHRDIKPQNLLVNPHTHQLKLCDFGSAKVLVKGEPNISYICSRYYRAPELIFGATEYTTAIDIWSAGCVLAELMLGQPLFPGESGVDQLVEIIKVLGTPTREEIKCMNPNYTEFKFPQIKAHPWHKVQSLSISVVILSAIVQYQVEALVHPFFDELRDPNARLPNGRFLPPLFNFKPHELKGIPSDIMAKLIPEHVKKQCSYAGSLFAQQQKLLEGEDQNSEELSRERREAAEGGKKGGGGRGSEMPLGKYYCDYCEKQFQDTPAARKRHLDGAQHHRARALWGRASLGIHVDTSTRSHLLLIQDQLLLALSLDQWRSSLIFKEVNPILLDIRQQMEVLSQHVFHPVTCHAMNRTLCTCQVAMQSLDVLLYPWNILGGHTSWGNLPPSLRPPPEGGYPPFPFVDWGRRLKDFTHLPPRKRTTIGLNYRPVAARSGPSSSLRLDNGAGQPANQCLECGTQRTFHRK

SEQ ID NO: 112458 - protein, 119 aa, Oryza sativa
  Clone ID: PAT_MRT4530_16340C.1.pep
PKKRRKSNGQRRRRGRNGGGLRVDGDGGAPAVFGGGEGADEDGGDLATTMTTSPSDGDGWSDGGARQCPIVGQSRPASLQRGLIVTSHSHHVATPTELCHWNIFFHYRHRWRLTKRAPH

SEQ ID NO: 112459 - protein, 1406 aa, Oryza sativa
  unsure (1)..(1406): unsure at all Xaa locations
  Clone ID: PAT_MRT4530_16341C.1.pep
VCEFGKVTKKPSKGTKRKKPEKTMKPGDSKKXDDSSKPDDKLPPPFKKHSIFFKYLPYWKDLEVRHAINVMHLEKNVFDNIVGTLLDMPKKTKDVLQSRMVLVEMGIREELHPKEGEKNGKVYLPPACFTLTPAVKKSFCKSLRDVRVPIGFSSNISRLVSMKDLSVSGYNSHDCHVLLTVFLAIAIKAIKPEHLKVAITRLCYFFNAVSQKVISLKELGSLRAFAQETQCQLEMCFPLSFFDMMEHFIVHIVPQMVALGLLYLHQMWSYERYMVVLKGYIRNRAHPEGSMVEGYNTEEVVECCIDYLKDGYAIGVPVPRHEGRLSGKGTIGKKRFITHDHKSFQEAHFSVLHQFAIVEPYIEQHIELIRANNWLRDLDLLEGQTTDEITMKRLACGPSTTVNSWQGYDINGYSFSTRARDNKTCTQNSGVRVEVIDKAGEKQSYFGFIEXIWEIDYGHTMQFTIFMCHQFVQKIKNVETSTXKTMKPYMRTDGVGKNVKGVKIFAGGRSSQADRPPTKIVSLXKDKLAAPKFLSPGGNPRNFGTTARLCRRSTATPPPAHQPPPAAPPPGPSTTPPVSPPPPAAPRPPPPSLSLSRSSSLTAERLHRPFIVHEXRRPRPNGFIGWSSSMAEPRCRPFVRRPRPKLVVGHSSSTDKFETMADSNKGTEEKSLGEEEQSLAVVVAPEPTVPPEDSSDSDVADEDNEYSLPSDPCQSPSPKRRKKGNGEEGDKDYIPPIEGDWDHVSNRDKEVLWKELKKIFQSPDGLEAAVRNCALQTMAKSWHGWKTTLNKKFVKTGRTPFSTYANITPKQWEDFLTLKNSPEEIRRSQKYSELAKKYKFPHHLGSTGYAPKVEQWTKEEEEMRKAGLPVPMEEWTQRSRNWHGGRVRGVSSKMSWKEGFKHDPHKKRDAYKDKLRDDGAADFQRQMMDFCVKHMLLPRPETKEPEPDYPFDDLKENTPCRLHVPIGRSGNTLEAATAIAIPGRTYNEEFIGNAYAKVQPQVVHEGFESYDIDFPTQDAVSILGDAVDLVILWHKNDISFELGTDATRKSVVPKPGLGKPPRQPKRKVTDKAEEPEMHKDNPVPEVPPEIAVPKVPMEIVVPDVHMEITVAEPEVQFVASVGTDIEEVPGLEWDGTEPEIFEDPSPAKYPEEPPFQVKDENKEKFMVTVFRGGKERAKLRDDDPQKAAALAGPTCLPTNDCPEKYEHGKALLPEWALNEGPWEMRRLNTFYMEASKKGLGNITARSPADCFGAEGYVWLDISDLNTIYHRHKMGVNYVGVWMQYMDAKKKKEPIGFLDPTRICQTQHTVRLAPGSNQLKGKTPKEIAKYKKGLHKEKLIIVAQYIGRAFLHFQNKRVVMAAYNFEVNERYRVNAEDLPRLERRTSFNDTGITNVQCDLCNFIHHEC

SEQ ID NO: 112460 - protein, 58 aa, Oryza sativa
  Clone ID: PAT_MRT4530_16342C.1.pep
DKGTVQLTAEDPDLPIIPQAIPLPPLPLCGGSYGLATETEATTYCGSVVWLCSFLKRG

SEQ ID NO: 112461 - protein, 1400 aa, Oryza sativa
  unsure (1)..(1400): unsure at all Xaa locations
  Clone ID: PAT_MRT4530_16343C.1.pep
MAGAPTSLGFSVRRRERELVAPARPTPYEFKMLSDIDDQDILRFNRSGISFYRHNPNQDGVDPVTVIRAALSEALVHFYPLAGRLRELRPTRKLVVECTGEGVVFVEADASFRMDDLGDGTSTSSPLLAPPVPCYDMLLCEAESPTADVVDRPLLFVQMTRLACGGFVFGMHICHCMADGSGMVQFLTAVTEFARGVPGAPTVPPVWEREALTTRSWPPTVTRDHVEYAPLPVDDDDDDVLLSLSPSTNAYAHHVFFFGDREIAALRSQVVAACSRFDLVGAFMWRCRTAALRHGRGDVVRLNMFVNARVRNRPVPRGYYGNAIVFASASAPAGELCGRPLGHALRLLVEAKARAWEDGYVQSVASFNAARRRPAFPKGARTYFISDMTRAGMTDIDFGWGKPVYGGPATTMLATFHLQGRNEAGEAGIVVPISLPSPVMERLIQEVDKGLNAGAAAVLDDAKARVRYGKSGMDVSLAEGPRQPGIDIDVFLEPLLEDMVDLWKEGLKVWDEYLREYFTVKAIIFVTINDYPAMFSVSGQIKGKIGCVICLNGTYYRYLLGSNKLVYMRHRRFLRTNHKYRKMKAEFDGTEKTDPAPKTTSGEKYLSYWKDLEVRHAIDVMHLEKNVFDNIVGTLLDMPKKTKDGLQSRMDLVEMGIREELHPQEGEKNGKAINEAREKQLYFGFIEEIWEIDYGHTMQFPIFKCQWVKYPNGVNVDKFGLTIVDLASVGHKDDPWKIKNVETSTQKTMKPYIRTDDGPLAKIVKKIFASSQADRPPAKIVAQYKGKPAAPKFLSPGGNPRNFGTVRLPKFFAAARLRRPPPPPACDLHSPTVVLRRHRPSLSTRCHXTAAPCRRSTARDLHHSAAAAADPSTARXAPPPPAPPPPPAPPPPSATPPPPPAATSPSISLAAERLNRPIVVHERSRPRPNDVFDRSSSTAEPRLRPFVVHDRSRSSSTAEPRRRPFLRRPRPKLVVGRSSNTDRFETMADSTKGTEEKGLGEQELSLAVVVAPEPTVPPKGSSNCDVGDEDEDYSSPSDPCPSPSPKRRKKGNSEEDDKDYIPPKEGCGIIVREKIPITVKYWDYVSNGDKEVLWKELKKIFQFPDGSKAAVRNCALQTMAKSWRGWKTTLNKKFVKTGRTPFSTYANITPNQWDDFLTLKNSPEEIQRSQKYAELAKKNKFPHRLGSAGYAWEKDVLSTALGTPEHGGRVQGASSKMSWKEGFKNDPYKKREAYKDKLRDEGTAEFERQMMDFCVKHMILPRPETKEPEPDYPFDNLKENTPCRLHVPIGRSGKTLEAATAIAIPGRTYNEEFIPAVYAKVQPQVVHEGFESYDIDFPTADGVSVLGDAVDLVILWHKNDISFGLGTDATQKPVVPKPGLGKPPRPPKRKVTDKAEEPEM

SEQ ID NO: 112462 - protein, 465 aa, Oryza sativa
  Clone ID: PAT_MRT4530_16344C.1.pep
MAALPRRKRKRGLGKAAGARKRAREQHPGVAKLRKQHGSTFEDRISELPDDLLITILGHLDTRSSAATSVLSRRWQHLWKSVPKLRFSQHDIVPQTELSRFLRAHEYVFFKPSLCSWKRRVRVNLDRRIRLTDMYRTRIFSSSLTGFLHKSNAGDKNNTKISSLFLSCTMEDRYVNLVDKLVSIAVCRGVEDLNLTTSFYYDGQRRSTTPYEFPLSLFTDGKGLSLTELKLCECTLNIPIGLDGFKSLVKLSLTRMPISEDMIHTLFENCLKLECFHLNHCWGANHLFAGPGANHLKIASHDLQLRDIMVNSCEQITHMELVAPKLHQFRYRGPSISMMLGSVPSIEHACLHYEDSRDGESVKYILGKLSQDFPLLTSLSIDFDTYELKNPVIPGGLPTAFKNLRSLMLRVTMHSNDDLAWATMLLEVAPALESFQIELISNKKREHPGGVLWEPSDFEHHRLRQ

SEQ ID NO: 112463 - protein, 822 aa, Oryza sativa
  Clone ID: PAT_MRT4530_16345C.1.pep
MPGTVFVVSRESCFSAAIQMVTEITGAAGWKGTDLSLCVEKNPASLQGQDLAALGSSSGLDVVDVPFSAPTGGSFDMESSEVVATAFSLPVNDGPVETGTVESDYWRRDNSLKGIPNFNVNKCGHFFHAGCIDRWLRKYRRCPLCRGGLSSLPLLPKPDFVASYLLFIETYYVFLQSGGGGAFQAVVYKSAGQQDRCYLAMVRAPSKIRYGSNICEQVTSCACKDQSSQATLIWPACEDMESREWMYHWPRFLSPYRNEVAKFIGIAKVRAEKNNMRKIICPCADCKNEIAWDFDDAFKVKEHLVTRGFMDKYEIWTRHGEEQVDEPENVVPTQVEDMVHDDGSVEDKIDLEEMLRHAEPEVLMGSARGLNNFEALQKAAKEVLYDKSKGCDSDFTTLRKCYRGLTHYHPAHIKQRNSYAPFHLGPRQPGIDIDVFLEPLLEDMADLWKEGLKVWDEYLGEYFTVKAIIFVTINDYPAMFSVSGQIKGKTGCVICLNGTYYRYLPGSNKLMYMRHRQFLRTNHKYHKMKAEFDGTEETDPAPKPTSGENVCAMTEKIVCEFGKMTKKPSKGTKYKKPEKNTKGGESKKQDDSSKPDDKLPPPFKKHSIFFKYLPYWKDLEVRHAIDVMHLEKNVFDNIVGTLLDMPKKTKDGLQSRMDLVEMGIREELHPQEGEKNGKMVALGPLYLHQMWSYERYMVVLKGYVRNRAHPEGSMVEGYSTEEVVDGVCVEAIDEAEEKQSYFGFIEEIWEIDYEHTMQFPICKCQWVKYPNGVNVDKFGLTVVDLARVGHKDDPWKIKNVETSTQKTVKPYMRTDGVGKNVK

SEQ ID NO: 112464 - protein, 768 aa, Oryza sativa
  unsure (1)..(768): unsure at all Xaa locations
  Clone ID: PAT_MRT4530_16346C.1.pep
AKCSIAVFCARLFALCTRKLRRWSRRPSLVACTHFFRDMESREWMYHXPRFLSLYRNEVAKFIGIAKAHAEKNNMRKIICSCADCKNEISWDFDDAFKVKEHLVTRGFMDKHEIWTRHGEEQVDGHENVVPTQVEDMVHDDGSVEDKIDLEEMLRHAEPEVLMGSARGLNYFEALQKAAKEVLYDESKGCDSEFTTLQSVLELMRLKARHGWSDTSFDSLLELLQKMLPRPNSLPSSTYQAKKLICPLSLGVEKIHACVNHCILYRKEYASLDEYPTCGASRYKSNSNTGLEPSEATKGRQRKIPQLVMWYLPVKDRIKRIYSNPRDVELMRXHEEGRKKDGMIRHPADAHQXINFNAQYREFAKNPRNIRFALSTDGVNPFGDMSSSHSTWPGPHQPGIDIDVFLEPLLEDMADLWKEGLKVWDEYLREYFTVKAIIFVTINDYPVMFSVSGQIKGKTGCVICLNGTYYRYLPGSNKLVYMQHRRFLRTNHKYRKMKAEFDGTEETNPAPKPTSGEKVCAMTEKIVCKFGKMTKKPSKGTKRKKPEKNTKGGDSKKQDDSSKPDDKLPPPFKKHSIFFKYLPYWKDLEDRHAIDVMHLEKNVFDNIVGTLLDMPKKTKDGLQSRMDLVEIGIREELHPQEGEKNGKVYLPPAYFTLTPEEKKSFCNSLRDVRVPIVSQKVISLEELGNLRTFAHETQCQLEMCFPPSFFDMMEHLIVHIVPQMIALGPLYLHQMWSYERYMAILKGYVRNRAHPEGSMIKDYSTEEV

SEQ ID NO: 112465 - protein, 360 aa, Oryza sativa
  unsure (1)..(360): unsure at all Xaa locations
  Clone ID: PAT_MRT4530_16347C.1.pep
MSFRVDSCYNVPQYPQNMVYDYNPSTVARXVGGLGAQGLAEMASSSRPSNNDSXNCLGLGDPTQPAFAWTQVESFCFPIFAATPILPSLIPVGIEIAATRMTENNPQPSPPPVQLEKKALMTSASRGTPKVAKPXTSVKDHVPTRKSSPNHHTWCLIRKASQHSLVECRVILNVKAELDACKDRAIQHTSPYKAWCPIHKSKSYPLTGREITGSMIHVPCYPIHQRRXNLEMHPWKICEMGTADRLVGFIDIDPSVLHNLDDQESSGSNSPCEVNVIERVVEDIHEEGEILEPVRTPAKHFTVRGQLSTEVNSVRPSNLPGGGQLGQTYIVDNSQPQLCFLDRSRTNPARSCSRSPTTYR

SEQ ID NO: 112466 - protein, 1039 aa, Oryza sativa
  unsure (1)..(1039): unsure at all Xaa locations
  Clone ID: PAT_MRT4530_16348C.1.pep
SLVRLTIKLVGLKKIEEHNSTDMESXEWMYHWPRFLSPYRNEVSKFIGIAKAHAEKYNMRKIICPCADCKNKIAWDFDDAFKVKEHLVTRGFMDKYEIWTRHGEEQVDGPENVDPIQVEDMVHDDGFVEDKIDLEEMLRHAEPEVLMGSARGLNNFEALQEAKEVLYDESKGCDSEFTTLRSVLELMRLKARHGWSNTSFDSLLELLQKMLPRSNSLPSXSLGVEKIHACVNHCIVYRKEYASLDECPTCGASRYKSNSNTGLEPSDTTEGRQRKISQLVMXYLPVKDRIKRVYSNPXDAELMRWHEEGRKKDGMIRHPADARXWINFDAQYREFAKDPRNIRFAMSTDGVNPFGDISSSHSTWPGPRQPGIDIDVFLELLLEDMADLWKEGLKVWDEYLREYFTVKAIMFVTINDYPAMFSVSGQIKGKTGFMICLNGTYYRYLPGSNKLVYMRHRRFLCTNHKYRKMKAEFDGTEETDPTPKPTSGEKVCAMIEKIVCEFGKVTKKPSKGTKRKKPEKNTKQGDSKKQDDSSKPDDKLPPPFKKHSIFFKYLPYXKDLEVRHAIDVMYLEKNVFENIVGTLSDMLNKTKDGLQSRMDLVEMEIREELHPQEGEKNGKVYLPPVCFTLTPEEKKSFCNSLRDVRVPIVSXKVISLEELGNLRTFAHETQCQLDMCFPPSFFDMMEHLIVHIVPQMVALGPLYLHQMWSYERYMAVLKGYVRNRAHPEGSMVEGYSTEEVVECXIDYLKDGYAIRVPVPQHEGRLSGRGTIGKKRFVTHDHKSFQEAHFSLLHQFAIVEPYIDQHIELIRANNKGRTTEWIMKEHKRLFIDWLQDLDLPEGQTTDEITMKRLACGPSTTVNSWQGYDINGYSFSTRAQDNKTCTQNSGVRVEAIDEAGEKQSYFGFIEEIWEIDYVHTMXFPIFKCQWVKYPNGVNVDKFGLTVVDLASVGHKDDPWVLANRVAQVFYVKDPSNLKKDIVLPGKQKILGVDGVEDVEDYNQYDSMPLYSQFVQKIKNVETSTQKIVKPYMCMDGVGKNV

SEQ ID NO: 112467 - protein, 128 aa, Oryza sativa
  Clone ID: PAT_MRT4530_16349C.1.pep
MSLAIRSTNAESNLEMHPWKICEMGTADRLVGFIDIDPSVLHNLDDQESSGSNSPCEVNVIERVVEDIHEEGEIRFGDEPRAPVPPREPVEPVRTPAKHFTVRGQLSTEPNQPRKVLLEIPDNIPMTE

SEQ ID NO: 112468 - protein, 1532 aa, Oryza sativa
  Clone ID: PAT_MRT4530_1634C.1.pep
MSWHRAGVLLLGAQSCLPILEVPAVGRVGSVLLSMARMGWKLCHVFRPYTVVMAGSLNRRGLDLTGFVLELRGMCVVLGYPHGVDYQGKQLPEQEGDDAEPHAAWEVTAVILTGSPERTSLAVTAGGDSFSAACQNAALLAIGTLHQRYPDELQHSPYRYHPCRGGARDYATFRDASSEDDATIMHLARMVEAYNAARIDFHRMLKKDLDAVEAQLCQLKIAQGEMVTTRRSAVTGEGNHPEGSNHSNHGSPPPPPPPPPPPPPDTNPILTQILAQQANMMAAFLHHIQNPPQHNAPPPPPPPQHSKLAEFLRIRPPTFSSSNNPVDALDWLHAAGKKLDTVQCNDEEKVIFATHQLQGPASLWTHVPAGVMALKKREFRELKQGNHSVMEYLHEFNSLARYAPEDVWEDEEKQEKFLAGMDPELSVRLVSGDYPDFQRLVDNSIRLEAKHKELESHKRRLANFRNQQGANQMIRYTNPYPGGSSSQQQQQPRSAPRPQFVVRVPQSQQQQSQQGTRAPRPPAPAVQLGQGRRDAQGQQRLCFNCFEPGHFADKCPKPRRQQGQAPPRPNNGGKDVTRGRVNHVTAEDVLTTPDVIVDTKNLDVILGMNWLAQFQGVVDRARRTVTLYRGPDQPVVFFAPPTSAGSSVLNQLGLPEIPIVSEFGDVFPEELPSMPPQREIEFQIDLAPGTTPLYKRPYRMAAHELAEVKKQLEELKEKGYIRPSTSPWGSPVIFVEKKDKTKRICVDYRALNEVTIKNKYALPRIDDLFDQLKGATVFSKIDLRSGYHQLRIREEDIPKTAFTTHYGLYEFTVMSFGLTNAPAFFMNLMNKVFMEYLDKFVVVFIDDILVYLQSEEDHQQHLRLALGKLREHPLYAKLSKCEFWLSEVKFLGHVISAKGVAVDPETVTAVTDWKQPKTVTQVRSFLGLAGYYRRFIENFSKIARPMTQLLKKEEKFVWSPQCEKAFQTLKEKLVSSPVLILLDTRKDFLVYCDASRQGLGCVLMQEGHVVAYASRQPRPHEGNYPTHDLELAAVRRWLELIKDYDVGIHYHPGKANVVADALSRKSSCNTLGVRGIPPELNQQLEALNLSIVSHGFLATLEAKPTLLDQIREAQKNDLDMHGILKNMKQGKAAGFTEDEHGTLWNGNRCVKAEHQRPARLLQPLQVPEWKWDEIGMDFITGLPKTQGRYDSIWVVVDRLTKVARFIPVKTTYGGNKLAELYFARIVSLHGVPKKIVSDQGSQFTSDIWKKLQEELGTRLNFSTAYHPQTDGQTERLNQILEDMLHACVLDFGKTWDKSLPYAEFSYNNSYQASIQMAPYEALYGRKCQTPLLWDQVGESQVFGTDILREAEAKVRTIRDNLKVAQSRQKSYADTRRRNLEFAVDDFVYLRVTPLRGVHRFQMKGKLAPRFVGPFRIIARRGEVAYQLELPTSLGNVHDVFHVSQLKKCLRVPSEQADSEQIEVHEDLTYVERPVKILDTMEHRTRNRVIRFCKVQWSNHAEEEATSEREDELKAAHLDLFASSSESRGRDSV

SEQ ID NO: 112469 - protein, 167 aa, Oryza sativa
  unsure (1)..(167): unsure at all Xaa locations
  Clone ID: PAT_MRT4530_16350C.1.pep
WKELKKIFQFPDGSEAAVRNCALQTMAKSWRGXKTTLNTKFVKTGHTLFSTYANITLNQWDDFLTLKNSPEEIQRSQKYAELAKKNKFPHRLGSTGYAPKVEQWTKEEEEMRKKGQPVPMEEWTQRSRNWVRARTPKITDKGKVSFEDPELQGVADKIENLSSAQKK

SEQ ID NO: 112470 - protein, 1008 aa, Oryza sativa
  unsure (1)..(1008): unsure at all Xaa locations
  Clone ID: PAT_MRT4530_16351C.1.pep
DMESREWMYHWPRFLSPYRNEVSKFIGIAKAHAEKNNMRKIVCPCADCKNEIAWDFDDAFKVKEHLVTRGFMDKYEIWTRHGEEQVDGPENVVPTQVEDMVHDDGSVENKIDLEEMLHHVEPEVLMGSARGLNNFAAKEVLYDESKGCDSEFTTLRSVLELMRLKARHGWSDTSFDSLLELLQKMLPRPNSLPYSTYQAKKLIYPLSLGVEKIHACVNHCILYRKEYASLDKCPTCGASRYKSNSNTGLEPSDTTEGXQRKIPQLVMWYLPVKDRIKRIYXNPRDAELMRWHEEGHKKDGMIRHPADARQWINFDAQYREFAKDTRNIRFALSTDGVNPFGDMSSSHSTWPGPRQPGIDINVFLEPLLEDMADLWKERLKVWDEYLREYFTVKAIIFVTINDYPVMFSVSSPIKGKTGYVICLNGTYYRYLPDSNKLVYMRHRRFLRTNHWYHKMKAEFDGTEETDPAAKPTLGEKVCAMTEKIVCEFGKVTKKPSKGTKRKKPEKQDDSSKPDDKLPPPFKKHSILFKYLPYWKDLEVRHAIDVMHLEKNVFDNIVGTLLDMPKKTKDGLQSRMDLVEMGIREELHPXEGEKNEKVYLPPACFTLTPEEKKSFCKSLRDVRGPIVSQKVISLEELGNLRTFAHETQXQLEMCFPPSFXHIVPQMVALGPLYLRQMWSYEHYMAALKGYIRNHAHLEGSMVEDYSIKEVIECCIDYLKDGYAIGVPVPRQEGRLTGRGTIGKKRFVIHDHKSFQEAHFSVLHQFAIVQPYIDQHIELIRANNKGRTTKCIMKEHKRLFIDWLRDLDLPEGQTIDKITMKRLACGPSTTVNSWQXYDINGYSFSTRARDNKTCTQNCGVRVEAIDESGEKQSYFGFIEEIWEIDYGHTMQFPIFKCQWVKYPNGVNVDKFGLAVVDLASVGHKDDPGVLANRVAQVFYVKDPSNLKKDIVLPGKQKILGVDGVEDVEDYNQYDSMPLYSQFVQKIKNVETSTQKTVKPYMRTDGVGKNI

SEQ ID NO: 112471 - protein, 142 aa, Oryza sativa
  Clone ID: PAT_MRT4530_16352C.1.pep
MIAVVQLAVAQPNRPNKPDGQIDEERTPRRRTNATINGRSGFRETHRAFPASIGTLISGGRWYARSHPRARPPTRAGIQEEAPTLLAAAVMVILSASDVNLILATPRQAAHAHDSRIRDHAQAGSRHDPMSTQPRNVQDRTP

SEQ ID NO: 112472 - protein, 785 aa, Oryza sativa
  Clone ID: PAT_MRT4530_16353C.1.pep
MPEAAAAAAGHMDPVGDEAAERREMEEKEEEEEEDEEFYESLDRILSSSCSSTSASDDDDQQHRRRRRHHPQPQQLSSSATFSAYEVWISEPTSVEERRRVLLRRLGLAHDSEPLPHPSPRVSSSSPRSPTPSPPSSSPPRPAPVVAAAEEPRSSGHGKPPLARNPSGGAEQCRIRNLDDGTEFEVGEVHDEVVREVGTGRQLTFEEFELCIGRSPIVQELMRRATTAASSSTSDQAAPASKPRRKPGGWLRGIRHLAGSVAYGRSSTDERDKEKEKEKKEREARRLSSATDDSLDGNGSRNAGRVRVRQYGKACKELTGLFMTQELAAHSGSIWCINFSLDGRYLASAGEDRVIHVWEVSEGERKGELLGEGTVARENGGGCSPFLAAVGNGSPELATLSLSCADGGFVEKKRRPRMQSSRKSVGSDHLVVPECVFGFRDKPVCSLLGHAADVLDLSWSKSQYLLSSSMDKTVKLWDITTSTCLKTFSHTDYVTCIQFNPVDDNFFISGSLDEKVALVGSHKGSCHLFDTTEKKLQYKSQIELRIRKKKSGQKKITGFQFAPGSSSEVLITSADSRIRVVNGDELVHKFKGFRNTSSQISASVAPNGKYVVCASEDSHVYVWRHDNTSHPSRSRSAVDVTNSYEHFHCHDVTVAITWPGAESRGSFGSRSSRNSDSDDAVMNTGRDAPVENSEHDLNGTVNRCTKRPVCEGVASTSNPPADGVSTSWPDEKQSSAKSSPGHCSSDLCIGALDVQRRSAWGLVIVTAGRGGEIRVFQNFGFPVQV

SEQ ID NO: 112473 - protein, 46 aa, Oryza sativa
  unsure (1)..(46): unsure at all Xaa locations
  Clone ID: PAT_MRT4530_16354C.1.pep
SRAGCHRRXIVGAPLRLTPAXAEPPAAVPARAGXRXCAEPCLCLAR

SEQ ID NO: 112474 - protein, 371 aa, Oryza sativa
  Clone ID: PAT_MRT4530_16355C.1.pep
MSSQPVARVLPRGGGGGFRAFPESAPASLRFSVGRRRAARLGARARGCPPEGEFPPSAHPQHYPGWPGSLGAPHPCGLQPAMLTPYVEHQKAITIRNDVNLKKETLRIEPDEECPGRFLVAFTFDATLAGSMTVYFFAKEELNCNLTAVKEDLIKPVTVSFKEGLGQKFRQPSGTGINFSVFEDSELLKQGDMDVYPLAVKAETTMPVDQKLEGEDQKMKTPNSQITQALFEKKESGDYQVRVASQILWVNGTRYELQEIYGIGNSVEGDADANDPGKECVICLSEPRDTTVLPCRHMCMCSECAKVLRYQTTRCPICRQPVERLLEIKVNNKAEEQQQPSPDSPIKVNSKAEEHQQQPSQSLPIPHREEV

SEQ ID NO: 112475 - protein, 168 aa, Oryza sativa
  unsure (1)..(168): unsure at all Xaa locations
  Clone ID: PAT_MRT4530_16356C.1.pep
MIDTIIISLIAFSISVSLWRGFISEVLSLSGWILLLCREYVSSXLSSHLNEIDSVYFQNSEYLRNGIEAAILFIITLILCGIVNALLSKIINTTGLSATDRVLGIAFGALRGILIVAAILFFIDTFTTSNQTELWQESQLIPHFDFIVKWFFEQLQANSSFLNSTTTT

SEQ ID NO: 112476 - protein, 103 aa, Oryza sativa
  Clone ID: PAT_MRT4530_16357C.1.pep
LSRIGGARLPPARHARPSLPLPSGIFAKSLSLSSHTTLCCVVVTLSGQPSPISHSQESRAGGGGGGGVLSFTIIIAATCKLKYLARWTNHATFPIDKYYSRFR

SEQ ID NO: 112477 - protein, 66 aa, Oryza sativa
  Clone ID: PAT_MRT4530_16358C.1.pep
QLLLTYSPPLPVSCSFLSPKSRDESGWKWSETASLFYYFLKNKQKRSKNSHIHEFIYLVSTSMPRR

SEQ ID NO: 112478 - protein, 49 aa, Oryza sativa
  Clone ID: PAT_MRT4530_16359C.1.pep
MELPRPDNKYVIVGNRSKLPTATATAVAAAAHSECGTVRAGAAGSRTCP

SEQ ID NO: 112479 - protein, 408 aa, Oryza sativa
  Clone ID: PAT_MRT4530_1635C.1.pep
MGSVGVAPSGLKNSSSTSMGAEKLPDQMHDLKIRDDKEVEATIINGKGTETGHIIVTTTGGRNGQPKQTVSYMAERIVGQGSFGIVFQAKCLETGETVAIKKVLQDKRYKNRELQTMRLLDHPNVVALKHCFFSTTEKDELYLNLVLEYVPETVHRVVKHYNKMNQRMPLIYVKLYMYQICRALAYIHNSIGVCHRDIKPQNLLVNPHTHQLKLCDFGSAKVLVKGEPNISYICSRYYRAPELIFGATEYTTAIDIWSAGCVLAELMLGQPLFPGESGVDQLVEIIKVLGTPTREEIKCMNPNYTEFKFPQIKAHPWHKVFHKRLPPEAVDLVSRLLQYSPNLRCTAVEALVHPFFDELRDPNARLPNGRFLPPLFNFKPHELKGIPSDIMAKLIPEHVKKQCSYAGV

SEQ ID NO: 112480 - protein, 71 aa, Oryza sativa
  Clone ID: PAT_MRT4530_16360C.1.pep
KSPPLRGVLHLFLAHFNGPLLYFHVKKKTGAFYYKKKGPPLGPPLLGIGSGHKAPTNGRPGKKIPPGYFLI

SEQ ID NO: 112481 - protein, 90 aa, Oryza sativa
  Clone ID: PAT_MRT4530_16361C.1.pep
EREVLINEMLGTTDENEPLQAMMKDQFGNYVVQKVLETCDDQQRELILSRVKVHLSALKKYTYGKHIVARVEKLVAAGERRIGLQAQYPS

SEQ ID NO: 112482 - protein, 932 aa, Oryza sativa
  unsure (1)..(932): unsure at all Xaa locations
  Clone ID: PAT_MRT4530_16362C.1.pep
PPAPPHPGPRPGPPPPDPRPAAPPPAPVPRAGASSHKLPPPTPPPRRLPPXAVVHERLCHRPFVVHGRRRTRPNGFVGRXSSSTAEPRRRPFLRRPRPKLVVGHSSSMDRFETMADSTKGTEEKGLGEQEQSLAVVVALEPTVPPEDSSGNDVAHEDDEYSSPSDPCPSPSPKRRKKGDSEEGDKDYIPPKEGETAPRRSKWQPKKKVPSQIDEVTANTTGSKKSERSAKAKKRKGERSVNRKDEGFHVVTHVSPKGEPLAPKTARAKFSSQCGIIVREKIPITVKDWDHVSNGDKEVLWKELKKIFQFTDGSEVAVRNCALQTMAKSWRGWKTTLNTKFVKTGRTPFSTYANITSNQLDDFLTLKNSPEEIQRSQKXTGYAPKVEQXTKEEEEMRKKGQLVPMEEWTQRSRNWEKYRLKIRSCRALLIKXENLSSSQKKGFFKPKREKDVLSTALGTPEHGGRVRGVSSKMSWKEGFKHDPHKKREAYKDKLRDEGAAEFERQMMDFCVKHMILPRPETKEPEPDYPFDDLKENTPCRLHPQVVHEGFDSYDIDFPTADGVSVLGDAVDLVILWHKNDISFGLGTDATEKPVVPKPGLGKPPRPPKRKVTDKAEEPEMQKDNPVPEVPPEIAVPEAAMEIPVPEVPMEITVAEPEVQFVASVGSEIEEVPGLEWDGTKPEIFDDPSPAKDPEVQETTIPKKATTSSEVPRMLRSHDSKSKDENKEKFMVTVFRGGKERGKPRDDDPQKAAELAGPTYFTTDDCPAEYEHGKALLPEWALNEVPWEMKRLHTFYMQASKKGLGNITARSPADCFGKEGYVWLDFSYLHAIYRWDKMDVNYVGVWCMMQYMDAKKTKEPIGFLDPTRICQTQHTLRSTTLLKRGNNSKAEYNHRTQQATPTMRTCKGIQGWSVAICIKAVVKHFIGQNSKTVE

SEQ ID NO: 112483 - protein, 68 aa, Oryza sativa
  unsure (1)..(68): unsure at all Xaa locations
  Clone ID: PAT_MRT4530_16363C.1.pep
HTNPQQXQSXXSKAEEATAEDTTQHTTKSTKPRRSAPRNNSKESKHEXDPHPVGXXXXATTGRGATPG

SEQ ID NO: 112484 - protein, 128 aa, Oryza sativa
  unsure (1)..(128): unsure at all Xaa locations
  Clone ID: PAT_MRT4530_16364C.1.pep
QIVDSLCDGEHVDCNNLLSAITGENCCFNTSRIDYYLEYEPHPSSTKNLHHLFQMIRKGTFAKYDYGLLGNLRRYGHLRPPAFDLSSIPESLPIWMGXSGLDALADVTDVQRTIKELGSTPELLYIGD

SEQ ID NO: 112485 - protein, 1010 aa, Oryza sativa
  Clone ID: PAT_MRT4530_16365C.1.pep
MYHWPRFLSPYRNEVAKFIGIAKVHAEKNNMRKIICPCADCKNEIAWDFDDAFKVKEHLVTHGFMDKYEIWTRHGEEQVDEPENVVPTQVEDMVHDDGSVEDKIDLEKMLRNAEPEVLMGSARGLNNFEALQKAAKEVLYDESKGCDSDFTTLRSVLELMRLKARHGWSDTSFDSLLELLQKMLPRPNSLPSSTYQAKKLICPLSLGVEKIHACVNHCILYRKEYASLDECPTCGASWYKSNSNTSLEPSEATEGRQRKIPQLVMWYLPVKDRITRIYSNPRDAELMHWHEEGRKKDGMIRHPADARQWRTFDAQYREFAKDPRNIRFALSTDGVNPFGDMSSSHSTWPVLLTMYLPGSNKLVYMRHRRFLRTNHKYRKMKAEFDGTEETDPAPKPTSGENVCAMIEKIVCEFGKMTKKPSKGTKRKKPEKNTKGGDSKKQDDSSKPDDKLPPPFKKHSIFFKYLPYWKDLEVQHAIDVMHLEKNVFDNIVGTLLDMPKKTKDGLQSTMDLVEMGIREELHPQEGEKNGKVYLPPACFTLTPKEKKSFCNSLRNVRLPIGFSSNISRLVSMKDLSVSGYNSHDCHVLLTVFLAIAIRAIKPEHLKVAITRLCYFFNAVSQKVISLEELGNLRTFAHETQCQLEMCFPPSFFDMMEHLIVHIVPQMVALGPLYLHQMWSYERYMAVLKGYVRNRAHLEGSMVEDYSTEEVVECCIDYLKDGYAIGVPVPQHEGRLSGRGTIGKKRFVTHDHKSFQEAHFSVLHQFAIVEPYIDQHIELIRANNKGRSTEWIMKEHKRLFIDWLRDLDLPEGETTDEITMKRLACGPSTTVNSWQGYDINGYSFSTRARDNKTCTQNSGVRVEAIDEAGEKQSYFGFIEEIWEIDYGHTMQFPIFKCQWVKYPNRVNVDKFGLTVVDLARVGHKDDPWVLANRVAQVFYVKDPSNLKKDIVLPGKQKILGVDGVEDVEDYNQYDSMPLYSQFVQKIKNVETSTQKTVKPYMRTDGVGKNVKG

SEQ ID NO: 112486 - protein, 132 aa, Oryza sativa
  Clone ID: PAT_MRT4530_16366C.1.pep
MDAKNLGNRRQNHEKSTMTEDARSRDQETLQRFADSDITVSPVNSHESGDVNMEAAISAEDVLRAGGFGAKDDIGSLLPTAVDSTDFEASLRDARDFEGESEKPSHPGLGYKANETDSGGKPSDVQQQQQQQ

SEQ ID NO: 112487 - protein, 815 aa, Oryza sativa
  Clone ID: PAT_MRT4530_16367C.1.pep
MSGHRFLWVVRMPRKGGLLSSMGASYGNPMDFLPEGFVERTNGRGLAVASWAPQVRVLAHPATAAFVSHCGWNSALESVSSGVPMIAWPLHAEQKMNAAILTEVAGVALPLSPVAPGGVVSREEVAAAVKELMDPGEKGSAARRRARELQAAAAARAWSPDGASRRALEEVAGKDMESREWMYHWPRFLSTYRNEVAKFIGIAKAHPEKNNMRKIICPCADCKNEIAWDFDDAFKVKEHLVTRGFMDKYEIWTRHGEEQVDGPENVVPTQVEDMVHDDGSVEDKIDLEEMLRHAEPEGPRQSGIDIDVFLKPLLEDMADLWKEGLKVWDEYLREYFTVKAIIFMTINDYPTMFSVSGQIKGKTGCVICLNGTYYRYLPGYNKLVYMRHRRFLRTNHKYRKMKAEFDGTEETDPAPKPTSGEKVCAMTEKIVCEFGKMTKKPSKGTKRKKPEKKTKGGDSKKQDDSSKPDDKLPPPFNKHSIFFKYLPYWKDLEVQHAIDVMHLEKNVFDNIVGTLLDMPKKTKDGLQSRMNLVEMGIREELHPQEGEKNGKMVALGPLYLHQMWSYERYMAVLKGYVRNRAHPVLSMVEGYSTEEVVDGVRVEAIDEAGKKQSYFGFIEEIWEIDYGHTMQFPIFKCQWVKYPNGVNVDKFGFTVVDLASVGHKDDPWKIKNVETSTQKTVKPYMRTDGCRNFLLPHASAVLRRRPPATFTLRTSSSAAADRRRPGAVTETTAPCCRSTARDLHHSAAAAADPSTARPLHRRQLLHRHQLLHRHRPLHRARGHRWPLHCRQPLYRAHGMWVHVGVRGYICACMWV

SEQ ID NO: 112488 - protein, 77 aa, Oryza sativa
  unsure (1)..(77): unsure at all Xaa locations
  Clone ID: PAT_MRT4530_16368C.1.pep
NRLSAHLGILLFYVITFVLNLAFALXLLCFIGMHASLVTSNTTSIEVHERRNSVSWKYDLGWRKNLEQVFGTQKLLW

SEQ ID NO: 112489 - protein, 1814 aa, Oryza sativa
  unsure (1)..(1814): unsure at all Xaa locations
  Clone ID: PAT_MRT4530_16369C.1.pep
MESREWMYHWPRFLSPYRNEVSKFIGIAKAHAEKNNMRKIICPCADCKNEIAWDFDDTFKVKEHLVTRGFMDEYEIWTRHGEEQVDGPKNVVPTQVEDMVHDDGSVEDKIDLEEMLRHAEPEVLMGSARGLNNFEALQKAAKEVLYDELKGCDSEFTTLRSVLKLMRLKARHGWSDTSFDSLLELLQKMLPRPNSLPFSTYQAKKLICPLSLGVEKIHACVNHCILYRKEYAPLDECPTCGASQYKSNSNTGLEPSNTTEGRQRKIPQLVMWYLPVKDRIKHIYSNPRDAELMHWHEEGRKKDGLIRQPADARQWINFDAQYREFAKDPRNIRFALITDGVNPFGDMSSSHSTWTVLLTMYNLPCQKRKYVLLGILIQGPRQPGIDIDVFLEPLLEDMADXMKRGIESVGRVLKGILYSXAIIFVTINDYPAMFSVSGQIKGKTXCVICLNGTYYRYLPGSNKLVYMRHRRFLRTNHKYRKMKAEFDGTEETDPAPKPTSGENVCAMTEKIVCEFGKVTKKPSKGTKRKKPEKNTKQGDSKEQDDSSKPDDKLPPPFKKHSIFFKYLPYWKDLEVRHAIDVMHLEKNVFGNIVGTLLDMPNKTKDGLQSRMDLVEMGIREELHPQEGEKNGKVYLPPACFTLTPEEKKSFCNSLRDVRVPIGFSSNISRLVSMKDFXVSGYNSHDCHVLLTVFLAISIRAIKSEHLKVAITRLCYFFNAVSQKVISLEELGNLPTFAHETQCQLEMCFPPSFFDTMEHLIVHIVPXMVALGPLYLHQMWSYERYMTVLKGYVRNRAHPEGSMVEGYSTEEVVECCIDYLKDEYAIGVPVPRHEGRSTGSAATDRYPAGPSTAPPTSPPLPAAPQPPPPSLSLSXAVVHERLHYRPFIVHERRRPRPNGFVGRXSSSTAEPRRRSFLRRPRPKLVIGRSSSTDRFDTMADSTKGTEDKGLGEQEQSLAVVVAPEPTVPPENSSDSDVAHEEYEYSSPSDPCPSPSXKRREKGDGEEGDKDYIPPKEGDXDHVSNGNKEVLWKELKKIFQFPDGSEAAVRNCALQTMAKSWRGWKTTLNMKFVKMGRTPFSMYANITPNQRDDFLTLKNSSEEIQRSQKYAELVKKNKFPHRLGSAGYAPKVERWTKEEEEMRKKGQSVPMEEWTQRSSNWHGGRVRGVSSKMSWKEGFKHDPHKKREAYKDKLRDKGAVEFERQMMDFCVKHMILPRPETKEPEPDYPFDDLKENTPCRLHVPIGRSGKTLEAATAIAIPGRTYNEDFIPDAYAKVQPQVVHEGFESYDIDFPTTDGVSVLGVAVDLVILWHKNDISFGLGTDATQKPVVPKLGLGKPPRPSKRKVTDKAEEPEMQKKNHVPEVPSEIAVPEAAMEIPVPEVPMEITVAEPEVQFVASVGSEIEEVPGLEWDGTEPEIFEDHSPAKDPEVQETTVPEKASTSSEVSRVFRSHDSKSKDENKEKFMVTVFRGGKEHAKLRDDDPYKAAELVGPTYFATDDCAAEYEHGKALLLEWALNKGLWEMKRLHTFYMQASKKGLGNITARSPADCFGEEGYVWLDFSDLHAIYRRDKMDVNYVGVWCMMQYMDAKKTKEPIGFLDPTRICQTQHTVRLAPGSDQLKGKTPKEIAEYKKGLHKEKLITVAQYIGRAFLHFQNKRVVMAAYNFNDLYICLLIHPKDGTVVVLDPIDYKHQSYKEFLTILQFAYQYYKFKGGEQTRTREKLLCHKQPRETVLCGYYACEFLRVNGRYRTNAEDLPRLECRTSFDDTCIKNVQRDLCHFIHYDCCHVKGDFFNPEGALATSDEFKDLREWNSAIT

SEQ ID NO: 112490 - protein, 128 aa, Oryza sativa
  Clone ID: PAT_MRT4530_1636C.1.pep
FFIKGFLFLGFAHDSMQHLITEFPLSLFVQQQPKEKRGSFQGPGCKCMGFAKQTKKPAGGKAKKKKGVHAPQHQKKGEQGHGRIMQVEVHAPLLLKERGGRQKKKNWGATHAKRWNGGQATRKHGAHG

SEQ ID NO: 112491 - protein, 170 aa, Oryza sativa
  Clone ID: PAT_MRT4530_16370C.1.pep
FFSFLGGAQPPPQNLCSSGLPLSKGEFCWEWKWPWRSGPKPRVRVSPPARVGPVPPGLSLFPPTEYFSCLSPAAQGFFVWVLPLWSRGLVGAFFCLPLVPPFFLAGLAFFFYALKKPSSSLSGGGGVLPFWGGPQPAWVGPLSPRGFPPGLLPPSPLRGRVFYKIYPRLP

SEQ ID NO: 112492 - protein, 2045 aa, Oryza sativa
  unsure (1)..(2045): unsure at all Xaa locations
  Clone ID: PAT_MRT4530_16371C.1.pep
MESWEWIYHWPRFLSPYRNEVAKFIGIAKVHAEKNNMRKMICPCADCKNEIAWDFDDAFKVKEHLVTRGFMDKYEIWTHNGEEQVDEPENVVPTQVEDMVHDDGSVEDKIDLEEMLRHAEPEVLMGSARGLNNFQALQKAAKEVLYDESKGCDSDFTTLRSVLELMRLKTRHGWSDTSFDSLLELLQKMLPRPNSLPSNTYQAKKLICPLSLGVEKIDACVNHCILYKKEYVSLDECPTCGASRYKSNSNTSLEPSEATEGRQRKIPQLVMWYLPVKDRITRIYSNPRDAKLMRWHKEGRKKDGMIRHPADARQWINFDAQYREFAKDPRNIRFALSTDGVNPFGDMSSSHSTWPVLLAMYNLPTWLCQKRKYVLLCILIQGPRQPGIDIDVFLEPLLEDMADLWKEGLKVWDEYLREYFTVKAIIFVTINDYPAMFSVSGQIKGKTGCVICLNGTYYRYLPGSNKLVYMRHRQFLRTNHKYRKMKAEFDGTEETDPAPKPTSGENVCAMTEKIVCEFGKMTKKPSKGTKRKKPEKNTKGGDSKKQDDSSKPDDKLPPPFKKHSIFFKYLPYWKDLEVRHAIDVMHLEKNVFDNIVGTLLDMPKKTKDGLQSRMDLVEMGIREELHPQEGEKNGKVYLPPDCFTLTPEEKKSFCNSLRNVRVPIGFSSNISRLVSMKDLSVSGYNSHECHVLLTLFLAIAIRAIKPEHLKVAITRLCYFFNAVSQKVISLEELGNLRTFAHETQCQLEMCFPPSFFDMMEHLIVHIVPQMVAFGPLYLHQMWSYERYMAVLKGYVRNRAHPEGSMVEGYSTEEVVECCIDYLKDGYAXVPVPRHEGRLSGRGTIGKKRFVTHDHKSFQEAHFSVLHQFAIVEPYIDQHIELIRANNWLRDLDLPEGETTDXITMKRLACGPSTTVNSWQGYDINGFSFSTRARDNKTCTQNSGVRVEAIDEAGEKQSYFGFIEEIWEIDYGHTMQFPIFKCHQFVQKIKNVKTSTQKTVKPYMRTDGVGKNVKGXMIVCKXLSSQADRSPAKIFALYKGKPAAPKFLSPGGNPRKFGAVRLPKFFTAARPLHRAHGHRRHPSTARTAAAGPSTXCRRPFHRRRPSAPPPPSPTPPLAAERLHRPIVVHERRRPRPNLVVGRSSSTAEPRRRPFLRRPRLKLVVGRSSNTDRFETMADSTKGTEEKGLGEQEQSLAVVVAPEPTVPPDGSSDSDVGDEDEEYSSPSDPCPSPSPKRRKKGDGEEGDKDYIPPKEGDXDHVTDGDKEVLWKELKKIFQFPEGSEAAVRNCALQTMAKSWRGWKTTLNKKFVKTGRTPFSTYANITPNQWDDFLTLKNSPEEIKRSQKYSELAKKNKFSHRLGSAGYAPKVEQWTKEKEEMRKKGQPVPMEEWTXRSRNWHGGRVRGVSSKISWKEGFKNDPHKKREAYKDKLRDEGAAEFERQMMDFCIKHMILPRPETKETEPDYPFDDLKENTPCRLHVPIGRSGKILEAATAIAIPGRTYNEQFIPDAYAKVQPQVVHEGFESYDIDYLTADGISVLGDAVDLVILWHKNDIFFGLGTDAGEKPVLPKLGLGKPPRPPKRKVTDKADDPELGKENPVPEVPPEIALPETAKEIAPPETAMEIQVPDVPIEITVAEPEVEFVASVGSDKDEVPGLEWDGTEPEIFEDPSPAKEPEVPRVIRSHESKSKDANKEKFMLTVFRGGKERAKLRDDDPQKASVLAGPTYFATDDCPEKYEHGKALLPEWALKEAPWEMRRLHNFYMEASKKGLGNITARSPADCFGEEGYVWLDFSYLHAIYRRDKMNVNYVGVWCMMQYMDAKKKKEPIGFLDPTRICQTQHTVTLDPGSDQLKGKNPKEIAEYKKGLHKEKLITVAQYIGRAFLHFQNKSXMAAYNFNDHYICLLIHPKDGTMVVLDPLDYKHKQYKEFLTILQYTYQYYKFKGGEQTRTREKLLCHKQPRGTVLCGYYACEFLRVNGRYRTNAEDLPRLECRTSFDDTGITNVQRDLCHFIHHECCHVKGDFFDLEGALAASDEFKDLREWNTAMP

SEQ ID NO: 112493 - protein, 581 aa, Oryza sativa
  Clone ID: PAT_MRT4530_16372C.1.pep
MESREWMYHWPRFLSPYRNEVAKFIGIAKAHAEKNNMRKIICSCADCKNEISWDFDDAFKVKEHLVTRGFMDKHEIWTRHGEEQVDGHENVVPTQVEDMVHDDGSVEDKIDLEEMLRHAEPEVLMGSARGLNYFEALQKAAKEVLYDESKGCDSEFTTLQSVLELMRLKARHGWSDTSFDSLLELLQKMLPRPNSLPSSTYQAKKLICPLSLGVEKIHACVNHCILYRKEYASLDEYPTCGASRYKSNSNTGLEPSEATKGRQRKIPQLVMWYLPVKDRIKRIYSNPRDGPHQPGIDIDVFLEPLLEDMADLWKEGLKVWDEYLREYFTVKAIIFVTINDYPAMFSVSGQIKGKTGCVICLNGTYYRYLPGSNKLVYMRHRRFLRTNHKYRKMKAEFDGTEETDPAPKPTSGENVCAMIEKIVCEFGKMTKKPSKGTNRKKPEKNTKGGDSKKQDDSSKPDDKLPPPFKKHSIFFKYLPYWKDLEVRHTIDVMHLEKNVFDNIVGTLLDMPKKTKDGLQSRMDLVEMGIKEELHPQEGEKNGKVYLPPACFTLTACFNFAGYVNLSRILNNMLEGMLTSTC

SEQ ID NO: 112494 - protein, 895 aa, Oryza sativa
  unsure (1)..(895): unsure at all Xaa locations
  Clone ID: PAT_MRT4530_16373C.1.pep
MAAGEQCKTMTELNGKRSPATATVTTTRHVGLRDMESREWMYHWPRFLSPYRNEVSKFIGIAKAHAEKNNMRKIICPCADCKNEIAWDFDDAFKVKEHLVTRRFMDKYEIWTRHGEEQVDGPEINVVPTQVEDMVHDNGSVEDKIDLEEMLCHAEPEVLMGSARGLNNFEALQKAAKEVLYDESKGCDSEFTTLWSVLELMRLKARHGWSDTSFDSLLELLQKMLPRPNSLPSSTYQAKKLICPLSLGVEKIHACVNHCILYRKEYASLDECPTCGASRYKSNSNTGLEPSDTTEGRQRKIPQLVMWYLPVKDRIKRIYSNPRDAELVCWHEEGRKKDGMIRHPADARQWINFDAQYREFAKDPWNIRFALSTDRVNPFGDMSSSHISGQIKGKTGCVICLNGTYYMYLPGSNKLVYMRHQRFLCTNHKYRKMKAEFDGTEETDPAPKPTSGEKVCAMTEKIVCEFGKVTKKPSKGTKRKKLEKNTKQGDSKKQDDSSKPDDKLPPPFKKHSIFFKYLPYWKDLEVRHAIDVMHLEKNVFDNIVGTLLDMPNKTKDGLQLRMDLVEMGIREELHPQEGEKXNGKVYLPPACFTLTLEEKKSFCNSLRDVRVPIVFLAIAIRAIKPEHLKVAITRLCYFFNTVSQKGRLSGRGTIGKKRFVTHDHKSFQEAHFSVLHQFAIVEPYIDQHIELIRANNKGRTTEWIMKEHKRLFVDWLRDLDLPEEQTTDEITMKRLACGPSTTVNSWQGYDINGYLFSTRARDNKTCTQNSGVRVEAIYEAGEKQSYFGFIEEIWEIDYGHTMQFPIFKCQWVKYLNGVNVDKFGLTFVDLASMGHKDDPWVLANRVAQVFYVKDPSNLKKDIVLPGKQKILGVDGVEDVEDYNQYDSMPLYSQFV

SEQ ID NO: 112495 - protein, 39 aa, Oryza sativa
  Clone ID: PAT_MRT4530_16374C.1.pep
MEFCLELKVTYVLALARRQQELLLLDVCILLLRLNNSID

SEQ ID NO: 112496 - protein, 129 aa, Oryza sativa
  Clone ID: PAT_MRT4530_16375C.1.pep
MGRLFVMHLEGKVYSCKHCHTHLGLSSDIISKSFHCKHGKAYLFNKVVNVTSGVKEDRMMITGMHTVSDIFCVGCGSIVGWKYEAAHEKSQRYKEGKFILERYKVSGPDGSHYFVTHDAHVGGSDVDDV

SEQ ID NO: 112497 - protein, 144 aa, Oryza sativa
  Clone ID: PAT_MRT4530_16376C.1.pep
HSKGVYHRDLKPENLLLDSRGNLKVSDFGLSTLAQKGVGLLHTTCGTPNYVAPEVLSNNGYDGSAADVWSCGVILYVLMAGYLPFEEDDLPTLYDKITAGQFSCPYWFSPGATSLIHRILDPNPKTRITIEQIREDTWFKKTYV

SEQ ID NO: 112498 - protein, 466 aa, Oryza sativa
  Clone ID: PAT_MRT4530_16377C.1.pep
MGGEEGMAAGRKKRVGRYEVGRTIGQGTFAKVKFAVDADTGAAVAMKVLDKDTILNHRMLHQIKREISIMKIVRHPNIVRLNEVLAGKTKIYIILELITGGELFDKIARQGKLRENEARKYFQQLIDAINYCHSKGVYHRDLKPENLLLDSRGNLKVSDFGLSTLAQKKCSDWDFFFEGFQGVGLLHTTCGTPNYVAPEVLSNNGYDGSAADVWSCGVILYVLMAGYLPFEEDDLPTLYDKITAGQFSCPYWFSPGATSLIHRILDPNPKTRITIEQIREDTWFKKTYVAIKRGEDENVDLDDVQAVFDNIEDKYVSEQVTHNDGGPLVMNAFEMITLSQGLDLSALFDRQQEFVKRQTRFVSRKPAKTIVATIEVVAETMGLKVHSQNYKLRLEGVSSNRMSPFAVVLQVFEVAPSLFMVDVRKVAGDTLEYHRFYKNLCNKMESIIWRPIEVSAKSALLRTATC

SEQ ID NO: 112499 - protein, 304 aa, Oryza sativa
  Clone ID: PAT_MRT4530_16378C.1.pep
MEANAPAVLPMDAKLMVATAHGDCQQLKDVVNKEDAAMMVLVMASSNGTPASAAAASPPVAMHPLLHASASSGDWKGVNFLLNREEAYADSSVQPSKKFLKSLEACIPGNCTNGRCRPRRKLLMTYKKSLLEGVTIEGDTALHVVATHGDGHNYLKCVDTICAKGKHLLFKPNNKDDTPLHCAARAGNHEMVNKLIGLAIGPSRREENNVHRGVEYLRMENDSNETALHAAIRIGHSPIVTELLTYDSELALFPQEGTSPLYLAILLKQFDIARTLYQMSRQNILSYSGPSGQNALHVAVLRSR

SEQ ID NO: 112500 - protein, 684 aa, Oryza sativa
  Clone ID: PAT_MRT4530_16379C.1.pep
MEANAPAVLPMDAKLMVATAHGDCQQLKDVVNKEDAAMMVLVMASSNGTPASAAAASPPVAMHPLLHASASSGDWKGVNFLLNREEAYADSSVQPSKKFLKSLEACIPGNCTNGRLPTPPQASNDIEEGANMPLLLSPESLLEGVTIEGDTALHVVATHGDGHNYLKCVDTICAKGKHLLFKPNNKDDTPLHCAARAGNHEMVNKLIDNLTVGDSISISEDNVHRGVEYLRMENDSNETALHAAIRIGHSPIVTELLTYDSELALFPQEGTSPLYLAILLKQFDIARTLYQMSRQNILSYSGPSGQNALHVAVLRSRVGEKRTIEIFVQKYPSSAGLRDKRGRTFLHVAVENRRVNVVGYACRNRSFLIFQSTEEMVRFVLTQAGAMNDSCRHDHFREKHKDTHNLKSDSESKELEKLKDATETMAIGSVLIATVTFGATFALPGGYRADDHSNGGTPTLVGRTGAAAGGDGGERRRRGCGVAACEQQRHGSGGGRHWSGDGGGAWAELHRLLTDGDQALEQEDGGRRQDKQAAADRQERRRRRPWWYMVQINVKRWLHRRTMLLLRDNGGMNSLCEDRYIKLTCLGTHRILIHYARQMQCLYYNVLMNEVGMDSWEEYTEQDREDVRALIDKIVDLCRSSIPRPPHDGFVWFSLFCDLYLSPEIVLILDLQGSEDEDLREVTL

SEQ ID NO: 112501 - protein, 571 aa, Oryza sativa
  Clone ID: PAT_MRT4530_1637C.1.pep
MMMQQLQNQQNQGNNHAPPQNKLAEFLRVRPPIFSSTTNPVEAGDWLHAIEKKLDLLQCTDQEKVSFASHQLHGPASEWWDHSRLNRITAEPITWLEFTAAFRKTHIPSGVVSLKKKEFRSLTQGSRSVTEYLHEFNRLARYALEDVRTDEERQEKFLEGLNDELSYPLMTGDYPDFQKLVDKAIRQEDKYNRMEQKKRRIAQFKTQQGNNQRPRLTLGPQSMPQGGSSSVVRPQRQFFNNNAGNNIRNQAPRPVAAPTQQQPAKREQGSKPVVCFNCGDPGHYADKCPKPRRVKAVPAQSNSTAPAPKARVNHVAATEAQVREYPDVFPDDLPERIHQTEFISMGSSSNFCGKERPYPEDLKGATVFSKIDLRSGYHQLRIKEEDIPKTAFTTSLAPPLSPPLQPCSAVAPVVAVARGGRHRGRRRVAVLVRPFAVAEDRRSIVAVVKPKVDAASSSTPSPSVDLPPPFWSLVSSPRRPLRPGALRSRRRAIVRRRACAPEPPQVVTSPLTSSSSSLVVRPWIGEEFEEFQGGDYDPGKVRCSGLCCARGIVTAPFREEEFYSEADGVED

SEQ ID NO: 112502 - protein, 76 aa, Oryza sativa
  Clone ID: PAT_MRT4530_16380C.1.pep
KKDCSCVLFSKGTLMLKVDSQLKRFFYWIIFFFDIISNDLKVWFDINKCLRLQDNTLVSCLRHSVGQICESKTSMY

SEQ ID NO: 112503 - protein, 79 aa, Oryza sativa
  Clone ID: PAT_MRT4530_16381C.1.pep
FFSIASEDMDSLSFGARRFLRHLTDLSFKRSPVTEFEVSKVLEELGLTMDQFIDLCILSGCDYCENIRGFITFFLFSHT

SEQ ID NO: 112504 - protein, 79 aa, Oryza sativa
  Clone ID: PAT_MRT4530_16382C.1.pep
FWACCAPFSLAPVMVIPSLSIPWFPPCMLCLSEWVHSPAWGLVSTFLQATLCKPYIHLLVDRFVIFFNDFAWVGPAIQS

SEQ ID NO: 112505 - protein, 50 aa, Oryza sativa
  Clone ID: PAT_MRT4530_16383C.1.pep
MFGCTDATQVLKELEKSKKAYPDAFVRIIGFDNVRQVQLMSFIAYEPPGC

SEQ ID NO: 112506 - protein, 133 aa, Oryza sativa
  Clone ID: PAT_MRT4530_16384C.1.pep
QRWLWLRQSHAAADLPPSGPGWVDPAVPDLGAADPSPLASATMTIMMTMTAIARTTTMTVASCVRPDPVAPNSGAANPPPPALATTKTMKTTMAMARATTTTTTTQGQIRRRRTWKRPAAMSGSSLARLRSSF

SEQ ID NO: 112507 - protein, 446 aa, Oryza sativa
  Clone ID: PAT_MRT4530_16385C.1.pep
MASSNNKRPPPYLLLLLLALGAAALSVGILHKMRERRVFSILLQERDQQLISLQALLQKEQEISKEMRRKMDELEAKTSVLSIERTELKNKLMDSETTTTYLTNTQKELEAALVEKEGHINQMKENAAASGPEQMAAIKELLQQKEAELEEIKTKLHDYKKSDTNISESILVGTNNENTTSDTAVPENSANPGDSAPAEEHHSYDNSASESNQDESTGASTNNENATVDTVVVDKYANSSDSTPATTEEPHPYNTTASESNPQENSSPEQHFIKLRTNREDDEPQDKTTGDANDNSNDALEGSHLGKSELPQWSPKLADSQDNSTEELDSTRQLENSQGEANYESRGSNLLEKEVEASNEVEPMKETSPETELETSKDSLSEANQNSTQAVEPVADPADVKPRMPIYNDETKETSKRRRRRKFRSRRKKRTNAPSTNVDGEVTKVR

SEQ ID NO: 112508 - protein, 111 aa, Oryza sativa
  unsure (1)..(111): unsure at all Xaa locations
  Clone ID: PAT_MRT4530_16386C.1.pep
HACVRTVCPREGRLSDAKKGALXLRWDILYRMGXSNKDIVSLSVGHTLXRAHPEKCVFEGTWTHDPLKFHNSYFLELLNGHSEELPEPPTDKALMEDPXFIPYVELFPRDE

SEQ ID NO: 112509 - protein, 480 aa, Oryza sativa
  Clone ID: PAT_MRT4530_16387C.1.pep
MEEIAGGAGSSEGRRRPRHRGEAKASAVPACYHRPSAGSCHHACKYGGAHAFEERESRRPAAAQPRPRKTPPPPPLAAATAMAKLRSASSRRRVGDLTKPVKAGKKAAATAVDDTGKKGDAGVVVWKDIVAYESTPLPPEKTTIAAGGGDARKKKDVSVTKGKKPIKSSPHGKSKIVAESTDDVIDGPSSKKKLVKSVGSKLTGKPPPSPELKAGEKSTPPSSHKSKKKMTTTRTNSLKPPKPKRNLVEISQQISHQSSSSSAANDIKEEKPHNPPCQEEKKSGMAPPPSPPPRPSHRRARSMSITGSAKSVRFPFTRQASRSTTTTTTTAFKVIRSRSSRAAATAAPPEDAPATTRLRFFRRGDAGGSSSGGGGGSGFHLRMRSLRRRGSIGGTAAAGGGGGFVVPAVALRHQKTLEKKRSRRLYNSVIEETAGKLAIARKSKVKALVGAFESLISKIGKYNSDGILYNLIDIALMEFV

SEQ ID NO: 112510 - protein, 76 aa, Oryza sativa
  Clone ID: PAT_MRT4530_16388C.1.pep
EAKRGRQIQRFKGLGEMNPEQLWDTTVNPETRRLLQVRIEDAVAADQIFSTLMGDVVEPRRDFIEDNALKVANLDI

SEQ ID NO: 112511 - protein, 94 aa, Oryza sativa
  Clone ID: PAT_MRT4530_16389C.1.pep
QYQYEYGGGGSGKVGYWGSVAEEERGTGQAAAEAAAKRSKSKRRWLALGDPDMERKRRVASYKAYSVEGKVKGSFRKSFKWIKDRYLHLVYGWS

SEQ ID NO: 112512 - protein, 44 aa, Oryza sativa
  Clone ID: PAT_MRT4530_1638C.1.pep
AKDTHDCRCTGCAFASVSACTWDWTRWTRHFADVHQVESYATLL

SEQ ID NO: 112513 - protein, 770 aa, Oryza sativa
  Clone ID: PAT_MRT4530_16390C.1.pep
MAPRKPNPVQAVGPDPGRVDDDNTTFLGASLVDDDELAKLVSSGALIAGQAFAPGKAVVPKPVDNRTVVFAVFFEAGLRFPCNVLLPEILRLFQVELPQLSPSTLVRISIFDWACRTSGFEPSAALFGAIFFATVNSKTVITPAGTKKTVIGSVNFNVRPERSDLWPANAAMSKWDRHWMARWFYHTIPFEAGSDSAKALRCRRRVIAPNRKPRIAVDGAMEARFALLRKVCSRLSCRDLVEEFCMLRIFPLSQSWQVAVNLSEEVDGLPKLVLPEGMNMLTLDQAEAEARKMIGDVSVVEYSQMLTRQATGRANRVFNGELPPRANPHKAGDEAGPSRKRPRGQVKLAPRKRRAPVSSDSDADDKDGEELDGEEGEGEEEETETAVENAAVEVTEGRAETPGYTPTPSPGHNETGVESNSSPLRQKDLDVAKALVAFSSGKAAKGGPVKKAAKKKGLVDIARVFSDDESSDGTLTSPAGRSLDLSAAPAPPLGGTGAGGSTAAGASASAERIVTAAAKVFGSPPRQPIASPLTEAKGKRAAGETSASEYSLAVPRFAPGDFETRADLLPFVEGVSNLIMPAGTPSLFTELNEFNEGCSAIKSLVVRILAAHCSTERTVRARLDGFKSRLRAKDDEIGRKNLEMEVLANTLKETKAENKRLQLELEKGNEARAEVERLKAELQKEKAHSAVLVDYYNLTESKMEALRQEVCKAEASAAAESRRFSREMVKTTESARTACQTLRLALTDMGAKVRGVPSEDASAFDFSEWT

SEQ ID NO: 112514 - protein, 100 aa, Oryza sativa
  Clone ID: PAT_MRT4530_16391C.1.pep
MAGHAQSGTGGMALKVCPRQRMERWRLVERRTSKRRGNPSPLNYLNGREELPATLILGIPCDRTVNYAERLSTMGKPMELTARGRFNYCVIRPMKLDASG

SEQ ID NO: 112515 - protein, 466 aa, Oryza sativa
  unsure (1)..(466): unsure at all Xaa locations
  Clone ID: PAT_MRT4530_16392C.1.pep
MAAMDARKKKSGGGGGEPLLGKYELGRMLGRGTFAKVYLARAVAGGEAVAVKVIDKAEVMGTAGMAPRVLREVAAMRRLRHPHVLRLHEVLATRARIYLVMELATGGDLLSRLAALPRRRLPESAARRXNVLLDGDGNLKVSDFGLAALPGHXLRDDGRLHTACGTPAYAAPEVLRRRAYDGAKADAWSCGVILFVLLAGHLPFDDSNIADMCRKAHRREYELPRWVSQPARRLVSRLLDPNPDTRVAVESLAAHHPWRRRRRPLNAFDIISMSPGLDLSGLFGEHDKSLREKRFTTTASPEKTLEQLGLAGGKLGYVVVVGKKGVECLPLAGGRLSSGIAAMSVEMSEVAPPLLLVELRLEVAAGDVDGGDGEVKGFGWEQLRMELGDSPLLLVDLRLEVTVDVDGNGGEVQGFGWEQLRMELGDNCLRCCCRSRHLLAHQLRIQLLSAAYHLRQQWRRQLQTWR

SEQ ID NO: 112516 - protein, 118 aa, Oryza sativa
  unsure (1)..(118): unsure at all Xaa locations
  Clone ID: PAT_MRT4530_16393C.1.pep
MVGCEHMVLKVVLMTIKGRFASYCCETLTVPTTSQRGQRLYLLYSMVHCGAPDCEAARSPWGSLGSPXPLVIEGMIMIQGRCAVVDCVVQGVLSQFLSEISPLDPQTLVKVYIGPLLL

SEQ ID NO: 112517 - protein, 114 aa, Oryza sativa
  Clone ID: PAT_MRT4530_16394C.1.pep
MVVFLKTRDTTTTMMRSARLVRPGARPSSSICVSPGFGGLTGNSPAVRPTALRRSDRRRQQARQATSAPVALGTVLTGKTTDAEQGERRQTRGDGAEHMAKSTGRASRTPSNSA

SEQ ID NO: 112518 - protein, 67 aa, Oryza sativa
  unsure (1)..(67): unsure at all Xaa locations
  Clone ID: PAT_MRT4530_16395C.1.pep
GLQXSAXSQIYLGVNSXSCNSWGXLIRDLYFIXPXVXIGLXNSXKCXXYLHFYRLQXLXXKMYILIG

SEQ ID NO: 112519 - protein, 99 aa, Oryza sativa
  unsure (1)..(99): unsure at all Xaa locations
  Clone ID: PAT_MRT4530_16396C.1.pep
RNMECRRHTIDRVTQDSTGMASLSAHVKRRPDRLHTGCGGPTKPVFYNRADTTASIALRMQCRGCSLYXXHATKRCRHHLIGGLTTGYGTCVFLTTYTI

SEQ ID NO: 112520 - protein, 843 aa, Oryza sativa
  Clone ID: PAT_MRT4530_16397C.1.pep
MSWQRVGALLLGAQSCLPVPGVPAVGGIGGLALNPLSGLLPKELGNLTNLLSLGISLDNFTGELPEELGNLTKLQQLYIDSSGFSGPFPPTFSKLKNLNTLRASDNEFTGKIPDYLGSLTNLIDLILRNCKVSGNLGPVDFSMFTALILLDLSFNNITGEVPQSILNMGKLEFLDFSYNQLTGNFPSWATQNNLQLNLVANKFDAGSNNRSKTLLVFVDLQNVFIFLFFKDCSSQHDFRNFKNNGYVFHILTDYSFAVDCGSNSSTRGSDNTIYEAEPTNLGDASYYVTSQTRWGVSNVGKFSLASNGMNIISSSEHFQNAVNSRLFETARMSPSSLRYYGLGLENGNYTILLQFAEVAYPDSQTWQSLGRRVFDIYIQGSLREKDFDIRKMAGGKSFIVVHRSYTATVSNNFLEIHLFWAGKGTCCIPTNGYYGPMISALSVSPNFTPTVRNGVPKRRSKVHTIAGILIGASILGLAALFGIFMMVKKRRTMAQQKEELYNLIGRPDVFSNTELRLATDNFSSQNILGEGGYGMLYKGKLSDGRVIAVKQLSQSSHQGKSQFVAEVTTISAMQHRNLVKLHGFCIDSNTPLLVYEYLQNGSLDTALFGHSRLNLDWGTRFNIILGIASGLTYLHEESSVRIVHRDIKASNILLETDLTPKISDFGLAKLYDEKQTHVSTRIAGTLGYLAPEYAMRGRLTEKVDVFAFGVVVLEIVAGRSNTNNSLEESKIYLFEWLWDLYEKEQVLGIVDPSLKDFNNNEAFRVIRVALLCTQGSPHQRPPMSKALAMLTGEVELSEVVVKPSYITEWQLRDVNRSYATSSYSGSTNPEFSTQKEIEPLTQS

SEQ ID NO: 112521 - protein, 81 aa, Oryza sativa
  Clone ID: PAT_MRT4530_16398C.1.pep
MATGDATATGDATATAERRRDGDAAMGRRGAARGLARGDGGTTATGDAIVTGRDARRGCYKSLPRSSGAGRVKEVAPRWLG

SEQ ID NO: 112522 - protein, 273 aa, Oryza sativa
  unsure (1)..(273): unsure at all Xaa locations
  Clone ID: PAT_MRT4530_16399C.1.pep
PAEHQSRRTPPPNRAAVENRLGSRRQRPSSSACLQVLLSTPLPAPPSFRRLHLLLAEAVQRRRSPTPQTTSAHEIQQVRSRLALVVCPIACCCNPVVLCCFYLEKFESKYAFSIACPSRNYLINTXQKLPLGTTRSDFRLNTINLVASRSRQVACRLLSRXTTRVLCLAVSLSNATHRKAQATPPRVIXSTHRERRSPPASINPSVRPHVSLLRVAHRKVRATRSKCPTHQLDHQSLLPPSTRAPRLVISLLKAAIERFXRRLKCSIHRSNSV

SEQ ID NO: 112523 - protein, 59 aa, Oryza sativa
  Clone ID: PAT_MRT4530_1639C.1.pep
GCPLFMLDASFFCVLFRISSFDMRLQVPSLFIKIIWISTKHYVNAFWPVNCFLLRMHLT

SEQ ID NO: 112524 - protein, 105 aa, Oryza sativa
  unsure (1)..(105): unsure at all Xaa locations
  Clone ID: PAT_MRT4530_163C.1.pep
REXEQIXQNAXSYKXIDRLKLTXLFTVPKXTRSPRAKXRAIAPIQREREREREXESITGPWDEXGRSGRDLAAALRSPSRSAXRARRRGWFALRWGLVDGGRRGA

SEQ ID NO: 112525 - protein, 90 aa, Oryza sativa
  Clone ID: PAT_MRT4530_16400C.1.pep
MQSLAAYAAPFGSRGPTCSCLRPNPSDLQKVGPTRIPIDVDRAHMSGRVYQIVLSGVTDHPMILRLSRAGWMDGWAHGHAKSIADGAMNF

SEQ ID NO: 112526 - protein, 113 aa, Oryza sativa
  Clone ID: PAT_MRT4530_16401C.1.pep
MGCAGSTPKVDENSKKLKKPKPWKHTQAITPTQLSKMREEFWDTAPHYGGQKEIWDALRAAAEAELPLAQTIVNSAGIVVSNSDMTLCYDERGAKYELPKYVLSEPTNLIREP

SEQ ID NO: 112527 - protein, 307 aa, Oryza sativa
  unsure (1)..(307): unsure at all Xaa locations
  Clone ID: PAT_MRT4530_16402C.1.pep
MYENCKVIDLGVTNCRVVESVGEHVEGFAAGDPVVPTFLGQCTECVDCASERSNVCSTYRFAVRPGMPRDGTARFRDRHGAPIHHFLGVSSFSEYTVVDANQVVRVDPAVPPATASLLSCGATTGVGAAWKLAKVEPGSSVAIFGLGAVGLAVAEGARICXGKKFGVTHFINPQELGDKPVSQAIIEMTDGGADYCFECIGLASVMSDAFRSSREGWGKTIILGVEMHGAPLSIPSLEILNGKCVMGSLFGGVKPKQDIPILADKYLNKELELDKFITHEVPLKDINTAFDLLLQGKSLRCTIWMDK

SEQ ID NO: 112528 - protein, 135 aa, Oryza sativa
  Clone ID: PAT_MRT4530_16403C.1.pep
SSTRPPTRPPAVPPATASLLSCGATTGVGAAWKLAKVEPGSSVAIFGLGAVGLAVAEGARICGASTIIGVDLNPEKHELGKKFGVTHFINPQELGDKPVSQAIIEMTDGGADYCFECIGLASVMSDAFRSSREGW

SEQ ID NO: 112529 - protein, 148 aa, Oryza sativa
  Clone ID: PAT_MRT4530_16404C.1.pep
MAGQIPQPIRCKAAVCRAAGEPLAVEEIVVDPPKAHEVRIKIVCTSLCHSDVTFWRMQDFPGVFPRIFGHEAFGVVESVGEHVEGFAAGDPVVPTFLGQCTECVDCASERSNVCSTYRFAVRPGMPRDGTARFRDRHGAPIHHFLGVS

SEQ ID NO: 112530 - protein, 67 aa, Oryza sativa
  unsure (1)..(67): unsure at all Xaa locations
  Clone ID: PAT_MRT4530_16405C.1.pep
XXRSXXXIGGXXKVEEXRXREXXXCXEXASHGRXRDPDGIVERSSSSSXRIDWNWISPPLLFSFRSM

SEQ ID NO: 112531 - protein, 68 aa, Oryza sativa
  unsure (1)..(68): unsure at all Xaa locations
  Clone ID: PAT_MRT4530_16406C.1.pep
TNQSMIHXSTSSSRLIQSVTQHRTKFPIIIKPNPQSTRWNIFSIHQSWAHGNPFNSLTPKILTTSTQA

SEQ ID NO: 112532 - protein, 389 aa, Oryza sativa
  Clone ID: PAT_MRT4530_16407C.1.pep
MGKKTTTSSSPSWSSLFGLGCFTSSHSDGGSAAAKNPGTPLPARPSSCNSNDGVAAAVMPSPEDLSQSLAGSGVEAFTVEELRRATRDFSVSNFVGEGGFGPVYKGYVDERLKPGVRAQAVAVKLLDLEGSQGHKEWLAEVIFLGQLRHHHLVKLIGYCYEDEHRLLVYEFMARGSLEKHLFKKYSASLPWSTRLKIAIGAARGLAFLHEAAKPVIYRDFKTSNILLNSDYEAKLSDFGLAKDGPQEDETHVSTRVMGTQGYAAPEYIMTGHLTTKSDVYSYGVVLLELLTGRKAVDKKRPPREQNLVEWARPCLHDSRRLNRVIDKSLNGQYSTRAVQKAAAIAYQCLSVSPKSRPRMSAVVEALEPLLAMDDGIVEPFVYMAPPESK

SEQ ID NO: 112533 - protein, 163 aa, Oryza sativa
  Clone ID: PAT_MRT4530_16408C.1.pep
MERSERFAWTQPPDHLGEWGERQGGSRHPSYHMIINNDDMSEAAAVGRELGGRCGMRAWRRQRKEGAGGSGKKGRRPREEDVPPLPTMTRTMTTRSGGDGVHRRPGAQETTTGFGGGGAAVGERSGTTAGERGGAAAATADPLSICFGLKSSLGPLNMPYGYF

SEQ ID NO: 112534 - protein, 78 aa, Oryza sativa
  unsure (1)..(78): unsure at all Xaa locations
  Clone ID: PAT_MRT4530_16409C.1.pep
QTGTLLVXRPKKGMDSXTISSSLHMSWRNNSVKQRTVWCCLLKKKRKKKLRVTDQEIHDLVYVLGSSTDSSRRDSTPA

SEQ ID NO: 112535 - protein, 92 aa, Oryza sativa
  Clone ID: PAT_MRT4530_1640C.1.pep
QRNYELNNRRKIARSTGRRLQVIIISSTRTPARLTAAVEQYLLEHGIQYTQAQPGLFRVLLQGSNRMGGSSWLCTPFEEEEKKEEEQKRIDP

SEQ ID NO: 112536 - protein, 52 aa, Oryza sativa
  Clone ID: PAT_MRT4530_16410C.1.pep
GILRMLFLNAILPYRVSRLLERQSHIAIVLNRVAGPMTHPTGPIGDHRDYRV

SEQ ID NO: 112537 - protein, 121 aa, Oryza sativa
  Clone ID: PAT_MRT4530_16411C.1.pep
MKKGFILDRLDRFLRGSPKYVKQHLIREHTEYSVPVDMQLRFIDDIQRRFRTVDYTRGVMLSSFFVPGNNKVTKLQSSRVDGSKEQGQERDLMAVSQAWSKRPPATEMMDHLMRPIPWPLG

SEQ ID NO: 112538 - protein, 393 aa, Oryza sativa
  Clone ID: PAT_MRT4530_16412C.1.pep
MMSQKWAAAKAQALQDLETRFIQQTATILGCYDHLLPEHIRLDLQEQHCNDHKVPDDLWLEFINAAFDGNPETLDREGGEQQLEVHARKEADKFWIEAAGAAKKAQALKEMEERFRQEFIKPGLDKILLELVESLPENIREDFFRVRYEIVDEVQEILNERVEQNFGVGDHEKRLKIRAWEESQRFRIDAAADKRAAKKLQPLQDMKKGFILDRLDRFLRGSPKYVKQHLIREHTEYSVPADMQLRFIDDIERRFRKVDYQEVIKARIWEGYERSKMPLIKRSLVTVGVMLSSFFVPGNNKVTKLQSSRVDGSKEQGRGTWLSLFWGEGSTPFPMTMDGMSKLLKMVCWATSVIIFFAGMLSCKCNHGSSEKSLLATSPIETPDIENSAPTAY

SEQ ID NO: 112539 - protein, 79 aa, Oryza sativa
  Clone ID: PAT_MRT4530_16413C.1.pep
GLEQPPAWLPPGPLQAAAPAAARGTPSPVGHGAPAGHGLGALALAAHRLTGRRRRRRAARCCTPRPRRTPPRLPPPAAA

SEQ ID NO: 112540 - protein, 70 aa, Oryza sativa
  Clone ID: PAT_MRT4530_16414C.1.pep
SHVSSALSCILARGLHLFLLFGGFTTRETAMSMSYHSTSQGTAADTAPETAYPTAEYGAPYAVAADYGGY

SEQ ID NO: 112541 - protein, 141 aa, Oryza sativa
  Clone ID: PAT_MRT4530_16415C.1.pep
MRLVAGAAAPRLVLSSTRSSPPRHPQAIAAISSLAGVPPLASPLLGRNWLVHQNAGSPASTIDSRGYTCWAKHGEQELGSGAVADRSGADNDEEGDEDEHDMFIPSPLDGEMIDVDLDLLQDMLRDVEDPSYNEKDSMKFS

SEQ ID NO: 112542 - protein, 89 aa, Oryza sativa
  Clone ID: PAT_MRT4530_16416C.1.pep
STQTNTHPGRGQSKTRTRPSTGKEAYHIGRPTTRTTIQAGYRTQQTRGYATTAKERSTQPGKPQTRRHPKRPTSSQPPKMKHTPPTHGG

SEQ ID NO: 112543 - protein, 120 aa, Oryza sativa
  unsure (1)..(120): unsure at all Xaa locations
  Clone ID: PAT_MRT4530_16417C.1.pep
GXGFTXRGXNXGXGNXXVFGAXDFXPXFLVNXSXNFWFRFXEPRLWRWXPCRXEXSXTDAFGHPTVWADXLSXVNFXRKXXGSXSYNAXFKGWWXLGKLXGCLXTPTXFITERSFRGXXW

SEQ ID NO: 112544 - protein, 169 aa, Oryza sativa
  unsure (1)..(169): unsure at all Xaa locations
  Clone ID: PAT_MRT4530_16418C.1.pep
MKINEQEMERSTINQTLERQVKIAACIYFFLWFSWLPFLFICRMDSTPCWMPRTGMKFSCVDEAWKFWVSYGGKIGFDVRKQYNNKSAADGPXRWFVCSSAGYRGKHKRDYLTKNPLVETRTGCNVHMGITLNRVEGNYELXYDLVTEHNHILRLPETHHLMPSQHSKS

SEQ ID NO: 112545 - protein, 347 aa, Oryza sativa
  Clone ID: PAT_MRT4530_16419C.1.pep
MPDGHYVVTVLTETGWPHEPSTAVTPYGRACGCIVKDFIPIKYRHWKTNDVTQLDWTVPHNLKEECWRKLKLTFTFPKGQEELAKKGALSKMSTLFRKWRTDLNAKLVQRNRTLDFEKPSFLTDLGRADMLRISPNGKRRRNNCAKQGQAGDQVVNPGAKRSTCASADNPPPEQDTSRYVVDDITTHMPCVLHVPLQSNITQEIARGVAHPICAGQTIHGVPLPVGHSRVEVEDVPSQYRGYVLQFPPEEGVDTLGAALHNLIIWPKRYIVITLNDGAGDPGDGASSPSNGRGANLAPSPPRQRTFSPPRENTPNEPHRPEKSTSPPPLRKKTRTPSASQMSVPSSK

SEQ ID NO: 112546 - protein, 513 aa, Oryza sativa
  Clone ID: PAT_MRT4530_1641C.1.pep
MSIEERTLSLINKTTALNPNAQEFVPSSLRSINDVSNRSDTSRISVSGSSKDTIADQQDPVIPSNPDEEAHRYWQEQLPDDITPDFKVLGQDEMPGPDNISLTGLSINDSIGASLFSPNQTSNLQHRASPFIRDTLSTRSKIEFPSPTYVEEQSRATIMSPTASAMSPTAAPWVKTVRNGVQYNANRRDASHYNGDSSIGAPVQNLTDAYFGSRRSFSSTMDIMSQLENKVDGRFNQNLRSLSFGHSSPPSPASYGQNGLANYNKEAFGLANNTYRSHSAVLADDILSPSAGREHISLDAPRGRYNTTNLPVSGLGSSRGSQFMASSFNGNHDIVSNNTLQNIAGVQTGPAWLEADTAANMFLESKDEAHDFASLRHALLEQDRQVLLTGANPLAKELNIKELYNLQSRLAQEKARDVYRQRFQMPEFQGLVQEQNTPIDLCGLHVSEAIHALNYELNNRRKIARSTGRRLQVIIISSTRTPARLTAAVEQYLLEHGIQYTQAQPGLFRVLLQ

SEQ ID NO: 112547 - protein, 374 aa, Oryza sativa
  Clone ID: PAT_MRT4530_16420C.1.pep
MPDGHYVVTVLTETGWPHEPSTAVTPYGRACGCIVKDFIPIKYRHWKTNDVTQLDWTVPHNLKEECWRKLKLTFTFPKGQEELAKKGALSKMSTLFRKWRTDLNAKLVQRNRTLDFEKPRGKRSEHPKQGQLRVEQAFYRLGPSRYAKNIPKWEEKEEQLCQAVLFPNGLPRQQGQAGDQVVNPGAKRSTCASADNPPPEQDTSRYVVDDITTHMPCVLHVPLQSNITQEIARGVAHPICAGQTIHGVPLPVGHSRVEVEDVPSQYRGYVLQFPPEEGVDTLGAALHNLIIWPKRYIVITLNDGAGDPGDGASSPSNGRGANLAPSPPRQRTFSPPRENTPNEPHRPEKSTSPPPLRKKTRTPSASQMSVPSSK

SEQ ID NO: 112548 - protein, 56 aa, Oryza sativa
  unsure (1)..(56): unsure at all Xaa locations
  Clone ID: PAT_MRT4530_16421C.1.pep
DISHHLQLQRLGHLYIDRNECHCQGVWDCNSPCTXGIYPRYYNAHGHNTTLDGEVH

SEQ ID NO: 112549 - protein, 408 aa, Oryza sativa
  Clone ID: PAT_MRT4530_16422C.1.pep
MRRERDATQIPENPMEGIPQTAAAAAAAAAAEASEPPRKRARVDGGGGGAGEEEEDRLSDLPDCLLEDILAHLGSRQAVQTSVLSRRWRNLWRGVRVVVIDVGSFRLPGADGDPPRFRLDRIEDFADGVLSPSLHPGAARELDALRMRLDEDAVTTNFQRWIRRALWRRPATVDLYYLPRRSFSWPPAVPLTPVTAVSRLKTLRIFGLRPTVVFGADEFPALEDLHIERCSYAHGTIASPTLKRLALVSPINGCFVREQRLTAPGLTSLRLVLPYSREEGVRVITDAPLTSLVDASITIVDTDPGDPRNRRVNQFKVDFLVAISNLLGRLTSVRNLDLTGLNATALLDNKSQEFPMFPYLTTLLLNECDIGYKYHVLRSILQNAPNLEQLRLHNCKQFEVSGNQAPAR

SEQ ID NO: 112550 - protein, 249 aa, Oryza sativa
  Clone ID: PAT_MRT4530_16423C.1.pep
YSPNLTVNERTSSAIGAGCVKDGLSLANSLLSPLVFSPPPLQPPASRASKGTKHALWPRQLISSPSLSSHFAPATITNPLSGRIREVPTRVRELGFSQLSTSDVYPKYSPHKSRFNKLRRFCFTATVAIALRVSEKNQNHKDKKDKKMTKGRETTRSSHRKVTVCNVTMVLKTRFYLWIEYESYVSPKLWIVLETLFRVHRMYCRVLTVATWLPEVRVRCSLTYGLQYYRGSILVACIAYYAFEKRAVR

SEQ ID NO: 112551 - protein, 165 aa, Oryza sativa
  Clone ID: PAT_MRT4530_16424C.1.pep
HQYNEQRYYDETTMAENDATHPLTPHQCADHRTETPPSSNESGAGNHTSEIRDDEETPAILQAKSNRPQIPLQNLVNPGGSRFENRAGHHPRSPTSAMQFEQRNSLNARATHQQTNQPSQTPPPHHTELVGSESSAAASLWLQPAPEREGDEAPRCAVGTETSGR

SEQ ID NO: 112552 - protein, 59 aa, Oryza sativa
  Clone ID: PAT_MRT4530_16425C.1.pep
HASEGIAGSIPWSALNFSAMWLELVGFTHWETSVITGLYLLATALGALFGGLVGDPVSR

SEQ ID NO: 112553 - protein, 321 aa, Oryza sativa
  Clone ID: PAT_MRT4530_16426C.1.pep
MAISPAATASTPRWSSSSTISACPSQAAMCITVLDPSSEISNHTSTAAQSPPKSGRRGGFDIGDNGGRSVPCAQVISTAAASVPAAAAEAAMRHLQGAKDGVLAGVPARVILHGDEKVRLLNAQRLFGTRNIRRFVQATLPEKRDDLMSSIKYEAQVWARNPQSGATGVMWHLERKVERELAKLSKLRQKLEMCKNLAAKKSILEAKGVGVRQVTFKEQEQERQYQACPARISAWTLRLFVHRSACEIPISQMESHIACMQFFGRAFMAFVGQIQEEAINHEAEDAHYDFFPLQPHLVLDSPRNPHPLGRPPLTRSHNVHG

SEQ ID NO: 112554 - protein, 75 aa, Oryza sativa
  unsure (1)..(75): unsure at all Xaa locations
  Clone ID: PAT_MRT4530_16427C.1.pep
FALWNSSSVISIIVAILYGALXSGLSYQSVSSVPQAXNAKSXKGREVNEWWVQPIXLCRCRSGQAGFVDWHLARL

SEQ ID NO: 112555 - protein, 135 aa, Oryza sativa
  Clone ID: PAT_MRT4530_16428C.1.pep
MAWQQRRPATCATARPPPPPVPTSHATTIVVDPDSTRRPPLLPVDGLIIEINHVSCYDMIEQFYDKIKEAQDSPSKLAALKSTAAASPIPEAIVEERKNYGKSKAGDADSDEEGDTSGEDESNDDEVYNTVTLLK

SEQ ID NO: 112556 - protein, 127 aa, Oryza sativa
  Clone ID: PAT_MRT4530_16429C.1.pep
LWGDTEDFVRHVAWNQDQTWLLVPKQSNAQPCSVESTRRQKNTRSERCGRRCLAARDLAHAALGEIPDSPTKKSLPAPAIHPTATESFCPRRHRPCRHEDKIHGGLGIDWNGVGAARCPFLSRRQER

SEQ ID NO: 112557 - protein, 161 aa, Oryza sativa
  unsure (1)..(161): unsure at all Xaa locations
  Clone ID: PAT_MRT4530_1642C.1.pep
LKNEKRFIERVQIHPHLIHRGSMKGYTCWTRYEEQKLLNIVDEVSGRSNDEXDEDYMFFSFPFGGGMVDIYNDSFNPMMNGVDELAYYERYYKFTRLVFDSETPLYVECKAKHTKLFVVLDLVKLKASNGWIDKSLIQLMDLLNALFFEENSLPKTTYEAK

SEQ ID NO: 112558 - protein, 151 aa, Oryza sativa
  Clone ID: PAT_MRT4530_16430C.1.pep
MTFVKVIENEAFFKRYQVKFRRRREGKTDYRARKRLIAQDKNKYNSPKYRLVVRLTNKFVICQIAYAEIDGDKILASAYSSELPRYGLNVGLKNYAAAYCTGLLVGRRLLQKLGLDQDYEGNTEINGEVVKTEINGRTYFVNEVADDKRPF

SEQ ID NO: 112559 - protein, 735 aa, Oryza sativa
  Clone ID: PAT_MRT4530_16431C.1.pep
MPPPTPLARLLAAISAAASSPADLRRLSHRVLSPSAPLPPLRCLNTLLMALARHRMFPDMESLASRMPARNLRTYTTLINAYCLAGDIPAAKQHLTSLLHAGLAPDSYAYTSFVLGYCRARMLTHACPVVLLMPLRGCLRTAFTYTALLHGLLGAGMVREAMAVFVGMRADSCAPDTHVYATMVHGLCEAGRTEEAEVLLEEAMSNGFEPNIVVYNALIDGYCNAGEMEHALKVFEGMDGNRCSPNVRTYTELIHGLCKSGKVERAMVLFSRMVEAGLEPNVVTYTALIQGQCNEGHLQCAFRLLHLMETNGLVPNDWTFSVLIDALCKREKVEEAQLFLGSLVKKGVKVNEVVYTSLIDGLCKTGKIDAADELMQKMISEGFVPDAHSYSSLIDGLCRQKKLSQATLMLEDMMEKGIQASPVTYTIIIDELVREVGSEGPKKIFDKMIATGINPDIVTYTVFVRSYCEEGRMEDAESMIVQMVDRGVFPNLVTYNTLIRGYANLGLVSQAFSTFEVMVGKGWKPNEDSYTVLLRLVVKKSSSDNSVDIWKIADMKDLQVLLEDITERQLPLAADIYSCFIRCLCRVDRLEEAKHFFMGMQNANLTPSEDVYTSIIDCCCRLKILTDALTLLDSMTKSGYLPHLESYRIIISSLCEGGNFRTAKEVFGDLLLKESNYDEIVWKILIYGLLQKGSVAEFSSLLSVMKEHGYQPSNTINAMITGEITVTNEVQEIAR

SEQ ID NO: 112560 - protein, 108 aa, Oryza sativa
  Clone ID: PAT_MRT4530_16432C.1.pep
IGDEIKSPVKSRAHSPGLEEPESCHPPPAKIDSEQIHPPVTTKVQAMDLAIEVHKPYCSPVDAGQLQTSPRVEPSIPLPFWNIPLRRRRRRRRRGEEPESSETDRSGV

SEQ ID NO: 112561 - protein, 269 aa, Oryza sativa
  Clone ID: PAT_MRT4530_16433C.1.pep
MPISEVNIRRLVLAPWVRVEEYFLATTRPPLNIVMGFCTYKEKDDIFKLTLTGGNSGHNYLTEKSLKELKETLATIRGKATPSSRGLVTICSGKSSFCDGIDYTSSPPPAVEELIRGMAEVVRELLGMPFPTVAAVGGDVRSSLALALVLAHDDVAVLKKVKIEAREVVEGRHDAVPPYLGALLRDKSSYPQMSSDLVLRSETMAGERLKYWYLIERVCDDQWELKGHAINMIKEVFGDERDGEAYVTTRKSLVFSESWKAVSELLKNI

SEQ ID NO: 112562 - protein, 144 aa, Oryza sativa
  Clone ID: PAT_MRT4530_16434C.1.pep
MAHRRIILLLAAAAVAATSAVAAASSGFDDSNPIRSVTDHAASALESTVIAALGRTRDALRFARFAVRHGKRYGDAAEVQRRFRIFSESLELVRSTNRRGLPYRLGINRSADMSLKKPGDRVEADEPIAQIETDKVTIDVASPE

SEQ ID NO: 112563 - protein, 1002 aa, Oryza sativa
  Clone ID: PAT_MRT4530_16435C.1.pep
MAHRRIILLLAAAAVAATSAVAAASSGFDDSNPIRSVTDHAASALESTVIAALGRTRDALRFARFAVRHGKRYGDAAEVQRRFRIFSESLELVRSTNRRGLPYRLGINRFADMSWEEFQASRLGAAQNCSATLAGNHRMRDAAALPETKDWREDGIVSPVKDQGHCGSCWTFSTTGSLEAAYTQATGKPVSLSEQQLVDCATAYNNFGCSGGLPSQAFEYIKYNGGLDTEEAYPYTGVNGICHYKPENVGVKVLDSVNITLVINGFRMYKSGVYTSDHCGTSPMDVNHAVLAVGYGVENGVPYWLIKNSWGADWGDNGYFKMEMGKNMCVFMSVKIARKELQLTRDFTHQDRFLPGAKFTDFTMRRHAGTIILLLILACLWLCPGRSSGFSWNIFSSSSSSSPPTAGESRAAPMLELDGAVADFLMDGADDPRAVKLLENARSKLAGPSNCWQEAYRRLFASCGDIMADKEMQSRLAWHLSSCFQEDSGRPPFPRCGEVSDMVHCRKRLGVSEDQVFLEFFLETNTLCHQLQAEAFKHNTERLVNDLTRTSKSAEEKLEVIEERSDQIIQESRKVQETISSIEMQADHLAEASKNVGDQIDDVLAHSKAIFEQSKEIADSQAKLREGQTEMRETIDAGMTHIQESYESLGNGMDKLKEEAVDIQREIKTVGDSMSTKMQDLQSTANDIGSVAGKSLENQMQLLDGQSKAMDGLNNLYSFQAQALEESRETVQKLAQFGQRQQEELLSRQEEIRQAHEHLIHNSHSILEAQEEFRAKQANIFAALDKLYILHNAILAESRFIKAFFFYCCIVFLIYMLTSAKQTFSIRGHLYFGLCITLLLEIGLIKLGADDIDKQFWVISKVFLVRSVFLALATVQMLHAIFTFRDYELLNHHLLQTLVEKVRALEETAAAGEKMLPYGGGGAESERSLMDYSWVFDELADEVDSNADPSYALPGDEQRQVAVVAPRRRHCASPEEVVGENSITTSAGRRYNLRPRSSYRQT

SEQ ID NO: 112564 - protein, 599 aa, Oryza sativa
  unsure (1)..(599): unsure at all Xaa locations
  Clone ID: PAT_MRT4530_16436C.1.pep
MAHRRIILLLAAAAVAATSAVAAASSGFDDSNPIRSVTDHAASALESTVIAALGRTRDALRFARFAVRHGKRYGDAAEVQRRFRIFSESLELVRSTNRRGLPYRLGINRFADMSWEEFQASRLGAAQNCSATLAGNHRMRDAAALPETKDWREDGIVSPVKDQGHCGSCWTFSTTGSLEAAYTQATGKPVSLSEQQLVDCATAYNNFGCSGGRPILEKGKKNKSKSIPLLLPQTRCGLHATPPPSAAAAAAARPRRMASRIASRLLRRSNATLGLIRSYSHARNYSSQLSALIPIGSQSSKLTRRRYYLPNASPYQLWSRSFASDNGDQVEAVVPFMGESVTDGTLANFLKKPGDRVEADEPIAQIETDKVTIDVASPEAGVIEKFIASEGDTVTPGTKVAIISKSAAPAETHVAPSEDSTPKETPPKAEETKPKLEEKSPKAEPPKMPLTTQAFDYIKXNGCHDTEEAYPYTGVNGICHYKPENVGVKVLDSVNITLGAEDELKNAVGLVRPVSVAFQVINGFRMYKSGVYTSDHCGTSPMDVNHAVLAVGYGVENGVPYWLIKNSWGADWGDNGYFKMEMGKNMCGIATCASYPIVA

SEQ ID NO: 112565 - protein, 349 aa, Oryza sativa
  Clone ID: PAT_MRT4530_16437C.1.pep
MPMPSRARRRSKSRWPLGEPPPGLFPARDDLLRLLAVVSIAAAAAAACSLLNRRPKPLCDSGGAAYTHHDSCQPCPPHGRCVDGNLECVQGFNKYGNLCIEDGLVSQTATKISQLLERRICDQYARALCGQPAKILFQELDILNMADELLSKGFVGLSQDGAKVAKIKVLDSARAFFEKTFSSDGAPDLSNSAMDLKKYHVCDSLWCPALLWILWTIYKRQALSKRAEQIYAQVCEVLEDNAIDAKIGNSECEPWVVTSWLRDHLLVPQERRNAFLWKKVEELILEDSRIDQYPKVVKGESKVVYEWQASGSLSGKKKVKKMQGVAAGKSRADGAAGGAIKLAEELDAG

SEQ ID NO: 112566 - protein, 161 aa, Oryza sativa
  Clone ID: PAT_MRT4530_16439C.1.pep
MAQESWKNESEETVHTPEAPILCVNNCGFFGSSMTNNMCSKCYRDFVKVTTMAAPVVEKKAFTPASSSKTPLEPAKPDEVPAAAVEDKQAAQEPPKPPSNRCLSCRKKVGLTGFQCRCGGTFCSTHRYTEAHDCTFDYKKAGRDQIAKQNPVVIAEKINKI

SEQ ID NO: 112567 - protein, 1076 aa, Oryza sativa
  Clone ID: PAT_MRT4530_1643C.1.pep
MERGGPCDGLCRFRIHLGTRGDCPLPARDGGFAITGTSLTEIDNRNLQLNAQAMNALFNSLSQEEFDRVSNLETAYEIWNKLAEIHEDTSEYKDAKLHFLKIQYETFSMLPHESVNDMYGRLNVIVNDLKGLGVNYTDLEVAQKMLRALPEKYETLVTMLINSDMSRMTPASLLGKINTNDMYKLKKKEMEEASPSKKCIALQAEVEDKGKGKVNEANEDLEEEIALLARRFNDLLGRRKERGRGSNSNRRRNRRPNKTLSNLRCFECGEKGHFASKCPSKDDDGDKSSKKKSGGYKLMKKLKKEGKKIEAFIGEWDSNEESSASSGSEEEGGDDASSKKKKMAVVAIKIVKFKALKKDHASLEVLYEELKTSHERLTISHEKLKEAHDNLISTTQLGALIDVGISCDLLDDSATRHIAHVASSSISTSCDDLVDMSSSSSSSCVSICDASLVVEKNELKEQMAKLNKSLERCFKGKNTLDKILSEQRCILNKEGLGFIPKKGYASKSKAYRVYNKNKGIVEETADVQFDETNGSQEGYENLDDVCDEGLMRAMKNMSIGDVKPIEVEDKPSTSTQDEPSTSATPSQAQVEVEEEKAQDPPMPPRIHTALSKDHPIDQVLGDISKDEALCDPDWMNAMHEELNNFARNKVWTLVERPRDHNVIGTKWVFRNKHDENGLVVRNKAREFEMSMIGELSFFLGLQIKQLKDGTFVSKTKYIKDLLKRFGLEDAKPIKTPMATNGYLDLDEGVMPPRTCHDRRAPTPDPVSEPGESSGEDYAQSDEEVEANVEGASEEASGDDDSGSGEDEDEGRKAFAEHKWISWRDINETPEFEGLQDLFKTVGIDRIMTLKQDYNEDLIRQFYATVWVAGDYSEMKWMSDTLQCSISRRQFWRLLNIRLDFGDDLHEEHTHNPLSIDYLSQFYEDGVRYTHGKVAGLRTIPSVVNRIVRATILPRLGNNDDIRGVAWHVIDAIIQGRQFDIVSLMMQEIAISKGTFTQGIYYAPYIMRLIQDKLGAAGQNLKKHKQYKPRLQLGTPRAPRAAPSSHPGASSSSAPPPPPHGYVPNAFFHPQYAYFGM

SEQ ID NO: 112568 - protein, 1282 aa, Oryza sativa
  Clone ID: PAT_MRT4530_16440C.1.pep
MAAAAAREAADGGDINGGGGGGGERSSSPAAAAAGNSDVGRVAVRRMFAFADGADAALMAVGAAAAVANGMAQPLMTFIFGDVINAFGSTSSPDVLAKVTKVILNFVYLGIGAGFVSTLQVSCWTITGERQAARIRALYLKAILRQDIAFFDKEMSTGQVVERMSGDTFLIQDAIGEKSGKCIQLLSTFFGGFIIAFVRGWLLALVLLSCIPPIAVAGAFVSRLMTRISTRMQEKYGDAGNIAEQTIGAIRTVASFNGEKQAINTYNKFIRKAYESTLQEGVVNGLGLGTVMAILFCSYGLAVWYGSKLIVNRGYNGGIVINVLMSVMMGAMSLGQATPSITAFAEGQGAAYRMFKTIKRQPDIDVCDTKGIILEDITGDVELKDVYFSYPTRPEYLVFNGFSLQIPSGRTMALVGESGSGKSTVISLVERFYDPQSGEVLIDGIDIRRMNLGWIRGKISLVSQEPVLFSSTIRENIAYGKEDQTLEEIKRAVELANAAKFVDKLPNGLETMVGERGIQLSGGQKQRIAIARAIIKNPRILLLDEATSALDMESERVVQDALNRVMLERTTIIVAHRLSTVKNADVISVLQQGKMVEQDKSKLLLTTNQQIDNNLFTLGSHVELMKKPEGAYAQLIQLQGAQQDAEIHNDDTDMIIRSDSGSRSINVKPRSQSTSFRRSITKGSSFGHSGRHPIPAPLDFPDPMEFKDDLGMEETTDKVPRGQKKASISRLFYLNKPEAFVLVLGSVTAAMHGLMFPIFGILISSAIKMFYEPPSELLKDSRFWASMFVVVGASAFVLIPTEYFLFGLAGGKLVERIRSLTFRSVMHQEINWFDKPEHSSGSIGARLSVDALNVKRLVGDNLALNVQTVSTVISGFTIAMVANWKLALIITVVVPLVGFQAYAQMKFLKGFNKNAKLKYEEASQVATDAVGGIRTVASFCAEQKVIEAYEKKCESPVRQGIREGVVGGLGFGFSFLVFYFTYALCFYVGAKFVHQGVATFPEVFRVFFVLVLATSGISRTSAIGADSTKANESAVSIFEILDRKSKIDSSSEEGVVIASVRGDIEFHNTVALVGESGSGKSTAIALLERFYDPDTGKILLDGVDLKTFKVSWLRIQIGLVAQEPVLFNDTIHANIAYGKQEQASQEEIMAAAEAANAHQFISALPDGYSTVVGERGIQLSGGQKQRVAIARAIMKDPKVLLLDEATSALDAESERVVQEALDRVMVGRTTVVVAHRLSTIKGADIIGVLKNGAIVEKGGHDELMRIKDGTYASLVELSSSSR

SEQ ID NO: 112569 - protein, 42 aa, Oryza sativa
  unsure (1)..(42): unsure at all Xaa locations
  Clone ID: PAT_MRT4530_16441C.1.pep
SALLHLGRNSTVETTGPEYLFLVSCYKSNNYVIHVKIGXXDL

SEQ ID NO: 112570 - protein, 57 aa, Oryza sativa
  Clone ID: PAT_MRT4530_16442C.1.pep
LVRLWQYSFSFWTQPQRIHLNQLANFCFDFLGYFASVPINSLLVKNQMLENSFILPP

SEQ ID NO: 112571 - protein, 911 aa, Oryza sativa
  Clone ID: PAT_MRT4530_16443C.1.pep
MEAVEELAQLSEAMRQAASLLADDDPSDDSAPRRPSTFLNAVALGNVGAGKSAVLNSLIGHPVLPTGENGATRAPIVVDLQRDPGLSSKSIVLQIDSKSQQVSASSLRHSLQDRLSKGASSGSSRGRVEGINLKLRTSTAPPLKLVDLPGIDQRAVDDSMINEYAGHNDAILLVVIPAMQAADVASSRALRLAKDIDADGTRTVGVISKVDQAEGDAKTIACVQALLSNKGPKNLPDIEWVALIGQSVAIASAQAAGSENSLETAWNAEDETLRSILTGAPKSKLGRIALVDTIAKQIRKRMKVRLPNLLSGLQGKSQMVQDELARLGESMVQSAEGTRAVALELCREFEDKFLAHITSGEGSGWKVVASFEGKFPERIKQLPLDRHFDLSNVKRIVLEADGYQPYLISPEKGLRSLIKIVLDMAKEPSRLCVEEVHRVLLDIVNASANATPGLGRYPPFKREVIAIASNALDSFKNDAKKMVVALVDMERAFVPPQHFIRLVQRRMERQRREDELKNRSSKKPQDADQPMGKRASSPQTGSEKDTKDKSAKDKDKDKSGQQDKDAKEGSSVQVAGSSGEITAGYLLKKSAKTNGWSRRWFVLNEKSGKLGYTKKQEERHFRGVITLEECNLEEVEEEEPPKSLKDSKKANGPEKGPSLVFKITNRVAYKTVLKAHSAVVLKAESTADKVEWVNKIRAVIQSKGGSFKGPNTDGGSMRQSNSDGALDTMARRPADPEEELRWMSHEVRGYVEAVLNSLAANVPKAIVLCQVEKAKEDMLNQLYSSISGQSNAKIEELLQEDHNAKRRREKYQKQSSLLSKLTRQLSVHDNRAASYANDISEAESPRTPNRPGEDWRSAFDSASNGPSSGSESRSRSADGRRGRYENGDVTSGANSGSRRTPNRLPPAPPKY

SEQ ID NO: 112572 - protein, 80 aa, Oryza sativa
  Clone ID: PAT_MRT4530_16444C.1.pep
FFGVFFFFFFGIISPLFYWTPFQTGQPTGITSLQHETSHGLSRKGLIGPAHNLGGNQETLRVLTAPLWTILQGGLRNAGD

SEQ ID NO: 112573 - protein, 297 aa, Oryza sativa
  unsure (1)..(297): unsure at all Xaa locations
  Clone ID: PAT_MRT4530_16445C.1.pep
IFVNFVHFSSGYLLKKSAKTNGWSRRWFVLNEKSGKLGYTKKQEERHFRGVITLEECNLEEVEEEEPPKSLKDSKKANGPEKGPSLVFKITNRVAYKTVLKAHSAVVLKAESTADKVEWVNKIRAVIQSKGGSFKGPNTDGGSMRQSNSDGALDTMARRPADPEEELRWMSHEVRGYVEAVLNSLAANVPKAIVLCQVEKAKEDMLNQLYSSISGQSNAKIEELLQEDHNAKRRREKYQKQSSLLSKLTRQLSVHDNRAASYANDISEAESPGHPPXSGGLEAAFDSASTDPAQAAN

SEQ ID NO: 112574 - protein, 58 aa, Oryza sativa
  unsure (1)..(58): unsure at all Xaa locations
  Clone ID: PAT_MRT4530_16446C.1.pep
HQKIKLXXLXRLLILPLVAXXRGXXGSXXTXXAAARVAXDRQAAXXQAXGXTRXGXTT

SEQ ID NO: 112575 - protein, 126 aa, Oryza sativa
  Clone ID: PAT_MRT4530_16447C.1.pep
MAEVNPKAYPLADSQLAQAIQELVSQAANYKQLKKGANEATKTLNRGIAEFVVMAADAEPLEILLHLPLLAEDKNVPYVFVPSKQALGRACGVTRPVIACSVTSNEASNLRDPINNLKVAIEKLLI

SEQ ID NO: 112576 - protein, 245 aa, Oryza sativa
  unsure (1)..(245): unsure at all Xaa locations
  Clone ID: PAT_MRT4530_16448C.1.pep
RHLRRKHGRRRRAAAPSTGAPRRRACSSRGRAPPPWSPGRRRRATSHLPPAPASRTRRRRRSRSSQPAPPRXRTPPDAPAARGWLRPAGRSSPPPTPRRRSRRRSPGPRRSCGRRVSRRRPRRRSPGGWTCGTPTACASGTPXGRRCPWPRRTPALAHPVPTSRSSRRRGRRTGCPRGTRRPRRRRTSSPCRRSASRRRSPARRRTPARRTCRAPGSSTCRRRAPRRRRRSGRRRRRPSSTEAAA

SEQ ID NO: 112577 - protein, 155 aa, Oryza sativa
  Clone ID: PAT_MRT4530_16449C.1.pep
MEQGERQRQKRATCGAERLASGARRGSGRWRARRWRRLVTSNAVYICRSMPPSSRLIRDLIVGFFHQTHEDDSSSSVAPPRFIPLPSASSRFGDGELDRVSALDAFLRRGTIASIPTILTTPGLYACALLTADDLQDSADLLSPGPAAFRLLVLY

SEQ ID NO: 112578 - protein, 141 aa, Oryza sativa
  unsure (1)..(141): unsure at all Xaa locations
  Clone ID: PAT_MRT4530_1644C.1.pep
PLLVAARRVAAVAVAARASHRRLAPRAARPIAARPSTRPVAVAPRYRRVPPRAARRRCRAVPHRRRPAXVPPAVASPLPPITSSRSPMPPPRAPRPCRRASLAAIPSRRPIAAAAARSRVAAAEPSPSPPRAPHPAPRRCP

SEQ ID NO: 112579 - protein, 232 aa, Oryza sativa
  unsure (1)..(232): unsure at all Xaa locations
  Clone ID: PAT_MRT4530_16450C.1.pep
MPPSSHLIRDLAVGFFHQTHEDDSSSSVAPPXFVPLPSASSRXSALDAFPRRGTIASIPTILTTCSRLRSXKLVVCNPMIGEMAILLPVLSGKDRLGLYACALLTTDDLQDSADPLPPGPAAFRLLVLYKRRSFTACRSYSSDTKAWSTERKLSGGTDLTTGAGLATTAAGNPKDDGGDSPPSPRRRRRCGRMAGAPRPDPPSATPGPSPAARPAPSAREREGIERRGEREE

SEQ ID NO: 112580 - protein, 278 aa, Oryza sativa
  unsure (1)..(278): unsure at all Xaa locations
  Clone ID: PAT_MRT4530_16451C.1.pep
LYPLSPLLSIPSLSGRWNRASGDGRSGRQTGRSGWPAERGGAAADGGLGQVLLLVFAASSLDLHDLVRCTXATCRRWRRLVTTSXGNAVYICRSMPPSSHLIRDLAVDFFHQTHEDDSSSSVALPRFIPLPSASSRFGGGELDRVFDNPGLFKNSRLVASRKGRLVVELRRPXVTANIKLVVCNPMTGEMAILLPVLSGKDRPGLYACALLTADDLQDSADPLPPGPAAFRLLVLYKRRSFTACRSYSSDTKSWSTERKLSGSRRRRIRPGDVAAAAP

SEQ ID NO: 112581 - protein, 1358 aa, Oryza sativa
  Clone ID: PAT_MRT4530_16452C.1.pep
MLLQAAQAWRSRRTQREARPDALPPRHPPRPVAADGRGGSGEGTSRARGRGEEGTARGGDGEMMALVRTVDVAVAGGLATLTHGGERDAGAAVATEEKRNGGEVGTKRGMEERAARSPPPPKRSAVSSVRQLPPGCGRDAALPLGRRHGRGRDGDGGVPPLAGNRTDLPLEAVVDGGDPIANVHQIFSKSSHATDENQVACKVGSLEDVVQEGAANSGELLGWKQVLAQAANVLPKRRMVSATRRFPPGCGRDVKTGSGLEFMAVDASCGGVSKEVVASDGGDSLVSQELEEGEVADEAYSDVDSQNVAVDDSMAAATEDVKVMNKCKGTLPRAAAEPCAEGPSKEHFKGTRECENDRMGKSSMNVATEVFGDCMMRSKILLTARKAVKSPLNILHRRPFSKGKEECVVTNSAPCGPKKKLKVKGAYQTKDIPIKIVSTPGLGGKDNLVDKEALILEDDDILKALAVHDGTLKLYLNASSSVQHHGQHGSGNADDRRKTMMLCRRFQFIRQALVQAVKQGSLKVLRADLEADKIVRKLPGFIKPGPIVGNVRVVEVGDEFLYRVELALVGLHRPYQGGIDTADHNGVLVAISIVASGGYPDRLSSSGELIYTGSGGQPAGKKKSEDQKLERGNLALKNCIKTKTPVRVIHGFKGQNGKDDNYKEFMLVDEKGGRWRKLSCRRKTVAKEASSGIEGGWRRGMDRWEALIAAAARRSEPPRSGWAEWGGGGGGDARATAIPSRCPPRPRPVAAGGRGGGGDRMRGRGGEEGTWKSHGGGGRGAERAGAVVAPPRAADAAGTGTGTGRNAVAVNGGAAEDVVVIASGRRSVGEPTLDVSEMLLQAAETWRSRRTQREARPDALPPRPVAADGRGGSGEGTSRARGRGEEGMTQVAVAGGLATLTHGGERDPGAAVATEEKRNGGEVGTKKGLEERAARSPPPLPPPKRRAVSAVRQFPPGCGRDAAVPLGRRHGRGRNADGGVRPLDQATAPPLAGSKTDLPLEAVVDGGAANSGELLGRKQVMAQAANVLPKRRMVPVTRCFPPGCGRDVKTGSGLEFMAVDASCGGVSKEVVASDGGDSLVSQELEEGEVAEEAYSDVDSQNVAVDDSMAAATEDVKVMNKCKGTLPRAAAEPCAEGPSKEHFKGTRECENDRMGKSSMNVATEVFGDCMMRSKIPLIARKAVKSPLNILHRRPFSKGKEECVVTNSAPCGPKKKLKVKGAYQTKDIPIKIVSTPGLGGKDNLVDKEALILEDDDILKALAVHDGKLKLYLNASSSVQHHGQHGSGNADDRRKTMMLCRRFQFIRQALVQAVKQGSLKVLRADLEADKIVRKLPSFIKPGPIVGNVRVVEVGDEFLYRV

SEQ ID NO: 112582 - protein, 476 aa, Oryza sativa
  Clone ID: PAT_MRT4530_16453C.1.pep
MLPPPPLRSVAASGDGWLSLSVSTESTGSGESNKRLKRGGGGGSVEDDGFPLHDEVLLLVFAASSLDLHDLVRCTATCRRWRRLVTGNAEYICRSMLPSSRLIRDLAVGFFHQSHEDESSSSVVPPRFVPLPSASSRFGGGELDRVLDNPGLFKNSRLVASRKGRLVVELRRASRAAALRLVVCNPMTGDMSVLPVLSGKDRPGLYACALLTADDLQDSADPLPPGPAAFRLVVLYKRRSFTACRSYSSDTNAWSTERKLSGVKIGGKRLGDMAAGVTFRGRVFWLVNSVVFVLHLDTLVATTENISWHWRWNGKPCFCLGDPVPNRRLAVSPDGRLCVVQVGRNLRTYNPVINVFARHDSGGCNGSTAQKIRWKVEEAHDVELSHLIPLANVKRVCLRGVCEKSGLIFLAIGADMYAKKPDLALYALDMEKKEARLVPAPPGRCCVRRSSWSFFGYELDRVDYLASLAGGDSTAR

SEQ ID NO: 112583 - protein, 37 aa, Oryza sativa
  Clone ID: PAT_MRT4530_16454C.1.pep
MAELDLKLASGKRWLVCGSGGGKLLRVDGDSSNYSKI

SEQ ID NO: 112584 - protein, 214 aa, Oryza sativa
  Clone ID: PAT_MRT4530_16455C.1.pep
MMGDGKGLGQWKYGVKCPCYSNKLSMVVAGWSWSRRPKLNNDGDTASSLAAITIIKITCEVSSNMDRSGQKSQGVFHPFFLSCPTSILSVFLIHDSTNGIRLPQGVRDRMDYFRRRLLWQEDQGTKFGGISVKMLSYGLFGRLEIELVLTKKLPDDPTDLIFLACHWVETWAILEKQKANRRNLLLGAKLIRRVTSEVYQSRFGWRINNRRLEN

SEQ ID NO: 112585 - protein, 189 aa, Oryza sativa
  Clone ID: PAT_MRT4530_16456C.1.pep
TYTKKYGSLTLPKTNNLDGPGVGGASKHRYIAGYAGTAMRGEAARHNAGQQEHSYEHCARRQAVAQENDTPRAEQNTVRSNLQPEEKPTQQSQAIGIAGFFNLFGKIWGPIKKRNCRHRSRAENQPATGSPADPSRWQGQRSHPKEGDRTSQAKGKLRTCINLCLKSDSSLSFICIGHITPCDPEAIRG

SEQ ID NO: 112586 - protein, 104 aa, Oryza sativa
  unsure (1)..(104): unsure at all Xaa locations
  Clone ID: PAT_MRT4530_16457C.1.pep
GLQNHRWVRDIQGALSKRAIGDQFDLWDAIQDVELRPEEWDRTIWKMAVDGQFSVSSAYSIHYQNESXCGKLIWQTKVLVRVKLFMWLAEKWACLPADNLLKRG

SEQ ID NO: 112587 - protein, 363 aa, Oryza sativa
  unsure (1)..(363): unsure at all Xaa locations
  Clone ID: PAT_MRT4530_16458C.1.pep
MSRTSTTRAPLPLCHHPPSSSCSGPPPCYERXPARGQAGPHGRRLRXDHPTPPPPPPLPGAAPAPPRCAGLFSPSTQRRRTAFRPPPSPRPVPPQPVAGRARGNTLSPSLALAAHPRLLHGPQAAAVTSARVARPVAGRDGAAGRIPLGRIEQADWLRQTCRGAGQVLAKQVTSLDSVTRDYFVIFPIMVNRMSGGQSRAHRLGHIDGNWPEVKLINDYAMFMGYLSMAVTGTGFLVLTWSTVVLLGGFVSTLSTKDFWSLTVITLVQTRNRERGPLPSLGCGVCVGAAGGALEQRTAAPGEVGGGCGARQQPLHRELHSRASISFSISLWSTRRATELPCRRQARDGREDSGADRREGGSGA

SEQ ID NO: 112588 - protein, 50 aa, Oryza sativa
  Clone ID: PAT_MRT4530_16459C.1.pep
MIKKAKAKDGPQVGQKTRKGAQRREAPPPDTLGGLAYAKAVGNRGLKIGR

SEQ ID NO: 112589 - protein, 267 aa, Oryza sativa
  Clone ID: PAT_MRT4530_1645C.1.pep
MAGVMAPLMLHGRVAIVTGGAGGIGSAVSRHLASLGARVAVAYIGDPAPANELVSGINDGYLRAEEEEKRGPRAIAVEADVSDAARVRALFDAAAAAFGGEIHILVTTAAVLDFAYPALAETSEAAYDAMFGVNARGTFLCCREAANRLARGGRGRIVTFSSSGVGSLRPGYAAYAASKAAVEVMTKILARELRGTGITANAVAPGSTGTPMMYTGKTEEDMARYIAEAPLGRLGMPDDIAPLVGFLASDAGGWINAQVIRCNGGTI

SEQ ID NO: 112590 - protein, 32 aa, Oryza sativa
  Clone ID: PAT_MRT4530_16460C.1.pep
QRTPAEIDHLAKSMAPLAEKVFQSMDWRWPSW

SEQ ID NO: 112591 - protein, 268 aa, Oryza sativa
  Clone ID: PAT_MRT4530_16461C.1.pep
MAFSISKKAAVAALFSFLVVTCVAGARPGNFSASDFTADPNWEVARATWYGAPTGAGPDDDGGACGFKNTNQYPFSSMTSCGNEPIFKDGKGCGSCYQIRCVNHPACSGNPETVIITDMNYYPVSKYHFDLSGTAFGAMAKPGQNDQLRHAGIIDIQFKRVPCNFPGLKVTFHVEEGSNPVYFAVLVEYEDGDGDVVQVDLMEANSQSWTPMRESWGSIWRLDSNHRLTAPFSLRITNESGKQLVASQVIPANWAPMAVYRSFVQYSS

SEQ ID NO: 112592 - protein, 52 aa, Oryza sativa
  Clone ID: PAT_MRT4530_16462C.1.pep
EQGKVSGNNHLVEMGENYNSKEALQYSSKSLTCPFFFTGSCETASVIQSLSI

SEQ ID NO: 112593 - protein, 172 aa, Oryza sativa
  unsure (1)..(172): unsure at all Xaa locations
  Clone ID: PAT_MRT4530_16463C.1.pep
MDAPAMLTTKHVPEDVGLRNVAAEGGQGMHRGEEKQHKPVLKVKEKVKINTTAGEEWKDAXPDSAXAGATPGXXXTDKIKSAAAGTTXXGKXLAXXVYKKVPGXGTVLVGKVXQVTQTAGTDTPXFXGGAXGSHSQXNFNXSTTLXSGKPXTGGXXXQDKGVTRLLTTPRAT

SEQ ID NO: 112594 - protein, 105 aa, Oryza sativa
  Clone ID: PAT_MRT4530_16464C.1.pep
WVFLFFWVFFFFFFFFFFFFFFFFFKKPSKGGTKIIFPAAPNWGGKNNLQQGQRGLKTPYWGGPPYRKTKFLGRLEPQQFGPGVERGIPPKRGTRRGRGKHPKWL

SEQ ID NO: 112595 - protein, 279 aa, Oryza sativa
  unsure (1)..(279): unsure at all Xaa locations
  Clone ID: PAT_MRT4530_16465C.1.pep
DPRVRFKDHASAEKKIIAKLKNSSEKSLWLEKEDSIRRGLFDLLQNIVLIRDPEDSTKFYPRFNQEDTSSFNDLDEHSKNILRRLYYDYYFARQENLWRQNALKTLPVLLNSSDMLACGEDLGLIPACVHPVMQELGLIGLRIQRMPSEPNLEFGIPSQYSYMTVCAPSCHDCSTLRAWWEEDGGRRSRFYQTVIGSDDEPPSRCTPEVANFIVKQHFDAPSMWAIFPLQDLLALKDKYTTXPAKEETINDPTNPKHYWRFRLHVTLDFVLDDKDIQAT

SEQ ID NO: 112596 - protein, 946 aa, Oryza sativa
  unsure (1)..(946): unsure at all Xaa locations
  Clone ID: PAT_MRT4530_16466C.1.pep
MTNLSGRKSLNTVTLVFKLPYYTQWGQSLLIAGSEPALGSWNVKQGLSLSPVHQGNELIWSGRVSVATGFTCQYNYYVVDDNKNVLRSESGEKRKLVLPEGVQDGDVVEIRDWWQDASEALFLRSAFKNVIFNGSENAKRELKTTSLNKSLEPEDIVVQFIVSCPRLGAGSTVVVTGSNPQLGRWQTQDGLKLNYVGDSIWKANCLLRKSEFPIKYKYCKISEAGVSSLEFGPNREADVDLSSPKPSRYVLLSDGALRESPWRGAGVAVPIFSIRSNEDLGVGEFLDLKLLVDWAVNSGFHLVQLLPINDTSVHGMWWDSYPYSSLSVFALHPLYLRVQALSDAIPGDIKDEISQAKKQLDKKDVDYEASLASKLSIARKIFKLEKDKVLNSSSFKQFLSENEEWLKPYAAFCFLRDFFETSDHSQWGRFSQFSKEKLDKLVSEGTLHHDVICFHYYIQYHLYMQLSEAAAYARKKKVILKGDLPIGVDRNSVDTWVYPTLFRMNTATGAPPDYFDKNGQNWGFPTYNWEEMSKDNYGWWRARLTQMAKYFTAYRIDHILGFFRIWELPDHAATGLVGKFRPSIALSQEELLSEGLWDFDRMSRPYILQETLEEKFGSFWTVIAANFLNEYKKQHYEFKEDCNTEKKIIAKLKNSSEKSLWLEKEDSIRRGLFDLLQNIVLIRDPEDSTKFYPRFNXKDTSSFNDLDEHSKNILRRLYYDYYFARQENLWRQNALKTLPXLLNSSDMLACGGXINDPTNPKHYWRFRLHVTLDSLLDDKDIQATIKELVTSSGATFPCKXSCHDCSTLRAWWEEDGGRRSRFYQTVIGSDDEPPSRCTPEVANFIVKQHFDAPSMWAIFPLQDLLALKDKYTTRPAKEETINDPTNPKHYWRFRLHVTLDSLLDDKDIQATIKELVTSSGRSFPGKVDGAEESGEKLAKVQLNGKP

SEQ ID NO: 112597 - protein, 103 aa, Oryza sativa
  Clone ID: PAT_MRT4530_16467C.1.pep
IKTIHELNIDDIKRGCSIEKLNTCYIWSQRPNLVGFGIHSYECRLCVTSVAFVLFGCAMNSLNMWFMLPLCVGCCIFLIDFMSGDGTPVINVTQYSCYSCVGS

SEQ ID NO: 112598 - protein, 65 aa, Oryza sativa
  unsure (1)..(65): unsure at all Xaa locations
  Clone ID: PAT_MRT4530_16468C.1.pep
TYRSPFLYKGLCMATILEDXTVQVVHCGIFHSFPVTGTICXSQTTTTIEFLATTPYSLSVGKKKK

SEQ ID NO: 112599 - protein, 693 aa, Oryza sativa
  Clone ID: PAT_MRT4530_16469C.1.pep
MAIEADLLGTSCTLPSWTVASFLLCNINERRIYLLGRMDLDHTHEYIIQQQARTLAILATVLAIIRWRRRKKNRRIPRKYGPLVDRDLIRQTRLDDLYNGTDINCINQLRMRKEVFWKLASNLRDRGLLCDTIHVSVEEQLAMFLHTVGHNLRNRVIGFFVKRSSEIDCIGAIDGTHVPAFVPANIVNRFRGRKSYPTQNVLAAVDFDLRFTYVLAGWEGSAHDSVVLKDALKRSNGIQIPEGKYYLADEGYAARPGILPPFRGVRYHLNEYEGRKAPETPQELFNLRHSSLRTSVERAFGTLKNRFKVLASKPYFPYKVQVKIVIACCVLHNWILDNAHTMDIGESKGKGRGKGKSSNLAAGRAKPINWPLALSEFLLDWYIEKKLQLPPKAVIKKIHHTACTLAINSKYGTTYTVDQVQHHYRRHKENWSLVARHLNESGNGWDETTKMLTLSQATLDALLINDRGILSKPIQFFDKLQELFSGCSADGAFMEDPSSAADFDDEDDEDDKFDFLNDMSTYADTKVPQGEDFDKLESDSDDCKEVAALSAATIQVSSSTNYDLKPNKKNFKRCGKPKTLPQSHNDKCNKTKAKSTAQVHDSDDVDVLINNTLVGIKNTLEKPIQTVAPQDPNIPLWDMLKKIALDPDDKLRVGLHLCKPELQANRSFLISMGQEYLEHWIYKFLSGDDPNLG

SEQ ID NO: 112600 - protein, 1281 aa, Oryza sativa
  unsure (1)..(1281): unsure at all Xaa locations
  Clone ID: PAT_MRT4530_1646C.1.pep
MSNEVNHVGKAPMFNGTNYSTWKIKMSTHLKAMSLHIWSIVDVGFAITGTPLTEIDHRNLQLNAQAMNALSNSLSQEEFDRVSNLETAYEIWNKLAEIHEGTSEYKDAKLHFLKIQYETFSMLPHESVNDMYGRFNVNVNDLKGLGENYTDLEVAQKMLRALPEKYETLVTMLINSDMSRMTPASLLGKINTNDMYKLKKKEMEEASPSKKCIALQAEVEDKGKGKVNEVNEDLEEEIVLLTRRFNDLLGRRNERGRGSNSNRRRNRRPNKTLSNLRCFECGEKGQFASKCPSKDDDGDKSSKKKSGGYKLMKKLKKEGKKIEAFIAEWDSNEESSTSSGSEEEGGDDASSKKKKMAVVAIKEAPSLFAPLCLMAKGSSKVTSLSDSESDDDCDDVSDDELVSMFEELHAYSEKEIVKFKALKKDRASLEVLYEELKASHERLTISHENLKETHDNLLSTTQHGALXDVGIYCDLLDDSATCHIAHVASSSISTSCDDLVDMPRSSSSSCISICDASLVVENNELKEQVAKLNKSLERCFKGXNYRTGGSHWVLDSGCTQHMTSDRAMFTIFKVGGKEQEKVTFGDNSKGKDFKIRKVDTTLFTKIIGDDFFVCQIYVDDIIFGSTNEVFCKEFGDMMSRKFEMSMNGELDFFLGLQIKQLKDGTFVSQTKYIKDLLKRFGLEDAKPIKTPMATNGHLDLDEGGKPVDLKLYRSMIGSLLYLTASRSDIMFSVCMCARFQAAPKECHLVAVKRILRYLNHSSTIGLWYPKGAKFKLVGYSDSDYAGCKVDRKSTSGSCQMLGRSLVSWSSKKQNSVALSTAEAEYVSTVMPPRTRHGRRAPTPDPMSEPEESSGDEYAQSDEEVEANVEGASEEASRDDDSGSGEDEDEGSDDMHIDPSIQFVVNMRNPSQYTILRHHDQFLRPRDTPDPRFHTAFQKSVYEQIYAGKVFAEHKWISWRDINETPEFEGLQDLFKTVCIDRIVTLKQYYNEMTICSIYRRQFRWLLNICLDFGDDLHEEHTHNPLSIDYLSQFYEDEVRYTHGKVAGLRTIPSVVNRIVRATILPRLGNNDDIRGVVWHVIDAIIQGRQFDIVSLMMQEIAISKGTFTQGIYYATYIMRLIQDKLGAAGQNLKKHKQYKPRLQLGAPRAPRPAPSSHPGASSSSAPPPPPGYDPNAFFHLQYAYFGMQPNKYFNPVLGAINTLSESIQRLSTGHEALHEDVRGFCTDVGDLNASVGRLHTRVGTLDSRVQLLESSQAFVYHRRRDAPHPSTSARPPSPPQE

SEQ ID NO: 112601 - protein, 107 aa, Oryza sativa
  Clone ID: PAT_MRT4530_16470C.1.pep
MGMMVGWHGRRCGDRAARVSHETLRPDLPKPCDQSGFRLKVLSSSGQSPMVKAVKPHGEDNGARTAKDGAPWRRLYILGEGCPPKEGDFAILAALAGLWAAFANQAH

SEQ ID NO: 112602 - protein, 112 aa, Oryza sativa
  Clone ID: PAT_MRT4530_16471C.1.pep
ARGRRRRRRRRRRRSRRSGARGRSRCRRRRGRCRRRTGASRTGAPRARGAAACPWCASASPSTTSPASAAPPSPAPRTRAPRIWAREARASSAAGAAPAPAPRGAAGPPPRP

SEQ ID NO: 112603 - protein, 799 aa, Oryza sativa
  unsure (1)..(799): unsure at all Xaa locations
  Clone ID: PAT_MRT4530_16472C.1.pep
MAMTGTAPWRSPLRAPPPTPSRGNNSRPRGLVPAQCRPWPRPSLSSAAVACPRSEEMARLERGSLVVGGRELLERAPPSVALRRPAVVASPGGAAFLGATAPAPSSRHVFSLGTLASGWKWLSLFRFKIWWMIPTVGEDAAGVPAETQMLLLESRSEAGAALYALMLPVLDGGFRASLQGSPENELQFCFESGRFILDLLDSEVFELKRTANFGISVGISEEYSGGLFLGDPEVQTLEAVDAVFINSGDNPFKLMKESIKMLSKIKGTFSHIEDKEIPANLDWFGWCTWDAFYKSVNPVGIEEGLKRFAERLIDLTENDKFRGETCKNLGDHVKKIKEHYGVKYVYIWHALHGYWGGVLTTPDAMKKYNPQLVYPVQSPGNVANLRDIAMDSLEKFGVGIIDPAMIYDFYNDQHSYLSSVGVDGVKVDVQNVMETLGKGFGGRVALTQKYQQALEESIARNFKGNNLICCMSHNTDSIFSSLKSAVARASEDFMPREPTMQTLHIATVAFNSLLLGEIFIPDWDMFHSKHESAEFHGAARALSGGGVYVSDKPGMHDFSVLKKLVLPDGLILRTKHAGRPTRDCLFNDPVMDGKSLLKIWNLNKFSGVIGVFNCQGAGNWTYPVKENAHVPTTVCITGDLSPSDVELLEEIAGDDWNGETAVFAFNSSTPSGSLSRLQKHQTMEVSLSTMTCKIYTIARIKVFGGFVQFAPLGLVNMYNSGGALENVTSTGDCSEITIQIQCRGPGRFGAYSATRPEICSVDEHEVEFKHTDDGFLAFDLSHGSSQDNLRNXEILYRAS

SEQ ID NO: 112604 - protein, 99 aa, Oryza sativa
  unsure (1)..(99): unsure at all Xaa locations
  Clone ID: PAT_MRT4530_16473C.1.pep
MSSTVTPLAKYKLVFLGDQSVGKTSIITRFMYDKFDTTYQATIGIDFLSXTMYLEDRTVRLQLWDTAGQERFRSLIPSYIRDSSVAVVVYDVTNRQSFL

SEQ ID NO: 112605 - protein, 99 aa, Oryza sativa
  Clone ID: PAT_MRT4530_16474C.1.pep
YRGWSCPLQAFLHVQLGVETKENPKHAFPSKETSKPDVTQSDSDLPVRPATHCRSDRPAVRPAHSEETGRLPNFGNLSYFNPKCQIWSHNGWSRQISLQ

SEQ ID NO: 112606 - protein, 374 aa, Oryza sativa
  Clone ID: PAT_MRT4530_16475C.1.pep
MLLRWLARPAERCLGRGGGGGGGGGGDGLLWHAELKPHASGEYSIAVAQANAELEDQGQVVTSPAATFVGVYDGHGFASEQGGMSTDAIKRAFHATEEEFLHMVKRSWLKQPQIASVGSCCLVGAITDNVLYVANLGDSRAVLGRRGPDGREVVAERLSNDHNVAEEEVRKELTEQHPDDSRIVIYTRGVWRIKGIIQVSRSIGDVYLKKPEFARDPIFRQYVCSIPLKRPVMTAEPSIKEHQLRQQDLFLIFASDGLWEQLTDKAAVDIVFKNPRAGIAKRLVRAALTEAARKREMRYTDIKHIERGSRRNFHDDITVVVVYLDHHKHGVRPNLGNRNSFRFTNAPVDIFSGSSEEVDHHPLRLNLAMDGAVG

SEQ ID NO: 112607 - protein, 148 aa, Oryza sativa
  Clone ID: PAT_MRT4530_16476C.1.pep
MLLRWLARPAERCLGRGGGGAGRGGGDGLLWHAGLKPHASGEYSIAVAQANAELEDQGQVVTSPAGTCGGGYSGHGGPEASRFISSRLLPHLHRFASEQGGMSTDAIKRAFHATEEEFLHMVKRSWLKQPQIGSGGSCWLVGAITDNV

SEQ ID NO: 112608 - protein, 53 aa, Oryza sativa
  Clone ID: PAT_MRT4530_16477C.1.pep
MARPKLPCSAVAPAVAAAREDRRRARQVAAVLVRPFAAVGDRRSIVAVVNPKV

SEQ ID NO: 112609 - protein, 68 aa, Oryza sativa
  Clone ID: PAT_MRT4530_16478C.1.pep
VYLRSRLHMPHTPTCYVGPILAVNMRYLPKLTNHLLPCSIPSRRWYLVLNCSSIVVPGEQNKVMHHRV

SEQ ID NO: 112610 - protein, 55 aa, Oryza sativa
  Clone ID: PAT_MRT4530_16479C.1.pep
ESGQVSQWVESVAYAYAFFVRGFSNTSFPSSKHAGLLSVKGFLEIVLACGSYLII

SEQ ID NO: 112611 - protein, 1539 aa, Oryza sativa
  Clone ID: PAT_MRT4530_1647C.1.pep
MSNEVNHVGKAPMFNGTNYSTWKIKMSTHLKAMSFHIWSIVDVGFAITGTPLTEIDHRNLQLNAQAMNALFNSLSQEEFDRVSNLETAYEIWNKLAKIHEGTSEYKDAKLHFLKIQYETFSMLPHESVNDMYGRLNVIVNDLKGLGANYTDLEVAKKMLRALPEKYETLVTMLINSDMSRMTPASLLGKINTNDMYKLKKKEMEEASPSKKCIALQAEVEDKGKVNDVNKNLEEEIALLARRFNDFLGRRKERGKGSNSNRRRNKRPNKTLSNLRCFECGEKGHFASKCPSKDDDGDKSSKKKSGGYKLMKKLKKEGKKIEAFIGEWDSNEESSASSGSKEEDGDDASSKKKKMAVVAIKEAPSLFAPLCLMAKGSSKVTSLSDSESDDDCDDISYDELVSMFEELHAYSEKEIVKFKALKKDHASLEVLYEELKTSHERLTISHEKLKEAHDNLLSTTQHGALIDVGISCDLLDDTLALALVYLFVMPHLLLRTMSLSSKWLSSTRAWRGASRVNYHTGGSHWVLDSGCTQHMTGDRAMFTTFEVGGNEQEKVTFVDNSKRKVIGLGKIAISNDLSIDNVSFVKSLNFNLLSVAQICDLGLSCAFFPQEVIVSSLLDKSCVFKGFRYGNLYFVDFNSSEANLKTCLVAKTSLGWLWHRRLAHVGMNQLSKLSKRDLVVGLKDVKFEKDKLCSACQAGKQVACSHPTKSIMSTSRPLELLHMDLFGPTTYKSIGGNSHCLVIVDDYSRYTWVFFLHDKSIVAELFKKIAKRAQNEFSCTLVKIRSDNGSEFKNTNIEDYCDDLGIKHELSATYSPQQNGVVERKNRTLIEMARTMLDEYGVSDSFWAEAINTACHATNRFYLHRLLKNTSYELIVGRKPNVAYFRVFGCKCYIYRKGVRLTKFESRCDEGFLLGYASNSKAYRVYNKNKGTVEETADVQFDETNGSQEGHENLDDVGDEGLIRAMKNMSFGDVKPIEVEDKPSTSTQDEPSTFATPSQAQVEVEEEKAQDPPIPPRIHTTLSKDHPIDQVLGDISKGVQTLSRVASICEHYSFVSCLEPKHVDEALCDPDWMNAMHEELNNFARNKVWTLVERPRDHNVIGTKWVFRNKQDENGLVVRNKARLVAQGFTQVEGLDFGETFAPVARLEAICILLAFASWFDIKLFQMDVKSAFLNGEIAELVFVEQPPGFEDPKYPNHDFKIGKVDTTLFTKIIGDDFFVCQIYVDDIIFGSTNEVFCKEFGDMMSREFEMSMIGELSFFLGLQIKQLKDGTFVSQTKYIKDLLKRFGLEDAKPIKTPMATNGHLDLDEGGKPVDLKLYRSMIGSLLYLTASRPDIMFSVCMCAWFQAAPKECHLVAVKRILRYLKYSSTIGLWYPKGAKFKLVGYSDSDYAGCKVDRNSTSGSCQMLGRSLVSWSSKKQNSVALSTAEAEYVSAGSCCAQLLWMKQTLLDYGISFTKTPLLCDNDSAIKIANNPVQHSRTKHIDIRHHFLRDHVAKCDIVISHIRTEDQLADIFTKPLDETRFCKLRNELNVIDFSNVA

SEQ ID NO: 112612 - protein, 59 aa, Oryza sativa
  Clone ID: PAT_MRT4530_16480C.1.pep
NRSGSCISSRRTTVNGGAAPAARAEGYDWPDMDGGDDFTRRSTGSGLTSSDIIKICEET

SEQ ID NO: 112613 - protein, 129 aa, Oryza sativa
  Clone ID: PAT_MRT4530_16481C.1.pep
PSSPTSAPPATTTTTTTAPPARSSPMSTRRHPRRATTLALQIPAPSASSSPLAPPASPPRPLRCWLPSSPSLPAASPPRPLRHHPQRMTMMARLLRHMLPSSPPPPPATTGDDDGSHPAAGYPRRRDDD

SEQ ID NO: 112614 - protein, 95 aa, Oryza sativa
  Clone ID: PAT_MRT4530_16482C.1.pep
GRGDRGRGCRGGGGEDGDGEVAGCSAAAATVARGAADGSGGRLGARGAGGGAGGRRGLRRTKAGRRGTPVQGFHMSAELEWWWSIGASAVDSQMV

SEQ ID NO: 112615 - protein, 435 aa, Oryza sativa
  Clone ID: PAT_MRT4530_16483C.1.pep
KEKIRKAKEIVDNALKIREELHQKYLRAEPWLKEQERQRLERNKRFTTEIINQPPDYRGEWDPYVSDDEFGTSFELKRTGWEVEKFALDLARSTVGLESFTGENHLFSCSGTIIEFLNGICSVVTSASLIRCMDKDEQADELKINVWLPSGEKCEGFISNVDLYYNICLVTVHCTSNLPKKSFNDDTGFFDLYGNHSKDVVALGRSCEPWSLKVASGKLIPRRHRFDCEELLVSSCKITKIGVGGPLMDFNGNIVGMNFYDKKETPFLPSFIVLKCLQHFKEFGKVVRPLHGLRVGNLHKESLASLEKICHEFPKVCGVIVEKVEPSAEHSEIKVGDIITHLDGMAFSNAAEFGGILLDRCVTQMLEKQNLSEDCNQMISLKFSVKTRGGISEATTRTINTDKFTPSGLNRWPLPRPIIVRQYARGVLFSEDWYS

SEQ ID NO: 112616 - protein, 146 aa, Oryza sativa
  Clone ID: PAT_MRT4530_16484C.1.pep
GRVGRYNTSTKRYIRTSKAQKKNLHNLGLDKLTHILCHTLWLFSYGVGERISLAYTRKIIDAIHSGELLARSYKKTDVFGLDIPTKVEGVPSELLDPINTWEDKDSYKLTLLKLSDLFKRNFKVFANYKKGGVSDLADEIAAAGPN

SEQ ID NO: 112617 - protein, 99 aa, Oryza sativa
  Clone ID: PAT_MRT4530_16485C.1.pep
MAININYYVFFLDNRIYFVFSFKKGTKSPKSAANCYADRISCTSPPTTNIEPKQKITTATTIGADPTRILTMVMKVATRQMTLPSSQSLDLADGTSTTT

SEQ ID NO: 112618 - protein, 65 aa, Oryza sativa
  Clone ID: PAT_MRT4530_16486C.1.pep
PGARPGTSQLVQSLEGNVPLPDLSPTYQSFNMLALMQDQGFDPYVMSYPMTSPRAGPFFALSGGK

SEQ ID NO: 112619 - protein, 53 aa, Oryza sativa
  unsure (1)..(53): unsure at all Xaa locations
  Clone ID: PAT_MRT4530_16487C.1.pep
GGGPSHRXAADXRAAXLQVNSXLGSXGMALQXLRSDGKXVRWVRGKRNXAAGR

SEQ ID NO: 112620 - protein, 65 aa, Oryza sativa
  Clone ID: PAT_MRT4530_16488C.1.pep
MRRGRRTRMLEGDRFDGDLNGQLLPIRFLHPRGPPASSFSTEWRGPEEVLAEDGGGRRTTTLGDG

SEQ ID NO: 112621 - protein, 241 aa, Oryza sativa
  Clone ID: PAT_MRT4530_16489C.1.pep
GPRAPPPGPVPLPPPLPPRLSPPPLLPAPPPPPPPSSPPPHPALGPPAAFALPPRPPRPLRRPRPAPPPLLVAAPPRAGRARRPSEPAQVLPSSFSLHLCRRRRLRRGRTDAAPVVAVVAVSPPFFSLPFCQRRQPSPFVSLLSVSQRRRPPVTAVLCQHLLRPPPLCPSAPLFPPTQIYGAAPWSAAQFLAGSDSLTGGERRSGRPARMEEADWQKLAVEISIKPVPFKHPGPTSSAHGL

SEQ ID NO: 112622 - protein, 259 aa, Oryza sativa
  unsure (1)..(259): unsure at all Xaa locations
  Clone ID: PAT_MRT4530_1648C.1.pep
RIPIDHFSQFYEEGGRHTYGKVAGLRALPSVINRIVRATILPRCGNNDDIRGVAWHVIDAILDGRRFDVINLMMKEIAISKATIRXGIYYAPYIMRLXQSKLGQIGHNLKEHKEYKPRLQLSTPRAPLVHQPTFDQGASSSAAPPPPPHGYDPSAFFHPQYAYFGMQPNKYFNPVLGAINTLSESIQRLSTGYEALHEDVRGLRTDVGNLNTSVGRLHTTVGVLDSRVQTLESTQAFVYHRRRDAHHPSTSARPPSPPQ

SEQ ID NO: 112623 - protein, 179 aa, Oryza sativa
  Clone ID: PAT_MRT4530_16490C.1.pep
LISGFLLVNRMQVYADGTTALPEWEREASIRQFYGVIFPSLLQLPSGITELDDRKQRRLCLQKFRKVEERVSEVDLERELECGICLEVNAKIVLPDCAHSLCMRCFEDWNTKSKSCPFCRACLKKVNPSSLWLYTDDRDVVDMDTLTRENIRRLFMFISKLPLVVLHVVDLDIYEYRIK

SEQ ID NO: 112624 - protein, 169 aa, Oryza sativa
  unsure (1)..(169): unsure at all Xaa locations
  Clone ID: PAT_MRT4530_16491C.1.pep
LHNHFMQDGVXCDHDLVRRLETRVRARPDQDPAQPPPPQRRASTAPPPPKRDSATPSARALPPARIPPPTAPRRASNHLRPPPTERNATDHLRPPRTHRNGLNSSTPLVGLESRARSIERSNDRGGDRVDIADGDLGIGSGGGFPPPARGVAWRREGRRRRGEASEVVG

SEQ ID NO: 112625 - protein, 326 aa, Oryza sativa
  Clone ID: PAT_MRT4530_16492C.1.pep
MRRRFQDSVKALEADIEHANELASEFLRDYDGAVIQMRMAYSAVAHFLVQWIDCKLAGALGLLKIMIYKVYADGTTALPEWEREASIRQFYGVIFPSLLQLPSGITELDDRKQRRLCLQKFRKVEERVSEVDLERELECGICLEVNAKIVLPDCAHSLCMRCFEDWRQNFVYLNVVFKKERKRLPLPYIGWLCSSGCKVSCKSPALLIEYHNALSTESLTIFMHQDVVHPIKPASRMTLFITAANILLNYVLLLSRNTKSKSCPFCRACLKKVNPSSLWLYTDDRDVVDMDTLTRENIRRLFMFISKLPLVVLHVVDLDIYEYRIK

SEQ ID NO: 112626 - protein, 180 aa, Oryza sativa
  unsure (1)..(180): unsure at all Xaa locations
  Clone ID: PAT_MRT4530_16493C.1.pep
FNLTRRKQVCKKRPVKKGAKKKAKKGEKKVVLKKEKKYVREKTVSKKTPEKKKIKKTHERKSKKTREKMLEKRARKLRFPSSEKKHTRKLRKKCARKKKQKTLKKKQEKKKRXEKLSEKAKNTRKKKNKKKRENNMVFVVGKKKAKKNDRKKLSDRNASFLRNSLRKYSFRRRLKKKKKC

SEQ ID NO: 112627 - protein, 112 aa, Oryza sativa
  Clone ID: PAT_MRT4530_16494C.1.pep
MVRAKTGDGQPPTPDGGGGTFCTHHDWRVGLDICNVRDPVTTTTVGARSGHSDDGARCSPPESSQGGWIRRSTSRPDLVAEHKEAKEDHDMRMSATAADEEAVGSGSIPFAA

SEQ ID NO: 112628 - protein, 92 aa, Oryza sativa
  Clone ID: PAT_MRT4530_16495C.1.pep
MASYRSVVFELFEDVETGQLQACSVLSQLARSRRSIPRDRGDPAAPFRAIERTSARSRTCAATAPDRLGSVLSVYVTEPVPRHRSAQPLQLS

SEQ ID NO: 112629 - protein, 80 aa, Oryza sativa
  Clone ID: PAT_MRT4530_16496C.1.pep
LLYTTCRYDVWLEINLYFIIQMTHHLFPLPPVDYLIKEIIYWPTLFGGCTPWRHKIVLRMHFVVCPATRLLSVPVLFGYF

SEQ ID NO: 112630 - protein, 710 aa, Oryza sativa
  Clone ID: PAT_MRT4530_16497C.1.pep
MAISTWSTRLLLSPSASASSHRPNPTRRLAFPSPISGPGRQAPRAYISAPASGPDAYPSPALDAAAAAADVAAAIASSDAVTWAGVWALLSPHRARIAVSLAALLACTTCTLSMPLFSGRFFETLIGRGSEPLWRLLSKIAVLYTLEPIFTIVFVINMTVIWEKVMARLRSQIFRRILIQKMVFFDRHKVGELTGLLTSDLGTLKSVITGTLCILFTLSTELAPVLGLLMVSVSVLVALFKRSTVPTFKSYGIVQARISDTASETFSAIRTVRSFGGEKRQISMFDNLALAFQNSGTKLGVLKSANESLTRVVVYVSLMALYVLGGSKVNAGKLSVGTMASFIGYTFTLTFAVQGAVNTLGDLRGTFASVERINSILSAEDIDDSLAYGLAKELEDSNGAVHENGTANKHYMSALKSSSSCSNLAWSGDIHLEGVHFSYPLRSDVEILNGLDLTIECGKITALVGPSGAGKSTVVQLLARYYEPTHGRITVAGEDIRVFDKREWSRVVSLVNQDPVLFSVSVGENIAYGLPDDVVSKDEIIKAAKAANAHEFIVSLPQGYDTLVGERGSLLSGGQRQRIAIARALLKNSPILILDEQVWLFLFSQANQWFGYMFVSRETQRTFKTCVRAKIQATSALDTTSERLVQEALNHLMKGRTSLVIAHRLSTVQNAHQIAVCSDGKIAELGTHAELVASGGRYASLVGTQRLAFE

SEQ ID NO: 112631 - protein, 515 aa, Oryza sativa
  Clone ID: PAT_MRT4530_16498C.1.pep
MELSSISASLLLILPLLPLLYFLYLHQDPKKQPRAHGLKSYPVVGTLPHFIKHKNHILEWSAGVLKRSPMHTMSFKALGLTGGVFTANPANVEHMLKTNFGNYVKGEAIITMLEDFLGRGIFNSDGEKWLWQRKATSYEFSKRTLRNFVVDTVQFEVIERLLPLLERAGRDGRTLDVQSVLERFAFDNICRVVFDEDPACLAKDSVASPHIAEFMGACNDAQNAILARFNSPIKSLWRVKRLFNIESERRLREALATIHAYTDRIIRERRERGEARGDDFLSRFAAGDKHSDESLHDVITNLVLAGRETTASALTWFFWLVSGRPDVEDNIVREIRAVRRASSSNGVTSGAAFSPHELRDMHYLHAAITESMRLYPPVSLDTYVCKEEDFLPDGTFVGKGWQVTYCAYAMARVEDIWGTDCEEFRPERWLDEAGVFRPESSFKYPVFHGGPRMCLGKEIAYIQMKSIVSCVFDRFTLRYTGGEGHPGLVTSLALRMEGGLPMQVLLTNRGQAVSC

SEQ ID NO: 112632 - protein, 307 aa, Oryza sativa
  Clone ID: PAT_MRT4530_16499C.1.pep
MGGAVDDGGGGELDVFDAGRCGGGGYELGVAVGRRFGEAIRSRMSGDAVLRRRLLPFASTAPGRALVDALRDANRARKELLPFITEEEDQHHHREDEAAAVAADADDDCSDVLIVGESAAIAAHNEDANVALLGHTYVVKATSPDGSSSFTAYTYAGELPTCAFGFNSNGVRVSSPAMSVGHSYNLMDVRRRRIVNVETASGNRFSVREAAAAPFFHANMYRHLQVNQVQDENSMSRERRAAELSPDTKEKALSLLGDTADDKYPIYMTGPTLYTLCTVLVDLDEATMTIYKGNPKNRDAVRVFRML

SEQ ID NO: 112633 - protein, 1053 aa, Oryza sativa
  unsure (1)..(1053): unsure at all Xaa locations
  Clone ID: PAT_MRT4530_1649C.1.pep
MIAPVVSLLRHACLILIICLGRLMMVALFLDMWVPLYSVVNYHTGGSHWVLDSGCTQHMTGDRAMFTTFEVGRNEQEKVTFGDNSKGKVIGLGKIAISNDLSIDNVSLVKSLNFNLLSVAQICDLSLSCAFFPQEVIVSSLLDKSCVFKGFRYGNLYLVDFNSSEANLKTCLVAKTSLGWLWHRRLAHVGMNQLSKFSKRDLVMGLKDVKFEKDKLCSACQAGKQVACSHPTKSIMSTSKPLELLHMDLFDPTTYKSIGGNSHCLVIVDDYSRYTWVFFLHDKSIVADLFKKFAKRAQNEFSCTLVKIRSNIGSEFKNTNIEDYCDDLGIKHELFATYSPQQNGVVERKIRTLIEMARTMLDEYGVSDSFWAEAINTACHATNRLYXHRVLXKTSYEVIVGRKPNIAYFRVFGCKCYIHRKGVRLTKFESRCDEGFLLGYASKSKAYRVYNKNKGIVEETADVQFDETNGSQEGHENLDDVGDEGLMRVMKNMSIGDVKPIEVEDKPSTSTQDEHLLPLCQXQAQVEVEEEKAQEPPMPPRIHTALSKDHPIDQVLGDITKXVDEALCDPDWMNAMHEELKNFARNKVWTLVERPRDHNVIGTKWVFRNKQDENGLVVRNKARLVAQGFTQVEGLDFGETFAPVARLEAICILLAFASCFDIKLFQMDVKSAFLNDTKYPNHVYKLSKALYGLRQAPRAWYERLRDFLLSKDFKIGKVDITLFTKIIGDDFFVYQIYVDDIIFGSTNEVFCKEFGDMMSREFEMSMIGELSFFLGLQIKQLKNGTFVSQTKYIKDLLKRFGLEDAKPIKTPMATNGHLDLDEGGKPVDLKLYRSMIGSLLYLTVSRPDIMFSVCMCARFQAAPKECHLVAVKRILRYLKHSSTIGLWYPKGAKFKLVGYSDPDYAGCKVDRKSTSSSCQMLGRSLVSWSSKKQNSVALSTAETEYVSAGSCCAQLLWMKQTLLDYGISFTKTPLLCDNDGAIKIANNPVQHSRTKHIDIRHHFLRDHVAKCDIVISHIRTEDQLADIFTKPLDETRFCKLRNELNIIDFSNVA

SEQ ID NO: 112634 - protein, 302 aa, Oryza sativa
  Clone ID: PAT_MRT4530_164C.1.pep
MAAAEAAAAVGKQQQKGGGGRGGGGGGPAPFLTKTNQMMEESAHVLGVFWGKTCPYCLVLIRTETCYDCPSIRSHDLTGANERWRLFMQGFRKVVPDRWEFANGNFRRGEQGLLSGIRRRKATTPQSSKSCGSGVNVAFPPPLPPLPPEPSATTSSGNDRSSSSASSPPRADITSENEQLRKDNQTLTMELARARRHCEELLGFLSRFLDVRQLDLRLLMQEDMRAAAGGVGGEQRVQEHAREEKCVKLFGVLLDDTHGAATRKRARCEEAAASERPIKMIRIGEPWVSVPSSGPARCGGDN

SEQ ID NO: 112635 - protein, 101 aa, Oryza sativa
  Clone ID: PAT_MRT4530_16500C.1.pep
GFKGSAHRGRVAQPCWRRGIRGGASVAGAPFGLVSTSTTALLPRWHGHGASVAGPAMLGYGASHLVARLQQLEECLARPGPLLSPETWSRVSTVHTMSIMV

SEQ ID NO: 112636 - protein, 330 aa, Oryza sativa
  Clone ID: PAT_MRT4530_16501C.1.pep
MGKKGKEAARERREQRRREVTLLRAVPYEPHQRWWDGLAPPPPPPGRAVAVVTGANRGIGYEAARQLATHGLHVVLTSRDAARGRDATEQIRAAAGKPGVSVEWRQLDVTDAASVEGFATWVERTHGGVHVLVNNAGVNFNRGADNSVEFAEQVIETNYFGTKRMIEAMMPLMITSPHGGRIVNVSSRLGRVNGRRNRIGDPSLRERLLNDDHLSEELINEMVMKFLEQTKQDNWSSGNEWPQMYTDYSISKLAVNAYTRLLARRLLDRPEGQKIYINCFCPGWVKTAMTGWEGNISAEEGADTGVWLALVPQEQATIGKFFAERREISF

SEQ ID NO: 112637 - protein, 568 aa, Oryza sativa
  Clone ID: PAT_MRT4530_16502C.1.pep
MTLITLIRDYIDRMLHDIPGMKVLVLDPDTVGMVSVVYSQSDLLRKEVFLVETVDNASSSRESMAHLKAVYFLRPSSDNVQKLRRHLAAPRFAEYHLFFSNVLKIPQIQVLADSDEQEVVQQVQEFYADFCAIDPYHFTLNIRNNHVYMLPMVVDPPGMQSFCDRAVDGIASVFLALKRRPVIRYQRTSDVAKRIAQETARLMYEQESGLFDFRRTENSSLLLVIDRRDDPVTPLLNQWTYQAMVHELIGIENNKVDLREYPNVPKDQKVEVVLSSVQDEFFRANMFENFGDLGMNIKRMVDDFQHLSKTSQNIQSISDMSKFLSNYPEYRKTHGNVTKHVALVSEMSRIVEERKIMLISQTEQELACTSGQAAAFEAVTSLLNNESVSDIDRLRLVLLYALRYEKESPVQLMQLFNKLASRSAKYKSGLVQFLLKQAGVDKRTGDLYGNRDLLNIARNMARGLKGVENVYTQHQPLLFQTMEGIVKARLRDADYPLVGNHFQQNRPQDVVLFIVGGTTYEEARSVALYNAANPGVRFFLGGSVVLNSKRFLDDLGEAQRISKSSSLV

SEQ ID NO: 112638 - protein, 141 aa, Oryza sativa
  unsure (1)..(141): unsure at all Xaa locations
  Clone ID: PAT_MRT4530_16503C.1.pep
MQLVQFLLKQAGVDKRTGDLYGNRDLLNIARNMARGLKGVENVYTQHQPLLFQTMEGIVKARLRDADYPLVGNHFQQNXWPQDVVLFIVGGTTYEEARSVAFXNAANPGVXVFLGGSVVLNSKSFLXDLGEAQRIRNDSLV

SEQ ID NO: 112639 - protein, 557 aa, Oryza sativa
  Clone ID: PAT_MRT4530_16504C.1.pep
LSEVAKKKKLPQISCVAKAAVAAEKTVVKAEEEEEGGGEYDAIVVGSGIGGMVAATQLAAKGARVLVLEKYVIPGGSSGYYRRDGFTFDVGSSVMFGFSDKGNLNLITQALEAVGHKMEVIPDPSTVHFHLPGDLSVLVHREYDDFVTELVNKFPHEKEGILKFYGTCWKIFNSLNSLELKSLEEPLYLFGQFFQKPLECLTLAYYLPQNAGDIARKFIKDQQLLSFIDAECFIVSTVNALQTPMINARQVLCDRHFGGINYPVGGVGGIAMSLADGLVDKGSEIRYKANVTNVILENGKAVGVRLSNGKEFFAKTVISNATRWDTFGKLLKVEELPEEEKNFQKNYVKAPSFLSIHMGVKASVLPADTDCHHFVLEDDWANLEKPYGSIFLSIPTVLDPSLAPEGHHILHIFTTAGIEDWEGLSRKDYEKKKELVATEIIKRLEKKLFPGLQDSIVLKEVGSPKTHRRFLARNDGTYGPMPRGKPKGLLAMPFNTTSIDGLYCVGDSCFPGQGVIAVAFSGIMCAHRVAADIGLEQRSPVLDAGLLGLLRWLRTLA

SEQ ID NO: 112640 - protein, 129 aa, Oryza sativa
  Clone ID: PAT_MRT4530_16505C.1.pep
MASLTDARREWGSGGEPRRRRGGRGGPWPHEPNGGDGASATTRDGVSVNFDTPQFVSDGGEDHLRVGARRCSEATPVSARVRASRAAADGGGDLFHDLPRRPQGVWARHATTPSPSRPAAIPLYAGPTS

SEQ ID NO: 112641 - protein, 52 aa, Oryza sativa
  Clone ID: PAT_MRT4530_16506C.1.pep
YYKKLLQCIAATQLLAIYLFIYVGILYPHCPLMRIPPHYKPFWALSDWRGVP

SEQ ID NO: 112642 - protein, 59 aa, Oryza sativa
  Clone ID: PAT_MRT4530_16507C.1.pep
PICSWLIRRSVVYVWFVSTLRLRFCVYSVYLCLLFGMLYGVVSPSLASSLDMFPLCCAF

SEQ ID NO: 112643 - protein, 107 aa, Oryza sativa
  Clone ID: PAT_MRT4530_16508C.1.pep
MMRKQSRSPCSSSSSAAVVSLCKVLLLVLALICTLETVSVEGGRVAAAALVGGGVPLNPRYPAIPEEPYIGRRGDPYTGRGGEPYTRPGRGCTVAYGCYGGPPAAKP

SEQ ID NO: 112644 - protein, 49 aa, Oryza sativa
  unsure (1)..(49): unsure at all Xaa locations
  Clone ID: PAT_MRT4530_16509C.1.pep
MLGPDCFLPKKKKKKKKKKKKKKXKKKXKKXKKXKKXXKKXKKXXKKGR

SEQ ID NO: 112645 - protein, 1698 aa, Oryza sativa
  unsure (1)..(1698): unsure at all Xaa locations
  Clone ID: PAT_MRT4530_1650C.1.pep
MSNEVNHVGKAPMFNGTNYSTWKIKMSTHLKAMSFHIWSIVDVGFAITGTPLTEIDHRNLQLNAQAMNALFNSLSQEEFDRVSNLETAYEIWNKLAEIHEGTSEYKDAKLHFLKIQYETFSMLPHESVNDMYGRLNVIVNDLKGLGANYTDLEVAQKMLRALPEKYETLVTMLINSDMSRMTPASLLGKINTNDMYKLKKKEMEEASPSKKCIALQAEVEDKGKGKVNEVNENLEEEIALLARRFNDFLGRRKERGKGSNSNRRRNRRPNKTLSNLRCFECGEKGYFASKCPSKDDDGDKSSKKKSGGYKLMKKLKKEGKKIEAFIGEWDSNEESSASSGSEEEDSDNASSKKKKMAVVAIKEAPSLFAPLCLMAKGSSKVTSLSDSESDDDCDDVSYDELVSMFEELHAYSEKEIVKFKALKKDHAFLEVLYEELKTSHERLTISHEKLKEAHDNLLSTTQHGALIDVGISCDLLDDSTTCHIAHVASSSISTSCDDLVDMSSSSSSSCVSICDASLVVENNELKEQVAKLNKSLERCFKGKNTLDKILSEQRCILNKEGLGFIPKKGKKPSHRATRFVKSNGKYCSKCREVGHLVNDCPGGKPPKTCMFDSHYMLRKAHDGSIVARYVGSPILGGKKNTIWVPKALVSNLQGPKQVWIILTILGXFFLHDKSIVAELFKKFAKRAQNEFSCTLVKIRSDNGSEFKNSNIEDYCDDLGIKHELSATYSPQQNGVVERKNRTLIEMARTMLDEYGVSDSFWAEAINIACHATNRLYLYRLLKKTSYELIVGRKPNVAYFRVFGCKCYIYRKGVRLTKFESRCDEGFLLGYASNSKAYRVYNKNKGDEGLMRAMKNMSIGDVKPIEVEDKPSTSTQDEPSTSASPSQAQVEVEEEKAQDPPIPPRIHTALSKDHPIDQVLGDISKGVQTRSRVASICEHYSFVSCLEPKHVDEALCDPDWMNAMHEELNNFARNKVWTLVERPRDHNVIGTKWIFRNKQDENGLVVRNKARLVAQGFTQVEGLDFGETFAPVARLEAIRILLAFASYFDIKLFQMDVKSAFLNGEIAELVFVEQPPGFEDPENPNHVYKLSKALYGLKQAPRAWYERLRDFLLSKDFKIGKVDTTLFTKIIGDDFFVCQIYVDDIIFGSTNEVFCKEFGDMMSREFEMSMIGELSFFLGLQIKQLKDGTFVSQTKYIKDLLKRFGLEDAKPIKTPMATNGHLDLDEGGKPVDLKLYRSMIGSLLYLTASRPDIMFSVCMCARFQAAPKECHLVAYPKGAKFKLVGYSDSDYAGCKVDRKSTSGSCQMLAMPPHTRHGRREPTPDPVSKNEESSGDEYVQSDEDNMENVEGNELDVSDDGDDNGSGNSEDDEASDDGSPLDSTIQFVLNLRNAQQYTILHHHDQFRRPNDCNDPRFHTRFQKSVYEQVYANKAFAEHKWISWRHIGETPEFENLQEMFRTVGIDRIVTMKQPFDEDLIRQFYATVWVSGDCDAMKWMSGTLRCSINRREFKELLHIRFNNGDDLHDEHTHNPFPIDHFSQFYEEGGGYTYGKVAGLRALPSVINRRVRATILPRCGNNDDIRGVAWHVIDAIMDGRRFDVINLMMKEIAISKGTIGQGIYYAPYIMRLPPPRRLVEKLPGDLSEKIVEEARCQFVSGLEFTTFGVKEELPXVIKAWVVLSVGRLPPCPPLDEGGVRRLRG

SEQ ID NO: 112646 - protein, 451 aa, Oryza sativa
  Clone ID: PAT_MRT4530_16510C.1.pep
MLAAVRRRRLLLLPLPLRFFSAAAAAASTTTDPKVVSYLISSCGLTPAAAARAAATSPWLPLASPDFASNADAVVALLRRYGFTDADISATVRAFSRILASDPARTLQPKLDYLRSVGITAPLLPRVVSLSPVILHRSIESHLAPLIASLREVLGSDSRIVTALRQMPFAMRCSPKATFLRTLPVLRDVHGLTPSELSKLVASQPGVILLGPGRAGEIVQAVKDAGVEPGSPMFVYIFAAFSKLKAPTLENKFAIYRSLGFGKDDIAVMLRRLPNAAGISEERLKRTVGFLTGKAGLRREDIVAYPNLLSRSLDSHARRCAVLAVLRREGKPEGQHRVPHVLVASLARFMKAYVRRYEGEVPDVLRAINGEIPFEGFGLGELEKKKPQRQEKIRSGAWPCLEEQPNMRTCTFLPRAGRACHMVQVNCVCKLAKPHVRYSFPGLSTCMQKNI

SEQ ID NO: 112647 - protein, 262 aa, Oryza sativa
  Clone ID: PAT_MRT4530_16511C.1.pep
MARACSPALRLQLPPNPPITPQLPSCRTHSAGARCRGFAAAHSQPPAAGRPDEPAAEPSPKQPEIAQTQNLRRSRRRGPGSRQSLVSVGTSCGGGDQWSSDFDLTLRQLHLDDLIEDGQNDDADVLVHLLVQQHTQFGMSIKGRVVTSFSKICDSCSSPYCAKIDEQFNLTVLSSTRKEQSEMPDIGDSDPSVIYVRPGVEVDLDSVIQETIRLTASAKSSCSEACEKSTVVWQYGGNQKKRYSQRWSKLLDLKKTLDKAAN

SEQ ID NO: 112648 - protein, 140 aa, Oryza sativa
  Clone ID: PAT_MRT4530_16512C.1.pep
MAPSLLAAAASPFLLHGAAAASGSRRPLVAAAATGRRAASSLRVAALKYDPSKVAPQSDRVLVRLEQIPEKSVGGVLLPKSAVKFERYLMGEILSVGADVNEVEAGKKVLFSDINAYEVDLGTDEKHCFCRESDLLAVVE

SEQ ID NO: 112649 - protein, 152 aa, Oryza sativa
  Clone ID: PAT_MRT4530_16513C.1.pep
MAPSLLAAAASPFLLHGAAAASGSRRPLVAAAATGRRAASSLRVAALKYDPSKVAPQSDRVLVRLEQIPERESKHLGLGGMLKSVGGVLLPKSAVKFERYLMGEILSVGADVNEVEAGKKVLFSDINAYEVDLGTDEKHCFCRESDLLAVVE

SEQ ID NO: 112650 - protein, 85 aa, Oryza sativa
  Clone ID: PAT_MRT4530_16514C.1.pep
FKRNQTNLKKRGFYKQIFFGGTNKKTNFTIGEKTFRAQTKQVRGGKRKPTNDFGNFFRWDGPLKKGGQSPFWAVRRLAGSYLNRP

SEQ ID NO: 112651 - protein, 90 aa, Oryza sativa
  Clone ID: PAT_MRT4530_16515C.1.pep
RLRKTLRERAKAEAEKESLEQQIKFLNARPSFVPHPPVIPASAFTAPQGQAAGQKLMMPVIGYPGFPMWQFMPPSDVDTTDDTKSCPPVA

SEQ ID NO: 112652 - protein, 548 aa, Oryza sativa
  Clone ID: PAT_MRT4530_16516C.1.pep
MEMELPSWASVLVIVLAAVVFLLATILRHGRRAYRLPPGPNPWPIIGNLNLIGALPHRSIHELSKRYGPLMQLRFGSFPVVVGSSAEMARFFLKSHDIVFTDRPRTAAGKHTTYNYTDILWSPYGAYWRQARKMCVTELFSARRLESFEHIRGEEVRALLRDLHGAAAPVLLRDYLSTATLGVISRMVLGKKYVGVEGASAGNGGGGEGTSPAATPEEFKMMMDELFLLSGVLNIGDFIPWLDWLDLQGYIRRMKRVGKKLDRFMEHVLDEHDKVRRQQGDRFAARDLVDVLLQLADDPNLEVQLRRDNVKALTQLLYSGDRPFHGTRCKLALPYVVQDLIAGGTDTSAITVEWAISELLRKPEILAKATEELDRVVGRGRLVTETDMTSLPYVEAIVKETMRVHPVAPLLAPHVAREDASVGGYDIPAGTRVLVNVWTIARDPALWDSPEEFMPERFIGSKIDVKGQDFQLLPFGSGRRLCPGHSLGLKVIQLSLASLLHGFEWRLPDGVSAGELSMEEVFGLSTPRKVPLEVVVKPKLPAHLYTGP

SEQ ID NO: 112653 - protein, 120 aa, Oryza sativa
  Clone ID: PAT_MRT4530_16517C.1.pep
MPFTGQLSLVMSMIGMKREVGLTEGYRHDRNGAGEAAGVLGWRRAISSSARSVESLLTTKFPSALHVPAVHPRPQPRHQVAQVAVRDVERNHVMWKGGRPPDRTLATREDFMVDLAQLVA

SEQ ID NO: 112654 - protein, 99 aa, Oryza sativa
  unsure (1)..(99): unsure at all Xaa locations
  Clone ID: PAT_MRT4530_16518C.1.pep
VPANTTRMNXDYISNPQNYGFTNVQVACCGQGPYNGIGLCTAASNVCDDREAFAFWDAFHPTEKANRIVVGQFMHGSTEYMHPMNLSTILAVDDEERPL

SEQ ID NO: 112655 - protein, 95 aa, Oryza sativa
  unsure (1)..(95): unsure at all Xaa locations
  Clone ID: PAT_MRT4530_16519C.1.pep
PHGELXFFXGLWCWVIXLGXLSXLPWVNDDXRXFXVPWANFXLXQXVIXRXEXXCLXLQXVCXXSVIFXRNIXIXLYXFQFVKKKKKKKKKKKKK

SEQ ID NO: 112656 - protein, 147 aa, Oryza sativa
  unsure (1)..(147): unsure at all Xaa locations
  Clone ID: PAT_MRT4530_1651C.1.pep
KCKLHKCKXDNQMXKGDQKFFTEVRKLAGFLLPVEASPTPPLNHEATARPLXQGVSKAGAGPRRGLPKPRSLGVVLSSLRRWCRSDRALKLAVVGLSLGPTASTGQTDMGWPVRPASARLDRHQLGLTEYGSGGSGLAIPEHAIPAI

SEQ ID NO: 112657 - protein, 52 aa, Oryza sativa
  Clone ID: PAT_MRT4530_16520C.1.pep
MALTSPASRLDFPEHHGMGGGVLRSLPHGMGWAMLRGPRSGLVSSINVRAAQ

SEQ ID NO: 112658 - protein, 68 aa, Oryza sativa
  unsure (1)..(68): unsure at all Xaa locations
  Clone ID: PAT_MRT4530_16521C.1.pep
WHSPFSPALLTPKGPAPFPFPPFSPPCFATGPPPVPPLYPPGXGGFPPRGPVPLAPSLAPILCFSSLS

SEQ ID NO: 112659 - protein, 78 aa, Oryza sativa
  Clone ID: PAT_MRT4530_16522C.1.pep
ARGFFWQEEIFPFFQNPPLPKGGAPVQKGSLSLPEQVREKFGKIPPFFFKLPNPMVPWIKAWDKFTPPPAAVENGKAK

SEQ ID NO: 112660 - protein, 60 aa, Oryza sativa
  Clone ID: PAT_MRT4530_16523C.1.pep
TMNTWTGFLPYQLLQALEKGYNVHRRAYRYLQEAITESMHMENKLIHITLITFATIREAT

SEQ ID NO: 112661 - protein, 43 aa, Oryza sativa
  Clone ID: PAT_MRT4530_16524C.1.pep
PAIQNFSETAESLGSDDYVLISLTLFHYALDDQEPYIIVPPPK

SEQ ID NO: 112662 - protein, 80 aa, Oryza sativa
  Clone ID: PAT_MRT4530_16525C.1.pep
MAPERQIGRFRVAIRFVFGVAVAVVVAMAAVLTAGSMAAAAPNGLTYKGFIPNQPVCARSCVPGRSNLPQRGCLKIYRCR

SEQ ID NO: 112663 - protein, 278 aa, Oryza sativa
  Clone ID: PAT_MRT4530_16526C.1.pep
MVEAMNSVAKLDEGLTKEERNLLSVGYKNLIGAKRAAMRIIGSIELKEETKGKESHVRQTAEYRRKVEAEMDKICCDVINIIDKKGDYYRYLAEFKTGTEKIEVSELSLNAYEACDPFFIFNLFLFSQVTCFIEFTIYQVLVVYTASKTAQTDLTPTDPIRLGLALNISVFYCEIMNSPDKACQLAKNAFDEAVAELPSLSEENYKDSTLIMQLLRDNLALWNSDMADDADDIRERTDTTGAKGDPAACQVRIDTCCHLTYESSPARYVCDHVGFLAL

SEQ ID NO: 112664 - protein, 92 aa, Oryza sativa
  Clone ID: PAT_MRT4530_16527C.1.pep
PPGSFWNRVSREFPPRSNSGPVQPPKGFCARGGSRKRGPGFPGLIFPARGPGVGPPDVSRDGERPYGLRPVQPSAPGRFLCLPHFWGGHGLN

SEQ ID NO: 112665 - protein, 49 aa, Oryza sativa
  Clone ID: PAT_MRT4530_16529C.1.pep
RNTIHFFYCRRTYQISSRYISCAYIAGDPISHILTQRTLSYFYNHNRSA

SEQ ID NO: 112666 - protein, 148 aa, Oryza sativa
  Clone ID: PAT_MRT4530_1652C.1.pep
RNKPDAHDPINGPQSSVGNDSMRNRGHTANRSSRRETAAGAHTIGRSQVATYVYAGRSGRTGAPEARIQGHTCHKHKRYRAVRSGNGRPVPPSNGHRRRHRSQEDQEERGRQRQAATTLSNPFLAYTLCLHHGGENTRADARGRCAEM

SEQ ID NO: 112667 - protein, 82 aa, Oryza sativa
  unsure (1)..(82): unsure at all Xaa locations
  Clone ID: PAT_MRT4530_16530C.1.pep
LGTNASKLSLHQSSDPQYQHPYHKSSCTGRHHHPFPLHGHQGAARLQLVPHLQVVATAAAVLAASPPPSPFPPEASPFVXDX

SEQ ID NO: 112668 - protein, 77 aa, Oryza sativa
  unsure (1)..(77): unsure at all Xaa locations
  Clone ID: PAT_MRT4530_16531C.1.pep
HGYLGNPAYYTTIDSNQTSIQSYKPRLAHAILITSQQNIIPKCLISRRXLDGLEPSGLVPKKKKKILETSSLSLPRA

SEQ ID NO: 112669 - protein, 113 aa, Oryza sativa
  unsure (1)..(113): unsure at all Xaa locations
  Clone ID: PAT_MRT4530_16532C.1.pep
WEGDLLGXGGTGQIHAGRPDLAVGQPAAGLSDAAAVSGSGGSGVEXLAAAEETTRSAPGXAGQQPAAMSGGGDGEGGEVMAALDDGEKVREDGEIAAGMEGQQRLRWWRPSPW

SEQ ID NO: 112670 - protein, 69 aa, Oryza sativa
  unsure (1)..(69): unsure at all Xaa locations
  Clone ID: PAT_MRT4530_16533C.1.pep
RSDLTTTSLPTFTYYGNFGPFDGRHFXTDGLQPASTTPVCLCTALTAVPTTCLCNIACHCTHPFQLLLC

SEQ ID NO: 112671 - protein, 303 aa, Oryza sativa
  unsure (1)..(303): unsure at all Xaa locations
  Clone ID: PAT_MRT4530_16534C.1.pep
WSSRRRCPPRRRRRRRKRTSDSTARRSAPSRRGWRRLAPTRSSPPTPWTPTRSWPRRXRRHRRPTRSSSTTSPHPPAPPTRSTSSSTSPARPPARRAPPPYTRSSTAASATGTAPTTTWPSSATTTTTSSPARRTHLALPPPPCRSTGKRSRGSRSRRASSPPAQPXRDVGQRWRGGRRRLRLRRPPRQERAGARTDDGRRTLRQGEDPAAQATSGSARRRQRRVIATVTDLQVADVVSQTTRQGRFRRXTLIRSPPPWRRQPRAPPLSAPAPKTPPTPEQPPRPRSQTPSPSRRRAAFLRRR

SEQ ID NO: 112672 - protein, 206 aa, Oryza sativa
  unsure (1)..(206): unsure at all Xaa locations
  Clone ID: PAT_MRT4530_16535C.1.pep
VRSRPKPPPSAIXLLPGVNRANSCRTVRLKINGGFPSHNSNHSSPSRPFSPSLPPRVAPGLAPTCRQPISLAVKSIFHRILSPNRSPAPSFTSPHQADHRRPRAALFFAAEKFFRPQFFISAYLAARPSTQQINPSAAARRRRRTLVPSPPRPQPLSPSIAAFGERPEVXEEEKRERLTGLEDSSDSIDNINQPQDIEQGKLPYTF

SEQ ID NO: 112673 - protein, 129 aa, Oryza sativa
  Clone ID: PAT_MRT4530_16536C.1.pep
MNGIVTSIPSTIGPHKRTPTRNHRLRRRMMTRPMMRTRAAEEVVEAEVTKVGAEAKAEERASIAMVMAAMAASTSDTVEEEGMAGARAGAKGGPCAVEVPERARCAVVSESATSTQPRHMRAALMQPSC

SEQ ID NO: 112674 - protein, 150 aa, Oryza sativa
  Clone ID: PAT_MRT4530_16537C.1.pep
MAGGRLLPSTSGSRQPSMAGLDGGGAPPAACDPNNLPAAIVLVFPGGEDPPEQGRVPAAGPAPALAKAAAVSAGGRAVLAGQVDAWVKEAERVVLGCTSSRWPCRFVRCDRHGEQLSVVRMNLDEAYDRILPVVAQIDTAHRLHHLLQLQ

SEQ ID NO: 112675 - protein, 175 aa, Oryza sativa
  Clone ID: PAT_MRT4530_16538C.1.pep
MGSIGNGRNGSEVGIQIPAMGNKEVLERPAIPRWPRLGVVMVATRAVALVMAVLSMALMISAKQRGSLKIFGIEIPLYANWSFSDSLEYLVGMSAVSAAYCLAQLLLTAHKAVKNAPVVQSRNYAWLLFTGDQIFAYAMMSAGSAAAAVANLNRTGIRHTALPNFCKPLPRFCDL

SEQ ID NO: 112676 - protein, 52 aa, Oryza sativa
  Clone ID: PAT_MRT4530_16539C.1.pep
MVSPPVLTLDYYFNYDGMCRMLNDGLDGRRKNWIVMIEDINAEEQDINAEEQ

SEQ ID NO: 112677 - protein, 1376 aa, Oryza sativa
  unsure (1)..(1376): unsure at all Xaa locations
  Clone ID: PAT_MRT4530_1653C.1.pep
MRAQVSTRMPSFISSRSNMRHSPCCLMXSVNDMYGRLNVIVNDLKGLGANYTDLEVAQKMLRALPEKYETLVTMLINSDKSRMTPASLLGKINTNDMYKLKKKEMEEASPSKKCIALQAEVEDKGKGKVNEANEDLEEEIALLARRFNDLLGRRKERGRGSNSNRRRNRRPNKTLSNLRCFECGEKGHFASKCPSKDDDGDKSSKKKSGGYKLMKKLKNSASSGSEEEGGDDASSKKKKMAVVAIKEALSLFAPLCLMAKGSSKVTSLSDSESNDNCNDVSYDELVSMFEELHAYSEKKIVKFMALKKDHASLEVLYEELKTSHERLTISPEKLKEAHDNLLSTTQHEALIDVGISCDLLDDSATCHIAHVASSSISTSCDDLVDMSSSRSSSCVSICDVSLVVENNELKEQVAKLNKSLERCFKGKNTLDKILSEQWCILNKEGLGFIPKKGKKPSHCATRFVKSNGRLMMVALLLDMWVPLYSVVNYRTGGSHWVLDSGCTQHXDRAMFTTFEVGGNEQEKVTFGDNSKGKVIGLGKIAISNDLSIDNVSLVKSLNFNLLSVAQICDLGLSCAFFPQEVIVSSLLDKSCVFKGFRYGNLYLVDFNSSEANLKTCLVAKTSLGWLXHRRLAHVGMNQLSKLSKRDLVVGLKDVKFEKYKLCSACQAGKQIACSHPTKSIMSTSRLLELLHMDLFGPTTYKSIGGNSHCLVIVDDYSRYTWVFFLHVKSIVAELFKKFXKRAQNKFNCTLVKIRSDNGSEFKNTNIEDYCDDLGYASNSKVYRVYNKNKGIVEETADVQFDETNGSQEGHENLDDVGDEGLMRAMKNMSIGDVKPIEVEDKPSTSTQDEPSTSAMPSQAXVEVEEEKAQDPPMPLRIHTALSKDHPIDQVLGDISKGVQTRSRVASICELYSFVSCLEPKHVDEAPCDPDWMNAMHEELNNFARNKVWTLVERPRDHNVIGTKWVFRNKQDENGLVVRNKVRLVAQGFTQVEGLDFGETFAPVARLEDIRILLTFASCFDIKLFQIDVKSAFLNDFKIGKVDTTIFTKIIGDDFFVCQIYVDDIIFGSTNEVFCKEFGDMMSREFEMSMIRELSFFLGLQIKQLKDGTFVSQTKYIKDLLKRFSLEDAKPIKTPMATNGHFDLDEGGKPVDLKLYRSMIGSLLYLTASRPDIMFSVCMCARFQAAPKECHLVAVKRILRYLKHSCTIGLWYPKGAKFKLVGYSDSDYAGCKVDRKSTSGSCQMLGRSLVSWSSKKQNSVDLSTAEAEYVSAGSYCAQLLWMKQTLLDYGISFTKTTLLCDNDSAIKIANNPVQHSRTKHIDIRHHFLRHHVAKCDIVISHIRTEDQLADIFTKPLDETHFCKLRNELNVIDFSNVA

SEQ ID NO: 112678 - protein, 134 aa, Oryza sativa
  Clone ID: PAT_MRT4530_16540C.1.pep
WRPPSRTPSASSSKPPTSASPTATSRAARCTPTWPPPSSPPRPRPSARRPPSRSTPPPPPPPPRTRPRPTTTPSSASSSAPPVNRTPSPPTQSGSSTRRSAPCSPPPRTPAPPWPPTSSSTRPCRRSRTSRRAT

SEQ ID NO: 112679 - protein, 507 aa, Oryza sativa
  Clone ID: PAT_MRT4530_16541C.1.pep
MATDFFWSYTDEPHATRRREILAKHPQIKELFGPDPLAFLKIAAVVSLQLWTATLLRDASWVKILTVAYFFGSFLNHNLFLAIHELSHNLAFTTPSYNRWLGIFANLPIGVPMSITFQKYHLEHHRFQGVDGIDMDIPSQAEAHAVKNTLSKSVWVVFQLFFYALRPLFLKPKPPGLWEFTNLIIQIALDASMVVSLIPLLVSSPALALALALAWADPHTSRERERADAPPFVLLLPPRRGEHIIRRRRRSPSILASDQGRRRVRPAASAASWGVLCLIACPLFDLQRANGDVNRAGDLLTELEHPMAKSNEVDSSVGTIHPPSGKEKPPMVELPEYMRDDFNGKVDKSDSAPKRETLNNRDIEEFLFSMLGEGFKLSMDMIREVLGSCGYDIKKDAAVECSSTKGSCLESQSTFRFLLLLFIIELVAHNEEDYQNYRRAAKQHWDMMKQYYEKAVDAFREGNQKEVEYLLGEVMKYLEKKSIVWTEEESNPGTILIPINQKQDQQD

SEQ ID NO: 112680 - protein, 159 aa, Oryza sativa
  Clone ID: PAT_MRT4530_16542C.1.pep
MAATADPRAKLPAATSTHHLEPWGQPSPPPPTPFDGGIEELWVKLMAASGRCNEAVEPATADTVAPNRLHVVGGGGAHAVLVPTPESVPFLVALTPEEIEEDIYAPSSPSLPRIAVAIIWTSSSSSPDTSNLPGQSGGITPVSNATSISFSMLPILEQV

SEQ ID NO: 112681 - protein, 41 aa, Oryza sativa
  Clone ID: PAT_MRT4530_16543C.1.pep
MRSGLHKLLPANHTQSGGSGVTPSRLGVLNLQEPKTESKVL

SEQ ID NO: 112682 - protein, 212 aa, Oryza sativa
  unsure (1)..(212): unsure at all Xaa locations
  Clone ID: PAT_MRT4530_16544C.1.pep
PPFFHSCRSAERGGKGGARRRNGGRRRRPQWGCPTVARRSSTTRACSDKFIYLTHTTFPGTTXSIMMGQITPRRWRQRRFPPLTFQWTVHPIELWSWFGVSGGEQLSLAXRYTKVKLVGEFLQRSXFNYGIVIANSLLSYPRKSGDAVNEMTSLSNLTEELTLYVPTVPEPFPRGRFGWPFLQLKMFSLGSLVGRASPASFLGTPVAEGRSG

SEQ ID NO: 112683 - protein, 94 aa, Oryza sativa
  Clone ID: PAT_MRT4530_16545C.1.pep
PPCPPPTGHRRPPLRRRPPSLPPCPVDARVVRAFQLPATPAHARASLSTPAQGRCTPASWSSAGLPSGIPTVAAAGGRHCGAALLLSPLAPPTD

SEQ ID NO: 112684 - protein, 422 aa, Oryza sativa
  Clone ID: PAT_MRT4530_16546C.1.pep
MAMTAAAVTVPLGVLLRREVTSERMERPDVLCGEAARSRKGEDFTLLLAEAGERVAGDPSTSFSVFALFDGHNGSGAAMYAKKNLLNNLLRAIPSGLSRDEWLAVLPRALVAAFVKTDKDFQAVAETSGTTVTFVVIDEWVVTVASVGDSRCILESADGSLYHLSADHRFDSNQDEVQRVTACGSKVGKLNLVGGPEVGPLRCWPGGLCLSRSIGDMDVGECIIPVPHVKQVKLSNAGGRIIIASDGVWDDLTFEMALECSRGFPSDIAANRIVNEAIHPRGLRDDTTCIVVDILPPEKLAPSPPTKRQGKIVFNNMFRRKHTDVSFILDREYAEPDEVEEIFDDGSAMLSKRLAAGYALQSMFEPFSCAVCQVQLKAGQGISVHSNPLQHEKLQGWQGPFLCQSCNEKKDAIEGKRPPRDS

SEQ ID NO: 112685 - protein, 26 aa, Oryza sativa
  Clone ID: PAT_MRT4530_16547C.1.pep
FFFDNILQIILCVTTKGFCLHTITYT

SEQ ID NO: 112686 - protein, 191 aa, Oryza sativa
  unsure (1)..(191): unsure at all Xaa locations
  Clone ID: PAT_MRT4530_16548C.1.pep
RPHPSHPPPRPHPSHPPPSPIPVLPHRVADTAPPLPSXPPPRRSPTTPPTPAPPSPXSPTTPSTPVPPSPTXPPRRPSPSSPTASPTQRPPRPPILVHRRLAVQPPLCRANIHGEILWIPRSPIRHWPPPRSHTRLPCHVRLRPTPPHTPSTTTTPPHPPLTAVPLLSTAPPSSQPSPPTPSATDRRLLPF

SEQ ID NO: 112687 - protein, 664 aa, Oryza sativa
  Clone ID: PAT_MRT4530_16549C.1.pep
YFKKKKKWQAFVGIGARRVKGYYESLLAADDERENSKGSDSPTMEGKPKGSPFSSEKWKGQIEKKNTHGISVFSQVTSLVALALTGIMDDYFDGYFSEEMIECQVDQLVLEELVREKFPKLVNHLDYLGVQVAWVTGPWFLSIFMNMLPWESGPALVTTKDAGDAVTLLQSLAGSTFDSSQLVLTACMGYQAVDEARLQELRNKHRPSVISSMEQRAKGLRVWRDTNGLASKLYNFKRDPEPLVSLSTEQLSDLTETSSGSTDDMYSGLTVNTEIDSLPDPKDQVEQLEQELSDLRQALLDKQEQEQAMLQVLMRVEQEQKVTEDARIFAEQDAAAQKYAAHVLQEKYEEAMASLAQMENRAVMAETMLEATLQYQSSQQKAQLPSPSPSPRLQQTHKPRNHHHHQQQQQQQLRGEEKSKLKQLTSNGVQLSLQQLQLQQGEEASAEEGAAQAADRQGPGQPRGARKEQGSQLQEMSVVVPRRQELGATAQHLSSSACKLMEVLVYYGASRGSMFRSHRSKAPPLRHRFRYQPICRALTAMIDRQILRVTRSPLAAAPSLTKAPRRRVAFILRFAGSLHGFAAAVTPEAADPVPPKPDLAPRQMEQHRPRHIEVADGKLEAADDERAASSRRTRRRPDEASSARATRVAYSAADLSPPPPPPRI

SEQ ID NO: 112688 - protein, 181 aa, Oryza sativa
  unsure (1)..(181): unsure at all Xaa locations
  Clone ID: PAT_MRT4530_1654C.1.pep
KYKLHKCKCDNQMRQGNKRFFTEVRKLAGFLLPVEASLTPPLNHEATARPLRQGVGKAGARPWRGLPKPRSLGVVFPSLRRPCYSTMASFLAIVGLSLGPTXWPVRPASARSDRHQLGLTEYGSGGSGSAIPEHAIPTIXRPVRPAYTRRSDRHCLAGQTATLLPVRPAKAIGHTATMWSV

SEQ ID NO: 112689 - protein, 332 aa, Oryza sativa
  Clone ID: PAT_MRT4530_16550C.1.pep
MTRTPASLSLAVVAVSVAAAALLLAALVAADGQKQQGYVQPAYRRPAAGLKADYYHQSCPDMEGIVQRAVKKAIAADSTLAPALLRLFFHDFAVGGIDASVLVDSPGSERYAKASKTLRGFELIESIKAELEAKCPKTVKVDYWPLMYGRKDGRRSSMVDADQYVPMGRESVTDLIAFFESRGLTVLDLAVLSGAHTIGRATCAAVKPRLWDYAGTGRPDASMSPRYGDFLRRKCAAAGDGGYVYLDADTPTEFDNGYYKNLLRDMGLLETDQKLLPDSRTGEFVRELAGARPELIRHQFADSMRRLGAAQVLTGDEGEVRLKCSAINSNSY

SEQ ID NO: 112690 - protein, 294 aa, Oryza sativa
  unsure (1)..(294): unsure at all Xaa locations
  Clone ID: PAT_MRT4530_16551C.1.pep
RGRGRRRQDSSSSRSRWRRRRRSRTRGATNPARGPPASPPRLPPGSPASSAARHGTLSASSTSPIPRRRTSWRSTSSMSPAGLAGSSRPACPPPSSRRGXLRPASSAPRYLIRSSPRRRRRSRHRRRRRRKRRQRRRSAATTTRCTTTPPTRRMLHRRHRRHRWCRRPRPPRPPPAPPRRGRRRWRIPARGSTTTQGSARSAPRGIAGAAAAATTTTCRISLRRWNKNSTRKKKRGRRRLLILILVQVTNPGAVMVMTLLLLLIVRRRWRRRRLRWQLGMISPAPTTTTTTSPG

SEQ ID NO: 112691 - protein, 124 aa, Oryza sativa
  unsure (1)..(124): unsure at all Xaa locations
  Clone ID: PAT_MRT4530_16552C.1.pep
MCLPPNHSKCSFTFTIFHCCVNYTIYHSNFFTLMNKAKXAPTKISFNVPIFEPHPPHYYIPSILHSFLRTESLFTVSFHNLTFPQTQITHTXLFYLKPLPFNALGNKTYXNLYKFSHFKPIQTQ

SEQ ID NO: 112692 - protein, 51 aa, Oryza sativa
  unsure (1)..(51): unsure at all Xaa locations
  Clone ID: PAT_MRT4530_16553C.1.pep
MKIIFVFDLLAISACTPLXFDVLGQSYRQYQLQSPVLLQQQVLRPXYNEFV

SEQ ID NO: 112693 - protein, 106 aa, Oryza sativa
  unsure (1)..(106): unsure at all Xaa locations
  Clone ID: PAT_MRT4530_16554C.1.pep
ACGGIISDNDDEFFLAATQIVHSYWHSVNAPKHGGSIMGHESIDRNREAXHLRXDNPTYGPVLFKRRNRMNRPLFLCTMNAIKDHDDYFVQKRNAAGILSFRCDQA

SEQ ID NO: 112694 - protein, 50 aa, Oryza sativa
  Clone ID: PAT_MRT4530_16555C.1.pep
QFRFIQMTGLAVYHDGSLSPPSYLRGGGGGRSRSIASMLAEILAGISTRT

SEQ ID NO: 112695 - protein, 200 aa, Oryza sativa
  Clone ID: PAT_MRT4530_16556C.1.pep
MTVVMVGMVVAGAYGDYSARVSAGFVLSLLQEHGCDHIKDFPELLKGAWLENSQCSGAALRAFQKDFWEDGGKDCTKTRLREQLEKLTKDKEAAATNPRVDPRPSEPSDEDRDHPEVCGRKICDRPPSGDWRDKNEKFMVVKGFPTTKSPFRPVYHEMLINGNSYKVISVARWMRAHPGRTLEDYDRYRVSCREDSTNFW

SEQ ID NO: 112696 - protein, 51 aa, Oryza sativa
  Clone ID: PAT_MRT4530_16557C.1.pep
VMIYEPSRPINHMSAKSIYLENFHNSGCNNSANANLGFCPTLKKKRKRAKQ

SEQ ID NO: 112697 - protein, 67 aa, Oryza sativa
  Clone ID: PAT_MRT4530_16558C.1.pep
GFISYIYFSLFLHYFFLFFYNFQYNIILFSFFFIIFYFLLCLSFDFLKETTLLFLLSILYSYFLLFI

SEQ ID NO: 112698 - protein, 482 aa, Oryza sativa
  Clone ID: PAT_MRT4530_16559C.1.pep
MEDLPGAALAEIMKRITRTSDLSSLSLVSKRLYTIDAEHRSTIRIGRGLWPAKEALLTLCSRFSNLRKVEINYHDSTRGDGNQIDNQGLLTLSTCCPLLTHLILSFCYYIYDSGLAYLTFCKKLVSLRLNSAKNITSSGLLAVAVGCKNLSGLHLINCNKISGTLEWLKYLGSDGSLEELVVKNCGGISQYDLLLFGPGWMKLERFVFEVSNLYNILRLRDPSFVANYQRSYDFCCESLKDLRLRGIATVEEIGLRSLLGKCKSLQILCLHFVLGLTDSDMITLSQNCSNLKSISLQLEPVVGVGPQGRVFRMPLTDVSLKALALGCRMLQIVELAVYSRHTSYPEIGFSQEGLATLFQSCPIRELVLCGANIFDDEVMKALSSAQFLETLKLMDCKRITDAGMRLLANSSSLVNLTLQDCRGFTDDGVSEVVRARNLDSLIVQGCRVSWKAVKGAAKSVRYDRNCPVYGRLSRSSMISTLD

SEQ ID NO: 112699 - protein, 140 aa, Oryza sativa
  unsure (1)..(140): unsure at all Xaa locations
  Clone ID: PAT_MRT4530_1655C.1.pep
MEIQYELNSDRDPNRSPTSLGGPSDGSYIFVRGVTGGGIASPWEYGEENARGGEGRAGAIDYFLYIDAHYFARIPSTSXRLLPVRSASSGNCHVAATTRISPTTPCLSATKRSSSTMPLPCRCASTPQPSPPLLLSFMSP

SEQ ID NO: 112700 - protein, 132 aa, Oryza sativa
  Clone ID: PAT_MRT4530_16560C.1.pep
GPTTKDSLTIFWKGFRVWAKNRRGGKPLLVPKKEGPTKKPPKSFFQNGGGLSHHLNLPRGKFFPPLFFFKKIFAQKGLFKNSPAKGGKTPGKRGDKQLNPGRRKKGGHFGELGPPPLDPPGGPAFTGPAPFF

SEQ ID NO: 112701 - protein, 257 aa, Oryza sativa
  Clone ID: PAT_MRT4530_16561C.1.pep
MGRGKVELKRIENKISRQVTFAKRRNGLLKKAYELSLLCDAEVALIIFSGRGRLFEFSSSSCMYKTLERYRSCNYNSQDAAAPENEINYQEYLKLKTRVEFLQTTQRNILGEDLGPLSMKELEQLENQIEVSLKQIRSRKNQALLDQLFDLKSKEQQLQDLNKDLRKKLQETSAENVLHMSWQDGGGHSGSSTVLADQPHHHQGLLHPHPDQGDHSLQIGYHHPHAHHHQAYMDHLSNEAADMVAHHPNEHIPSGWI

SEQ ID NO: 112702 - protein, 129 aa, Oryza sativa
  unsure (1)..(129): unsure at all Xaa locations
  Clone ID: PAT_MRT4530_16562C.1.pep
TAGGDGRKQRGIYRGREGPPPPRRERPSTKGTATEAGXKKQDRNGMQGNRELLEEAQMKSQPAEHTNQETLRGNRTDGDHRTLENEHMARGTTEDHLHDQXPGAEGLDRTQGARNEQGAARGQEHRHDA

SEQ ID NO: 112703 - protein, 203 aa, Oryza sativa
  unsure (1)..(203): unsure at all Xaa locations
  Clone ID: PAT_MRT4530_16563C.1.pep
VSLFFPSPLHLSSSLLFFSLTFLLSWAAQPAXWGRRESGGGGDEAAAAGDEATTLEKGDXLHPPPRLRLPAPWVSSTPLPAESTNRGLSELVGRLHRSXGFLPKNLLSIRSLTMVSRRQRRHLPTGDRDQQRHGRRRCYLYEPDLSRIVHPPSGNHQGADCAKIEGLLGTTTCVNLQEHFIVVLSLTPSCDFNLGLLAEKNVP

SEQ ID NO: 112704 - protein, 108 aa, Oryza sativa
  unsure (1)..(108): unsure at all Xaa locations
  Clone ID: PAT_MRT4530_16564C.1.pep
MQLNPKARTRRNKTKVKRWRCAEIVLNATLSMRGNPHEAXNSTRQRMPCHIVGFGLNRLALSNSDSADPXAADSDFSRSLLCFRNDFHLGFHSAPTFISDTQITKFGC

SEQ ID NO: 112705 - protein, 48 aa, Oryza sativa
  Clone ID: PAT_MRT4530_16565C.1.pep
IIYGESVKILQKPVRIRWNSKKIDQELHRKIWIEKTVDRLMLVECTLV

SEQ ID NO: 112706 - protein, 185 aa, Oryza sativa
  Clone ID: PAT_MRT4530_16566C.1.pep
MATSSILFFFLLGGLTVAVAAHGTANDDTNTIRLPSDGAKSPKMPTEKRPWKCCDDIEEQPASIFPPFWRCNDELEPSQCAAQCEVCQDQEASPGRLICGDVYWGADPGPFCTPRPWGDCCDMDICSRSLPPICRCADEVESCAAACKDCQQLESSSSSSEPPRYVCHDWFRGEPGPSCTPDEHK

SEQ ID NO: 112707 - protein, 60 aa, Oryza sativa
  Clone ID: PAT_MRT4530_16567C.1.pep
GSLGWAGPPWGKKNQPPKFPPIYSKSFLGSTPPCNKVLFLAKKTKMSPPMDIIIWPPPGI

SEQ ID NO: 112708 - protein, 64 aa, Oryza sativa
  Clone ID: PAT_MRT4530_16568C.1.pep
LGKWNILGRQSQIWVPKCKLSNCAVKGNSAANFEEYYSDVLFLLIYPHICRMLPFFLKVSGPRI

SEQ ID NO: 112709 - protein, 70 aa, Oryza sativa
  Clone ID: PAT_MRT4530_16569C.1.pep
NNLKSSFSCRKKKKKKKKKKKKRKKKKKKKKKNKKKKKIQKKKKIKKRKGGAHFGGSKFQTAGWGTNRFF

SEQ ID NO: 112710 - protein, 736 aa, Oryza sativa
  unsure (1)..(736): unsure at all Xaa locations
  Clone ID: PAT_MRT4530_1656C.1.pep
GHCGYVLPPRANYERLRDFLFSKDFKIGKVDTTLFTKIIGDDFFVCQIYVDDIIFGSTSEVFCKEFGDMMSREFEMSMIGELSFFLALQIKQLKDGTFVSQTKYIKDLLKRFGLEDAKPIKTPMATNGHLDLDEGGKPVDLKLYRSMIGSLLYLTASRPDIMFSVCMCARFQAAPKECHLVAVKSILRYLKHSSTIGLWYPKGAKIKFVGYSNSDYAGCKVDRNSTSGSCQMLGRSLVSWSSKKQNSVXPLYRRGGICFGRNYILVFGQNEIKPQNEFEKEFEKSFKIKLRRSDRRYMRGLTGFXARSDRQHPGGLTGRIXPVMPPRTRHGRRAPTPDPVSEPEESSGEDYAQSDEEVEANVEGASEDESGDDDSGSGEDEDEGSDEMNIDPSIQCVVNMRNPSQYTILRHHHQFLRPRDTPNPRFHTAFQKMWVAGDYCEMKWMSDTLQCSISRRQFRRLLNVRLDFGDDLHEEHTHNPLSMDYLSQFYEDGARYTHGKVAGLRTIPSVVNRIVRATILPRLGNNNDIRGVAWHVIDAIIQGRQFDTVTLMMQEIAISKGTFTQGIYYAPYIMRLIQDKLGAAGPNLKKHKQYKPRLQPGAPRAPRTAPSSHPGASSSSAPPPPHGYDPNVFFHPQYAYFGMQSNEYFNPVLGAINTLSESIQRLSTGHETLHEDVRGLRTDVGDLNASVGRLHTRVGTLDSRVQMLESSQAFVYHRRRDASHPSTSARPPSPPH

SEQ ID NO: 112711 - protein, 55 aa, Oryza sativa
  Clone ID: PAT_MRT4530_16570C.1.pep
NGAELLTFFNQPQLTLMHASKKFSSVNIYLRTPIIAYLNIFHLISLIHKLKNSCR

SEQ ID NO: 112712 - protein, 367 aa, Oryza sativa
  Clone ID: PAT_MRT4530_16571C.1.pep
MELAMGAIGSVLPRLAELLKEEYKLQKGVKNDVESLSRELAAMHIALERVAKVPREMVELDVKLWASNVRELSYAIEDAIDAFVVRVAEGSNLVDPINQGFFKRILRKTSDLIRKGKARREIAEGICDIKELADEVAELRARYKFDAAAAATTPATATVDPRILALYKDITELVGIEEARDELIGMLSRPADDDQLNIVSVVGFGGLGKTTLAKVVYDKLRGQFDCAAFVSVGQNPDLKKVLTDMIYDLDRQRYISIHNSRMDERLLINELRDFVQNKRYIIIIDDIWDEKLWEYIKMKPLSDDASKRLFYKRIFKHDNGCPPELEQVSIDRIGELTSLLELSPVDVFRRTSSIDVNGDSFSLLKAL

SEQ ID NO: 112713 - protein, 197 aa, Oryza sativa
  unsure (1)..(197): unsure at all Xaa locations
  Clone ID: PAT_MRT4530_16572C.1.pep
WDGREEVNHRIGFAGGRRTPVARKGGNFIGATGVRLKGVEAYPWFKESSSGDGWDKGVPRRAGDERWPPGVDGNGREAMPGGGGARGDVHARSGVPPSYHADXRGRGRARKGNGRRHCRAGTGAVTSGRRRGSNLSDLGPGKGKMTAPGVLFSRPSHAPVSLVLRRRMVAMLVWENRPWVVQGEELSVGRGQGGGRR

SEQ ID NO: 112714 - protein, 207 aa, Oryza sativa
  Clone ID: PAT_MRT4530_16573C.1.pep
MARRSCSMPAAGAGPGSAAAAVNTITPCAACKLLRRRCAQECPFSPYFSPLEPHKFASVHKVFGASNVSKMLLEVHESQRGDAANSLVYEANLRLRDPVYGCMGAILTLQQQVQALEAELAAVRADIVRHKYRLPSAAAVLPSSHASHLLAAAAAARQLPVAGTMGVVTTATLPASASSSSTTAVYAAASSSTDYSSITNENVPYFS

SEQ ID NO: 112715 - protein, 157 aa, Oryza sativa
  Clone ID: PAT_MRT4530_16574C.1.pep
MTAPGVLFSRPSHAPVSLVLRRRMVRATAGQGRQGAIVATRETSEGDGRGSGFYRWRCWFGRTDLGSFKERSCRSGVVKVVAGGDADGGRAKRKRRRRKGALLLAVSGKVEGGEGRNTEEPRNGFKVDSDILESGQVFGEDSKEAIEFRRLESELEF

SEQ ID NO: 112716 - protein, 85 aa, Oryza sativa
  Clone ID: PAT_MRT4530_16575C.1.pep
LIHDPVTNRGRLSSHSVRRHKCLISPACLLPDHGHVIQFLLGVGFWSIRVYAYLLLPYAICRLLRRSSPTAAAVSTSPGVRESLG

SEQ ID NO: 112717 - protein, 86 aa, Oryza sativa
  Clone ID: PAT_MRT4530_16576C.1.pep
MATVPVNPKPFLNNLTGKPVIVKLKWGMEYKGYLVSVDSYMNLQLANTEEYIDGQFSGNLGEILIRCNNVLYLRGVPEDTEIEDAE

SEQ ID NO: 112718 - protein, 217 aa, Oryza sativa
  unsure (1)..(217): unsure at all Xaa locations
  Clone ID: PAT_MRT4530_16577C.1.pep
MRHFVSPLLALGCLIGNAAAAWPNGPFKTSGRWIVNANNEKVKLAGANWPGHGEVMVPEGLQYQSIKGVLSDIKGIGMNAIRLTFATEMVDQIYANGGKDIDIKTAFEEGLGKENGTIVLAKVLKNNPTFTAKTTRLEVYDAIAAECLRQQIYINLDNHISEGKWCCGGEDGNTWXGDTQFDTAKWVRGGAYMAAHAKKCPAKVSQSPPNEPREPTN

SEQ ID NO: 112719 - protein, 354 aa, Oryza sativa
  Clone ID: PAT_MRT4530_16578C.1.pep
MWAWGLVERAAAGLLGPLGGAHGGGRWNTAVAVGVTAAAGLVLVVIVVSSRRGGLKSPWWRRRRKAALKPHEWVSLFTPEGKLKDGGVKLLKKVRSGGIEPSIRAQVWPFLLGVYSLGSSESERDAVKAQNRKGYLLLRNHCLRKSVYINEENKQSNEAAGAKHVECVSSEKGEDTVNPAGSEEVPDKSSVEEHLVGDDTVGPVVSEEVAEKSFVEDHLVSEEENPSANPGEEVQDDTSKTSPEKLTDGNHSSSSSSSEEESESSGLTHVETSHMVVASVQQSLTEDEQESIPRYSNTGGNMENDSELSKAARPVKSVRTIEDFETWQRIIRLDAVRANDEWVSYSPSQAVVFM

SEQ ID NO: 112720 - protein, 71 aa, Oryza sativa
  Clone ID: PAT_MRT4530_16579C.1.pep
LGRVSFDLPNDIYYYLHRIGKTVRSQKSDPATDLLNENHYSMPRSLPELIHECNQEVPPRMPRYPRRPSYG

SEQ ID NO: 112721 - protein, 52 aa, Oryza sativa
  unsure (1)..(52): unsure at all Xaa locations
  Clone ID: PAT_MRT4530_1657C.1.pep
NWLMRYDDDRHXXFLTFEPLYYYNSVTRQPNGXHRPRRNVXVRXDTTYGWXX

SEQ ID NO: 112722 - protein, 43 aa, Oryza sativa
  Clone ID: PAT_MRT4530_16580C.1.pep
VPELVTNCKELASKPNVDGFLVGGGSLKPEFIDIIKSATVKSA

SEQ ID NO: 112723 - protein, 817 aa, Oryza sativa
  Clone ID: PAT_MRT4530_16581C.1.pep
MAATPTTSASAAATTRLFLPTRRHLHETASVPAPSRTIARRYSGGVRSLGPPRAAAGELGGGAGGTITGKGAVRIVSIVGDGSISPLKDTPWEEVMRHTANRMKWVDEGFEMLVFTDKSIGHDELRKELAQCDMLVNVAITSQETVQWLINNSEDIPNIICFQSSPTLENKLGGRYVQYTGRQDMFCKLTNIGETGGMKESAEVLKAVSNAWERHNSDDIRFCLLVVVNAYIRPVDMLQNLRAKGLSTLSCMIRNCGPQILNCLFDPNCRKALQCLNSCSPTDQVCNYRCIASYESPHLEAFSLCVLQKNNCLDLNAEIPSKPSVPPLTMFREQMLSHELAEDMFVGWLDNLEWSWRVVAGQNPAYDQFPCQYQLFYRGKAKGSFWYEPIFQVRTLEGELVWRRRKYRVRRALIPGTFYFSVLDNGVVSKEFWTIVDVSDDFSWGLFHYHGAAQAAGLAYTGAVLVSPDGSCPDLDDPRLASALDKCGIKKWELYMVDNCSCTGAPLGTPGDAKLHYQIAPGKESDPPQQFALFTVQDWSCGPVEVIEKKQRARMAGLYERPSETYTKKRPRYPDAWFSKLAALTAGHHRAWDAGCGTGQASISIAEHYDSVVATDASEGQIRHAVAHPKVRYLHTPVDLSEDDLVAMVGGEGSLDLVVVATSIHWFDIPLFYAVANRVLKRPGGVLAVWGYNYEIHPFEDKLHGQLYPAMRPYMDPRTRLAMDRYRDLPFPFEPVGVGREGEPADVDIEVDMTLDDLVGFLKTGSVVTTAREKGVDLEAVTKDVMKGVEAEWGDPAVARKLVFKAFMLAGKPKVLN

SEQ ID NO: 112724 - protein, 63 aa, Oryza sativa
  Clone ID: PAT_MRT4530_16582C.1.pep
RIPYSLKGSEEKAPDELRGMSCLMLVIPDEKSVRTAVMDISFCCLFLLTLFHRLIAISPFVNL

SEQ ID NO: 112725 - protein, 51 aa, Oryza sativa
  Clone ID: PAT_MRT4530_16583C.1.pep
GFAVTYLFGLLPFKEELSDLFVWLTALQVTSSRTAGLAAHHTKRELNRTRG

SEQ ID NO: 112726 - protein, 121 aa, Oryza sativa
  Clone ID: PAT_MRT4530_16584C.1.pep
MATPSCNRTTAVTTPNAVATMAFPCPVRPAVSSDAARRPPREGRPIGLGLVSFLGLKRSAAAGRRRGGAAEARGGRRRRRCVAWPVRLHALSVLVFLRVEEWGSGWRNGSPASGGEAAMFA

SEQ ID NO: 112727 - protein, 122 aa, Oryza sativa
  Clone ID: PAT_MRT4530_16585C.1.pep
VRYIFITHNDAKSPLYLLVADQDKSKELDWEKRFRIISEIARGLQYLHEESRLKIIHRDLKANNILLDSDLTPKISDFGLAKLFGGDQSHIVTNRVAGTYIYMYSCRSIDGPHELFKYFIYF

SEQ ID NO: 112728 - protein, 140 aa, Oryza sativa
  Clone ID: PAT_MRT4530_16586C.1.pep
HKPIPSGFTANDRLIFTNRNSIGGFVNPRRLVPTPAAAGRGHLGRRAGAVTCRALDSRLLLLPRSLSPPPPPRLPLPSLSLALRLHCSPRERAIAGIARAQGGGGSPPAGSSREAPRCRARRTAALADLVGRRSRRRCHR

SEQ ID NO: 112729 - protein, 215 aa, Oryza sativa
  Clone ID: PAT_MRT4530_16587C.1.pep
DAWDCGKNQELSTTTQRDFLKRDFEVFGDAGREERERGGGGEGGGGERGRVGVGGEGEDQGRRGGHRRQGQGARHGGQGRRRRAQGGPHPRGRGHQAPRHARQRRRLPPVLPRRRAAATSSGHSPSGSADAPIDSSAAPAPAHTAAGAGVVNSGVAPPGRHRRSGGCLGPPGGGRGGRRKRRRRARRRRRGGTCRRRAGGRYRGRRRRLSAGACL

SEQ ID NO: 112730 - protein, 61 aa, Oryza sativa
  Clone ID: PAT_MRT4530_16588C.1.pep
SVVVPVVHHQHSFGVDRRINITQRRSVSCVVHPPTPSVFGWHRGSNHPSHLMGSWSVIWGV

SEQ ID NO: 112731 - protein, 85 aa, Oryza sativa
  unsure (1)..(85): unsure at all Xaa locations
  Clone ID: PAT_MRT4530_16589C.1.pep
WVFGERVRPWLETYASLQEQEQGQMQSRXHYNPCGYGKGPFGSSCTNSSNETFCTMTVTQNINCMDFKDDMPDLDNMASIIQHPQ

SEQ ID NO: 112732 - protein, 337 aa, Oryza sativa
  Clone ID: PAT_MRT4530_1658C.1.pep
MAAARCLPLRASPPEVAKAFSSSIPASSSSSSSSSSTTTAAASLPLRAAVPPSSGRRIPPLRCASSSSSSQGSASPDIAVLLEVEGVLADVYRFGNRQAFNVGANNIGWPTSLPTNEKESFMKSVLREKLKALEVFSASDSLPLRPGVEQFIDDALNEGVPVAILTTYGRNGEKTSRYIIEKLGQERTSKIHIVGKEEVERSLYGQLVLGEGVASSLDEQLVKEAQKAASAEKQRIAEEVASILKLSVDINAASKSSEKIIVTLRAGSEYVGRDVQNCVLVAGSQSGVLAAERIGMPCIVVRSSLTARAEFHSAKAVMDGFGGTDLTISKLLSKKWS

SEQ ID NO: 112733 - protein, 41 aa, Oryza sativa
  Clone ID: PAT_MRT4530_16590C.1.pep
MEYKYNCRNKGAGSRPKTGTFVFLTGTFVWGMKSTIGRKVP

SEQ ID NO: 112734 - protein, 101 aa, Oryza sativa
  unsure (1)..(101): unsure at all Xaa locations
  Clone ID: PAT_MRT4530_16591C.1.pep
NFSNIELLLAETKISXAFSSASWRMNRTICWIXLXTSASFILAXAGIPTAALAAFCCCCSALRRTTTAXGGXEGRXGERSPREWSREGGGMGSRGTSLLAV

SEQ ID NO: 112735 - protein, 1287 aa, Oryza sativa
  Clone ID: PAT_MRT4530_16592C.1.pep
MVVLPDVGIVLMLTVVASGHRGRANAGGRESRRGKSIPRGMGGAVCFYLAWLGWWGNWIWTDKCLVADDDIEAHPLRWAPHLKTRVGVLPSLLPEVGMEFNTVDEAWMFWVSYGGQKGFEVRKRYSIKRKSDGKVRSCRYVCANEGHRKEDKRDHLTKCPRAETRTDCQVRMGVVLDQEKGNYKVADLVLEHNHILQLPETSHLMVSQRKISELQGFEIETADDAGIGPKAAHQLASIQVGGSLNLNYILRDPKNYLQGKRQREMVYGQAGSMLMHFQDKIAKNPSFQYALQMDSEEQIANIFWVDAKMLTDYAYFGDVVSFDTTFGTNKESRPFGVFVGFNQFRETMVFGAVLLYDETYESFKWLFETFLKAHNGKQPKTIYTDQDSAMGKAIKKVFLESWHGLCTFHIMQNAVKHVAELEDEESSNSPKQTAEDNEEEQSILTDFSACMFEYEDEETFEQAFSTIRAKASKQSWLDSIYKVKEKWAECYMKDVFTLGMRSTQLSESVNSELKRHFKSDFDIIRFLQHFERVVEDKRENELNAEFESRKKIPRIKMRTPMLIQASKLYTPIIFEAFQAEYERSMVACTTALEGNNCYLVAIGSLDENCTFEKEYKVVGDPLEQTSTCGCGMFSRTGILCAHALKVLDLMNIKSLPSQYVLKRWTRGARSGTVQDNHGRSIIENPRLNEMLRYKDMTRKFLNLALRAASHPGSTLLVNNALDILTKQVEEEINGFTDTIALGPTDITPPSDLVSTARLKKKEVETKTSKRKKNWLDKLHKSTNNGSNKGGKRKKKGSKEQKTAKTGGKKKGKEASVHDNPAGQNIYPSTSLPMEEMSEPYMAINTFSQLLTQWSLVLVNRLLVSAGCGTCRDCSFGTLDEQLDLLGKYLQNAIRFDIQQSNTPGRSIKELKRRPLCSSTHSLLRDGEEEFLLSLTAEEAAMFLHSLPSSIRRALPVAAHGLLELGTRTSSSWHRSNHSENKYLRSPPIILQKVVEAWRMPRREGGRSRSAAYLVLFASCLLAVAAASHQEFHEAAGSRTLLMSHEHTNQVHCSRERSRAAWKAIDEYLMPFVEKEKYELPSKCRLHPGNDMFREQEQHKIHFDINEWRCGFCKKAFRAEKFLDQHFHNRHNNLVDNSLADSCFPINQGQSASRLHEFLLRQFCDAHTCKNGSKPFPKGGRFKVIILSYSIYTLNMPNKQTNRFYLALCALTIVLLPLFYLIVFLHQSHALLLPYAAPHADAIVKKQTCAFYVSSSLEMWVYMTVYRQSHETICTLKNENVYPIFSRL

SEQ ID NO: 112736 - protein, 74 aa, Oryza sativa
  Clone ID: PAT_MRT4530_16593C.1.pep
MVIKAKGKGSSALEERTPLGYPYTRDMGICIGFCPLVFWGIKDVVTVPVTAKGRVSHFVEAQIPKDLPSVRLDK

SEQ ID NO: 112737 - protein, 71 aa, Oryza sativa
  Clone ID: PAT_MRT4530_16594C.1.pep
FCDAHTCRMGSKPFPKGGRNQTNRFYLALCALTIVLLPLFYLIVFLHQREMKKGGQNLRRISKVVQKKKPS

SEQ ID NO: 112738 - protein, 1548 aa, Oryza sativa
  Clone ID: PAT_MRT4530_16595C.1.pep
MWRHAARRSSAQIRRSGVMSSSSSPAAPAAAAGAAVPGPCIVHKRGTDILHDPWFNKDTAFPMTERDRLGLRGLLPPRVMSFEQQYDRFINSFRSLEHNTRGEPDTIVALAKWRILNRLHDRNETLYYRVLIDNIKDFAPIIYTPTVGLVCENYSGLFRRPRGMYFSAKDKGEMMSMIYNWPAEKVDMIVVTDGSRILGLGDLGVQGIGIPIGKLDVYVAAAGINPQKVLPIMLDVGTNNTKLLEDKLYLGLRQPRLEGEEYLSVVDEFMEAVHARWPKAVVQGTAGVALAGLLGAVRAQGRPLSDFTKQKIVVVGAGSLFHTRYFLSKVCFLRSNSSLESSAGIGVLNMAKQAMLRMPGINRSGEGHNQFWVLDKDGLITKSRKGLDPAVARYARGFGPEEVQDLHEGASLVEVLYTDHQVRKVKPHVLLGLSGVGGIFNEEVLKAMKESDSPRPAIFAMSNPTTKAECTPEDVFKYVGDNAVFASGSPFSNVTLGNGRQGYANQANNMYLFPGIGLGALLSGARHITDGMLQSAAECLASYITDDEIRKGILFPSISSIRHITARVGAAVVRAAVDEDLAEGRCDVDARDLKSMTEADTVDFVARKMCYGGQKGFEVRKRYSNKRKSDGKVRSCRYVCANEGHRKEDKRDHLTKCPRAETRTDCQVRMGVVLDQEKGNYKVADLVLEHNHILQLPETSHLMVSQRKISELQGFEIETADDAGIGPKAAHQLASIQVGGSLNLNCTLRDHKNYLRGKRQREMVYGQAGSMLMHFQDKIAENPSFQYALQMDSEEQIANIFWVDAKMLTDYAYFGDVVSFDTTFGTNKESRPFGVFVGFNQFRETMVFGAVLLYDETYESFKWLFETFLKAHNGKQPKTIYTDQDSAMGKAIKKVFLESWHGLCTFHIMQNAVKHVAELEDEESSNSPKQTAEDNEEERSILADFSACMFEYEDEETFEQAFSTIRAKASKQSWLDSIYKVKEKWAECYMKDVFTLGMRSTQLSESVNSELKRHFKSDFDIIRFLQHFERVVEDKRENELNAEFESRKKIPRIKMRTPMLIQASKLYTPIIFEAFQAEYERSMMKIVPMVACTTALEGNNCYLVAIGSLDENCTFEKEYKVVGDPLEQTSTCGCGMFSRTGILCAHALKVLDLMNIKSLPSQYVLKRWTRGAHSGTVQDNHGRSIIENPRLNEMLRYKDMTRKFLNLALRAASHPGSTLLVNNALDILSKQVEEEINGFTDTIALGPTDITPPSDLVSTARLKKKEVETKTSKRKKNWLDKLHKSTKNGSNKGGKRKKKGSKEQKTAKTGGKKKGKEASVHDNPAGQNIYPSTSLPMEEMSEPYMAINTFSQLLTQWSLVLVNRLLVSAGCGTCRDCSFGTLDEQLDLLGKSKVDWLSGVEATGGAELDGRWPEQASGAKRRWPEQGQGATAPRCRGVTGGERGGGWSSGEWRRAPGRWRRDEAERTPTARWSTHLKKRVSPEQKKGGGKSKKKMTWTDVLVPSPSPSSSSTATTNCSRLQRRLGRCAEQHKQGGGGGQDRDPHARPL

SEQ ID NO: 112739 - protein, 79 aa, Oryza sativa
  Clone ID: PAT_MRT4530_16596C.1.pep
ERRSIQKSAPLVAKLQTHVNGKNNKASKLGEGDLFSFSEVKVGALPIILRSWFRNTIRGYYMEQKATELSPINSIASSC

SEQ ID NO: 112740 - protein, 138 aa, Oryza sativa
  Clone ID: PAT_MRT4530_16597C.1.pep
MVVLVPDFGGGIQDHLSAVVTKLCRLHAPGLPGAWRSTRSRWEERRISGRRRPCPPAGRPPHSPPDGGAAPAPPRPTPPFLLPVRRQPHPFSPLLLPARRPPGNAAKRQGGDLPARRRASPPPRPLTPVAGLLPARRR

SEQ ID NO: 112741 - protein, 76 aa, Oryza sativa
  Clone ID: PAT_MRT4530_16598C.1.pep
GGKTRGKDHTPSREKVREFFLVGARSTARSARLGLAIRGGSALGAAGSVHFGNKIDGQICLEVELKCFIMSVILVP

SEQ ID NO: 112742 - protein, 50 aa, Oryza sativa
  Clone ID: PAT_MRT4530_16599C.1.pep
MSGDCRGRAWIDGNSGGRARGRHVLMWAGACDHRASRRPLLRIFEETRKE

SEQ ID NO: 112743 - protein, 1252 aa, Oryza sativa
  Clone ID: PAT_MRT4530_1659C.1.pep
MADESGSCGGGGGGGGGCEAVKKRVDQSVAFHELFGFADPLDWLLMAAGSAGAVVHGAAMPVFFLLFGELINGFGKNQHSLRRMTDEVSKAQIACWMYTGERQVGALRRRYLEAVLRQDVGFFDTDARTGDVVFSVSTDTLLVQDAIGEKVGNFIHYLSTFLAGLVVGFVSAWRLALLSIAVIPGIAFAGGLYAYTLTGLTSKSRDSYANAGIIAEQAIAQVRTVYSYVGESKALNSYSEAIQNTLKLGYKAGMAKGLGIGCTYGIACMSWALVFWYAGVFIRNGQTDGGKAFTAIFSAIVGGLSLGQSFSNLGAFSKGKIAGYKLLEVIRQRPTIVQDPADGRCLDEVHGNIEFKEVAFSYPSRPDVMIFRDFSLFFPAGKTAAVVGGSGSGKSTVVALIERFYDPNQGQVLLDNVDIKTLQLKWLRDQIGLVNQEPALFATTILENILYGKPDATMAEVEAAATSANAHSFIALLPNGYNTQVGERGLQLSGGQKQRIAIARAMLKNPKILLLDEATSALDAGSENIVQEALDRLMVGRTTVVVAHRLSTIRCVDMIAVIQQGQVVETGTHDELLAKGSSGAYAALIRFQEMARNRDFRGPSTRKSRSSRLSNSLSTRSLSLRSGSLRNLSYSYSTGADGRIEMVSNADNDRKYPAPKGYFFKLLKLNAPEWPYTILGAIGSILSGFIGPTFAIVMSNMIEVFYFRDPNAMERKTREYVFIYIGTGLYAVVAYLVQHYFFSIMGENLTTRVRRMMLAVALFDQRLFSAILRNDVGWFDQEENNSSLVAARLSTDAADVKSAIAERISVILQNMTSLLVSFVVGFIIEWRVAVLILVTFPLLVLANFAQQLSMKGFAGDTAKAHAKTSMIAGEGVSNIRTVAAFNAQDKVLSLFCTELRVPQMHSLRRSQISGALFGLSQLSLYASEALILWYGAHLVRHHVSTFSKVIKVFVVLVITANTVAETVSLAPEIVRGGESIRSVFAILNYRTRIDPDEPETEPVESVRGDIDFRHVDFAYPSRPDVMVFKDFSLRIRAGQSQALVGASGSGKSTVIALIERFYDPLAGKVMIDGKDIRRLNVRSLRLKIGLVQQEPVLFATSIFENIAYGKDGATEEEVIEAAKVANMHGFVSALPEGYKTPVGERGVQLSGGQKQRIAIARAVLKDPAVLLLDEATSALDAESECVLQEALERIMKGRTAVLVAHRLSTIRGVDSIAVVQDGRVVEQGSHGELVSRPDGAYSRLLQLQLHHG

SEQ ID NO: 112744 - protein, 846 aa, Oryza sativa
  Clone ID: PAT_MRT4530_165C.1.pep
MAISTSSAAPPPRLLPPQPPPTSRPLPPPPPPPPPAHGPSPPPPRTRLHTRALAAAASADPRAAHAVAVKSGSAASSGARAWNAVMCGYLRAGALADARGVFKRMPARDAASYSALILGHARLVHALAVKGNSPCGGGGGSLLVDNALLGMYVKGGRFDDALKVFDGMERRDVSSWNTVLSGLVELGRYDEAFELFGDMRDSGVGADRFSLSALLAAAAEGFGLHEGAAVHALSLKSGLEMDLSVGNALVGFYAEHGHSIEDVVDVFERMPAKDVISWTGLLNGYMEFGLVDMAMDVFDRMPVRNFVTYNAVLTGFNHNKEGVRVTFARKSGLRGLGLFKQMLEDGLEISDVTVTGVLNACAITAERKMSEQVQAFAIKCGCGSTPWIDAALIDMCIKCGRSGDAHLLFEKWRHEESFHIAWNSLLAASFRDGEYEKALSTFLKMFRSNDVQFIDEFILTTVLGACGALGFAEFGKQMHCFAAKSGLLSAQGVGNAIISMYGKCGALETAVNVFKRMPCRDLVSWNALITSHLLHRQGDEILDLWSQMERLPIKPDSVTFLLVISSCSYTSSNSADKCRELFLSMSSIYGIEPAVEHYAAFVHVLGCWGHFEEAEQLIGKMPFKPSALVWRSCLDSCNRQPNMTMRRLAMRHLLALEPQDPSTYVLASNLYSESARWQCSESTRLKMREKGMRKIPARSWTFHGNSIHSFFARDRSHPQSKDIYAGLDVLILECMKAGYEPDTTFVLHDVEEYQKRHFLMYHSVKLAAMYGLLMSGHGETIRVVKNVRMCGDCHSFLEYTSAATGKEILCLWQTVAAFFACHDEAPLKRHLVSSHRVYVGMLSFTS

SEQ ID NO: 112745 - protein, 65 aa, Oryza sativa
  Clone ID: PAT_MRT4530_16600C.1.pep
NQRACSLGSAELLEAVHQSATVLSRVVLLTTPHRSYMVLCRTVCCRHIPLFIGGVHSYKTLNPKL

SEQ ID NO: 112746 - protein, 83 aa, Oryza sativa
  unsure (1)..(83): unsure at all Xaa locations
  Clone ID: PAT_MRT4530_16601C.1.pep
KPNIAHPEFSIPDELPPSTQSRTVLSYVAYAWQSSQHFLFXKNDGIHMSYLLLTTXLISLSQXQMRMAACGGGRWTAAHGGGR

SEQ ID NO: 112747 - protein, 78 aa, Oryza sativa
  Clone ID: PAT_MRT4530_16602C.1.pep
FFWGPMKEPVNYRELQSKSVGGAAQKNYYFLHTRGAWGSQMGSRKSDAIIGRVLKRGCYLGWRCGGRTKGTTRKNRVR

SEQ ID NO: 112748 - protein, 90 aa, Oryza sativa
  unsure (1)..(90): unsure at all Xaa locations
  Clone ID: PAT_MRT4530_16603C.1.pep
LSTPPKFQTLGGTRNNTPRSSPETLNSCRETLEPPSNWAARAGEEVGXGESRRREQLGRSNWRPRGGGRHEDFEPKGEKILDXFFFLERG

SEQ ID NO: 112749 - protein, 99 aa, Oryza sativa
  unsure (1)..(99): unsure at all Xaa locations
  Clone ID: PAT_MRT4530_16604C.1.pep
PYLNGIVVKGMGVAKPFRPQPLTPCHIGTMAKGVGXAKPVRPQPLTPCFIGTMAKGVGVVKGXHFAFSVWVPHERRQLLSNGQLCHVERRGSHVKAIVL

SEQ ID NO: 112750 - protein, 89 aa, Oryza sativa
  Clone ID: PAT_MRT4530_16605C.1.pep
KKEICRSNKHDLFILRVYSVLHLGRVTECMINLQYSFLAKFSCDMITHKEKPANLDMDSSLPPRITITQYYYLFRAFLVRTNTVWFVHS

SEQ ID NO: 112751 - protein, 134 aa, Oryza sativa
  Clone ID: PAT_MRT4530_16606C.1.pep
MSEIGFIALVETRRTSISEDMIPASSDRGGGAQRGTRRDTTCCMATSPPRMRSVSFVYCPLSQDHPYVRVVVAHHPFWNRSASANHYMLSSHDKRLVLVYEGKTKCADWPRAISEWWRDPELCDEEDVTAMMEK

SEQ ID NO: 112752 - protein, 84 aa, Oryza sativa
  unsure (1)..(84): unsure at all Xaa locations
  Clone ID: PAT_MRT4530_16607C.1.pep
VPPRRXLSAAAPRRVPRRATPSPXAAVEPEGVADPSEGQDPQDYEQGKSSLFFEHVDPNCKIXILFTNKIACNDEYPTCEICHA

SEQ ID NO: 112753 - protein, 118 aa, Oryza sativa
  unsure (1)..(118): unsure at all Xaa locations
  Clone ID: PAT_MRT4530_16608C.1.pep
QAQQVISLTRASRFVSLRVLEIMNHTSFVVANEDVDEAGNDGVRYNAEDCIVGFWLPRDGHYRGDQGLVPGXLRGTVIQPLEPLRAMHKLAVHVQSPKARALEDRDRRVRYKLEPPTA

SEQ ID NO: 112754 - protein, 347 aa, Oryza sativa
  Clone ID: PAT_MRT4530_16609C.1.pep
MQMHPRDDDLDLAAGEAAAPVKSGDGGETPTMGAAMDKERQIPVDPVSLRHLGMVADEDSPLSAPSVLTEVVVRSSSPMLPPLRRPTFVAASLPCSATSSPVHGAAETDKPAAATPSPTAAMRALARQHSVALAHYVAAPGAAAPALARSASRAEGRSMVPHDDEGDAEAPKAIAAGEDEGFNCGALCMFIPGFSKKKSSAAAAAAVVSSMQRQQSVGARPRRSSSVSRLASLERFECGSWSPPPPMAPAEHLAQEVAKSSCADDTEAPVKMAFVFDHGEPRGILKKSASSRQEPARPSASSSQRHVRFSTAAAVAAASCPTSPCVTPRLARARAEFNAFLEAAQSA

SEQ ID NO: 112755 - protein, 195 aa, Oryza sativa
  Clone ID: PAT_MRT4530_1660C.1.pep
MSQKTSKDEVIGGRSPSGDGDKAEEELREARSGDDDDDDEAGTRQPYNCTFCRRGFPTAQALGGHMNVHRKDRVGRATPSSSSSTTAAAARRSVSYDTLVRLFRPPASGGSEDAAASTAAGGGASLRSRTAEPAPQELRLFGRGAGRREEGGGRDRRDRYGCCSKDGDGNGGHDHGEEEELDLELRLGGSGSAGS

SEQ ID NO: 112756 - protein, 311 aa, Oryza sativa
  unsure (1)..(311): unsure at all Xaa locations
  Clone ID: PAT_MRT4530_16610C.1.pep
TGPRRHARHRRRRTRQEQQPPPPIPEPNTRWRARARAAGEPGGRQGGGGEAGASAMQEPKHTDPAAMRGAHHRRARSEVAFRLPDDLDLGGGGAGAFDEIGSEDDLFSTFMDIEKISSGPAAAGGSDRDRAAGXSSPPRPKHRHSSSVDGSGFFAAARKDAAASLAEVMEAKKAMTPEQLSELAGIDPKRAKRILANRQSGARSKERKARYITELERKVQTLQTEATTLSAQLTLFQRDTTGLSAENAELKIRLQAMEQQAQLREPLNDALKQELERLKLATGEMTNSNETYSMGLRHLTSTHPFLPSRPA

SEQ ID NO: 112757 - protein, 264 aa, Oryza sativa
  Clone ID: PAT_MRT4530_16611C.1.pep
MDPHHSSHVHAGAATPNCTCRLPKEEDLAAAVVVVDVEAAPHYTSLKAAEADVVPRGVGGGGGGGEGDGGEEVNYMARAQWLRAAVLGANDGLVSVASLMIGIGAVNENNKAMLVSGLAGLVAGACSMAIGEFVSVYAQYDIEVTQIERDGDIDGADAAAAREKLPSPTQAAFASALAFAIGGLLPLLTSGFIKPWGPRVGVVCAASSVGLAGFGAAGGYLGGANMVRSGTRVLLGGWLAMLITYAVLRLFATIFHGMNISSSA

SEQ ID NO: 112758 - protein, 40 aa, Oryza sativa
  Clone ID: PAT_MRT4530_16612C.1.pep
QASIGPFFSEREIRQYHVFGRHSMTGKIIRACLIFHYMAK

SEQ ID NO: 112759 - protein, 226 aa, Oryza sativa
  Clone ID: PAT_MRT4530_16613C.1.pep
MEPTAVATTVVTATKHVAEWQRDSTAAAAVDREASGLRNNYNKCSAITIECSDLDLSMLDRELLCEVSAFPCKYLGLPLSLGKLTKADLQPMVEKIAGCLLSWTAGQLTTIGSTLVESILTSILVHLLIAINPTKWVLKGTDKVRCGFLWQGVAEAKGGHCRLAWTKVCAPKQLGGLGIHNLDLLGVALSTKWLWSLRTAPDKPWQGLPMLVLQREKDLLLASTRW

SEQ ID NO: 112760 - protein, 534 aa, Oryza sativa
  unsure (1)..(534): unsure at all Xaa locations
  Clone ID: PAT_MRT4530_16614C.1.pep
MNRHEEFTEWHVGTECLGQLAFFGVQYSLVTFLTTQLRQGNAEAARNFSMWQGTCYIAPLAGAIVADSCLGRYRTILAFFSIYIIGMGTMALSGASPAVISRSTQPAVFSLGLYLMAIGAGCIKSCVGPFGADQFDGGDAMERPKKSSYFNWFYFAMYVGALVSGSAMVWLQDNFGWLVGFGVPALCTVLAMASFLLGSAMYRYHQAXPHGRTVVRACQVVVAAISKRNVALPHDSFVLYDGPPKCGQKLAHTDQFRFLDNAAXCGGGGGVIVGGGGGEAAAAAAQPWRLCTVTQVDELKVIVRMLPVWTRATGIVYCMVLVQQPLFTVQGRAMRRRLGFGAGAFAIPAASLHSVYAAAMLILVPLYDAAVVPAVRRLTSNKRGLTEMQRIGAGMTLSVAAMAAAATVEGRRLAAAGEVSIAWQVPQYVLLGASAVLAHIGQLEFFYNQAPDSMRSLCSALGHMTCSLGSYLSSVVVTVVSHATARGGSPGWIADDIDDGHLDRFFWLVAGLSSINLVVFICCAKRYKYKDSIN

SEQ ID NO: 112761 - protein, 146 aa, Oryza sativa
  Clone ID: PAT_MRT4530_16615C.1.pep
MMAWRDVVISNDRGFGGAAATLPCVAATVATLLIQGSLDPAFRSDQLDEYAQWWWGRGEGPLECRPGGGGEWQCYSDGVPDTGPSSERNLQHVVAVGGDVDVAREGMSFSGRRPSPFQGQQGQHFQALQPPWRRHRGVFFPSEKSL

SEQ ID NO: 112762 - protein, 423 aa, Oryza sativa
  Clone ID: PAT_MRT4530_16616C.1.pep
MAPLLLARPRHIALAGPKHATCRRRRPRPALPQISERTGCRRRSPERSGSSSAVLSGIMLFRFKVEGGWSIMLGWKGNYFPNEKRRHLYLVLDDWSRGYSIRKIDLSVGNDGDGEHSMPPAIFSFEAPRAGPKYFAGAFDSKILAMQPVDPQFSFNPMAGIPIYDVRMRSLVVGPRQRPDPVDPIYIPVGGRLFALSVGSFQLLYPPPDDESDDQEEEEDFVWGWHALPNPPFQHEHVTSYAVHRDGRTIFVSIGGESSATFSFDTAESVRNGCMWKNHGQWQLPFSGRAYFIAELDAWVGLSRKPGTTTSWRICSMDVISDDCENGQAVKYTREELATTVSDHELVTGVTLVSMGGGSKFCVVECCLDHSVSVPFIQLVTFSMMYGKNGELTTGNSRQFREYKNIPQGVSSEMLENPVAFWM

SEQ ID NO: 112763 - protein, 168 aa, Oryza sativa
  unsure (1)..(168): unsure at all Xaa locations
  Clone ID: PAT_MRT4530_16617C.1.pep
MSQVGSAGEGSNSMAAAPPPRLLLLVVLLLVPVSNAIYCEEDDCYDLLGVKQDANVSEIKKAYYKLSLKHHPDKNPDPESRKLFVKIANAYEILKDESTRGQYDYAIAHXEEVFYNTAQYYRAYYGHKTDPRAVLIGFLLIISAFQYLNXXGGYSKAIETVKQTPATK

SEQ ID NO: 112764 - protein, 469 aa, Oryza sativa
  Clone ID: PAT_MRT4530_16618C.1.pep
MEQRKYWSDQVVHVHMFIRPIVPATVQIEMDSRKVAICYYAFLVVARLDTVMKPADRQESPGEDVGSDAPDWGFFSAVVSGLQTQILLSLGNLSSQFCETQKMLITMVHDNAKFLENINNRMTNVEHNQQLQLQQVTDLTHGEQHFPRKRYIKVEYPTIIGKRVRGVNGRAVAYPYDHYEKNISTKIINVFVKHFGQTRSIKRHKHIYQAYLENPSVVPMLINYGYYDGVELGNTNQNMYKSAAVNYVNNDMIFLPIRTSIGCWYLGVLDCIRKEVCVLDSIDTTEDDLKELKFLMKGIRKCVRLVLDEKIVENPRWEDYNVPTWKIRIRFTCLAKRAGCLPSGLKMLPLKILPMKLLRFKVSHIIVVACEKCLDLALKYVECCLKHNQHFEQNEPHSNSIYLSSSSTVLAAAISAATAVQFQQQQQHSSLSSGITVQFHSSNSSSVSFQQQQSSSSSSTISSSSSTTK

SEQ ID NO: 112765 - protein, 64 aa, Oryza sativa
  Clone ID: PAT_MRT4530_16619C.1.pep
MARDARAGSAMDVGELACSELAEVVATLEESGVVDEKIEHTGLGDLLNSCAGPKVGEMRACQSV

SEQ ID NO: 112766 - protein, 1256 aa, Oryza sativa
  unsure (1)..(1256): unsure at all Xaa locations
  Clone ID: PAT_MRT4530_1661C.1.pep
MAGNENVVATTRGDSMSKDPPAEAEIGASTTSEPKKDPSAAKPCLSDRNHKPTRITSKVTRSWCPIHKTRKNTLQACWVFLNVHAEIRACKEHGIQRTSPTRDVYCPIHKTKNHDLSSCKVFLSAMKAPSPKVQQSHIPIRDKDKEQGATPISDRFVGVIDIDPHEPSVLHLLEDYGSSTTSTPREVLAIDDVGASARTNAEAENQVTTPAQHIRAVNAILRETPYDPVLNDDLARWTERLRESVTNLSNAFEEAAAVAHPEQPPTGDANDLWQQFIANFQGTYKRHAIEDDLHALTQNPGEYLRDYVRRFNECRNIIPEITNASIIRAFKSDVRDRYTTQELAMRRITTTRRLFEIVDRCAHADDALRRKNDKPKTGGEKKPAKDAPESSKKKNRKSGKRKAQSEVFATEYADPPKCLDPQGSDMKKAWCHIHKTDRHSLEDCLVFKKSLAKHMASEKGKRGAAPNMKWSEQKIEFSEEDHPKTAVIPGQYLIVVEPTIRNIKVARVLIDGDSLINLLFASTLDAMGIPRSELTPTDQPFHGITPQSSSKPLGKITLPVTFGQANNFRTEQITFDAAEFDTAYNAIIGRAALAKFMAASHYAYQVLKMSGPKGTITIQGNAKLAVQCDKRSLDMVEHTPSPPAIAEPPKKPSDMPGVPREVIEHKLMVRPNAKQVKQKLRRFAPDQKQAIREELDKLLKAGFIIEVLHPEWLANPVMVWMANGKWRICVDFTDLNKACPKDHFPLPRIDQLVDSTSGCELLSFLDAYSGYHQISMAREDEEKTAFIMPFGXNTFQRTVQGALSNQLRNNVEAYVDDIVIKTKTSDSXIDDLWETIDNLRRYRLMLNPVKCTFGVPSGKLLGFLVSGRGIEANPEKIKAIENMKSPTRLKEVQRLTGCMAALSRFVAGMGERGQPFFALLKKQDKFVWTQEAEKAFIALKRYLSNPPVLIXPQPNEELFLYIAATPYSVCTVIIVEREAGLGTRRXLHRCSISGEGDQTDWHARISSISGPALELSRSPRPHAIHLNFRATNNTAEYEGLLARIRVAAALRVRQLIVKGDSELVANQVHKDYKCSSPELSKYLAEVRKLEKRFDGIEKWVEELPSVLWVARTTPTTSNKETPFFLVYGSEAMLPTELRHQSTQVQKYSDEDQEEQRNDDVNLLEEHRERVAIQATDYQQALRRYHEKRIRARTLSIGDYIFRRVQSQAGRNKLSPKWEGPYTITQVLRPGAFKIADGDGRELANSWNIDQLRKFYV

SEQ ID NO: 112767 - protein, 57 aa, Oryza sativa
  Clone ID: PAT_MRT4530_16620C.1.pep
RWKNEEVMTVVSQCIHFIYPIIVVVCQCVILLDFSSSILPAPCVLMIQKSWNCLEHV

SEQ ID NO: 112768 - protein, 180 aa, Oryza sativa
  unsure (1)..(180): unsure at all Xaa locations
  Clone ID: PAT_MRT4530_16621C.1.pep
MFXXQQXGTXXPXPXAVTXIXXRFGXXFXSXXXXSXPXXXFPRXXXSPXXRXQPVLXFXPPXXXPXXHLXPXPHPQXFGPQXSLSRLLXXXRGHSSATTQGRPPXXPGLINXXXKFFGXPXQKXLXWGXKNXPYSXXPPPLPFGGFRPPKRKKLFWIFLFLPPKKRVKKTPIWFFKKKFF

SEQ ID NO: 112769 - protein, 86 aa, Oryza sativa
  Clone ID: PAT_MRT4530_16622C.1.pep
VGVSNVPAPLAGRHRRTTASGTFGTPSAGPWAPRPAPARTHPPRARRRRSTPLRQQPPRRRSRPPPPSAPPEPPPGRVGGRVGGRV

SEQ ID NO: 112770 - protein, 89 aa, Oryza sativa
  unsure (1)..(89): unsure at all Xaa locations
  Clone ID: PAT_MRT4530_16623C.1.pep
REGAAVAGYAPAAVREGKERRRRDPRRRPAVKGRGDGCGXAPAVVREGKERRRRLAEEGSGGGGSPRGCSGPRPQPQPELDLGYMFMLY

SEQ ID NO: 112771 - protein, 292 aa, Oryza sativa
  unsure (1)..(292): unsure at all Xaa locations
  Clone ID: PAT_MRT4530_16624C.1.pep
RLRRQWWLKAAGMASAEGVKATAVVPARRRLGARRRRWRCPXICASRPDLEGGPRWWXDLRRLATAAAVVVAAVGGGGVGXRCRWRTWRRRGGGRQRSGRWQWRRFAEAVAGIGGSDDGDXRRRGGWAFNSSGCGGGGRDSARHRLVEGSETGXLAQRGVADGSGGRLGARGAGGRDGGRXWRERRGQWWRRRPRCEEELPVVLVRSSAHEGWPAGDAGAGVPHVGRACVVVEHWCVSRGFAGGERRVKTQSGLGRTDNDGSFPLLRALSCCLTPQGRIISHTCGPKYYLRD

SEQ ID NO: 112772 - protein, 300 aa, Oryza sativa
  Clone ID: PAT_MRT4530_16625C.1.pep
MEVGGRKRGKPDGANGAGGKRARESESFQTGVGSKSKPCTKFFSTSGCPFGEGCHFLHHFPGGYQAVAKMTNLGGPAIAPPPGRMPMGNAVPDGPPTPTVKTRLCNKYNTAEGCKWGDKCHFAHGERELGKPMLMDSSMPPPMGPRPTGHFAPPPMPSPAMSTPASFGASATAKISVDASLAGGIIGRGGVNTKQISRVTGAKLAIRDHESDTNLKNIELEGTFDQIKNASAMVRELIVSIGGGAPPQGKKPVGGSHRGGGPGSNFKTKLCENFTKGSCTFGDRCHFAHGENELRKSAAA

SEQ ID NO: 112773 - protein, 120 aa, Oryza sativa
  Clone ID: PAT_MRT4530_16626C.1.pep
KTLGFPIHFVGEPPFHPLKPIKSRVCFFPVKTERFLFAKCSPPSRGLVFPPQRNPVPVKIPPLSQLCFGGPKFFLKIWFSPPPLCFSRKGFPPLKFFFPPFFWPFPREKFFFWGARSLVP

SEQ ID NO: 112774 - protein, 106 aa, Oryza sativa
  Clone ID: PAT_MRT4530_16627C.1.pep
MAWRHLGGVASGQIDGGRLTVVPMWRGVAEWRRSLAGQRHQAQGEAPTHASPPWTTDVPSHVVNLASAGEDYEAVDTRVRTAAGNQLLPIPSLEHHLHSGAAKLAG

SEQ ID NO: 112775 - protein, 340 aa, Oryza sativa
  Clone ID: PAT_MRT4530_16628C.1.pep
MSIDHLFSSSKEAAEKTMAASAMKLAMAVACALALASACHGLQLGYYKQSCPRVEAIVRDEVKKFVYKDAGIGAGLIRLVFHDCFVEGCDGSVLLDPTPANPKPEKLSPPNMPSLRGFEVIDAAKDAVEKVCPGVVSCADIVAFAARDAAYFLSRFRVKINVPGGRLDGRRSLDSDALNNLPPPNFNVNQLIGAFAAKGLDAEDMVVLSGAHTVGRSHCSSFVSDRVAAPSDINGGFANFLKQRCPANPTSSNDPTVNQDAVTPNAFDNQYYKNVVAHKVLFASDAALLTSPATAKMVSDNANIPGWWEDKFAKAFVKMASVGVKTGYPGEIRRHCRVVN

SEQ ID NO: 112776 - protein, 112 aa, Oryza sativa
  Clone ID: PAT_MRT4530_16629C.1.pep
MAGSTLVAIIIQLATSRHRRLAATCFVTWRLGCVSGCHGDPYAFISILYFRDKCHYNSHQIHAGGWVGWWQLHNTVANLTPASSLCIAFAFIHSETLSESDSAAYVAPAMGL

SEQ ID NO: 112777 - protein, 601 aa, Oryza sativa
  Clone ID: PAT_MRT4530_1662C.1.pep
MCSGPRKPSTPPLPQQQKEATVMAASLLLELAAADDVAAVRRVVEEEKVSLGVAGLWYGPSASGVARLGMERRTAAMVAALYGSTGVLGYVVAAAPAEAARASETDGATPLHMAAAGGAANAVAATRLLLAAGASVDALSASGLRAGDLLPRATAAEKAIRLLLKSPAVSPSSSPKKSASPPSPPPPQEAKKEYPPDLTLPDLKSGLFSTDEFRMYSFKVKPCSRAYSHDWTECPFVHPGENARRRDPRRYSYSCVPCPEFRKGGSCRKGDACEYAHGVFECWLHPAQYRTRLCKDEVGCARRICFFAHKPDELRAVNPSAVSVGMQPTVSSPRSSPPNGLDMAAAAAAMMSPAWPSSPASRLKTALGARELDFDLEMLALDQYQQKLFDKVSGAPSPRASWGAAANGLATASPARAVPDYTDLLGSVDPAMLSQLHALSLKQAGDMPAYSSMADTTQMHMPTSPMVGGANTAFGLDHSMAKAIMSSRASAFAKRSQSFIDRGGRAPAARSLMSPATTGAPSILSDWGSPDGKLDWGVQGDELHKLRKSASFAFRGQSAMPVATHAAAAEPDVSWVNSLVKDGHAAGDIFAQWPEQEQMVA

SEQ ID NO: 112778 - protein, 382 aa, Oryza sativa
  unsure (1)..(382): unsure at all Xaa locations
  Clone ID: PAT_MRT4530_16630C.1.pep
KPPGEPEVLGPPPXXXGPPGRGAPPXGAPPXREPXXQKSPRXGGPPXGGXXPXXXRGXSPPXXXAPPREIFXPXPXXXLLTRKXGGDPGGPXXXXPXXGPPXGXPKKNPPPGXPGGAKSPPRPXXXEKREEXGPFXXKXAGEKXKFXPXXXRXEXXXPXXXGXXGXXGKGGGNPPQNPAXXXXXSRPXXXXKKEXXXGXRXXXXXXYXXXRXGPXXGGXGGPGGKXXXPKGGPGXXGRGNPKXAPXXGARGXEKXXPXGEGXPXDQGPGVLPXPXGKGNPEXPXXVXRXEVXRLGGGGDPXXGKNPPXIXXGLGPLKGGAVEXXPXXPPKXGPPGXXFSGEXXEGGGPPXXXXXXXPXXGFFXPEKKGXGPXPKSPPXXXKK

SEQ ID NO: 112779 - protein, 297 aa, Oryza sativa
  unsure (1)..(297): unsure at all Xaa locations
  Clone ID: PAT_MRT4530_16631C.1.pep
MPLEFYKIKTVSLPSLFPSINFPFRLLLPFSRLPLCISLCIFRNACAKPSRAGRMSVHGEEDGWGGRVVHTKGRAWWPEMTTVTVAPSSGSRLAALVKSCITIVWIASALHVAVNSGQYPYGGFSPNRPMAHHRQMPERGTEEYTELERRPDAAFIRTITGQLRTLLGISLIEILSKHSDDEVYLGQRDTPEWTLDTATEAFRRFGDRLVGIEARIAEMNRVTXDPRHRNRTDPTRLPYTLLSPKAPTPPTATTSYFRGRSSSPATTLPSVDLPQRLPSHQILAPPDLPRRGEPIPL

SEQ ID NO: 112780 - protein, 128 aa, Oryza sativa
  unsure (1)..(128): unsure at all Xaa locations
  Clone ID: PAT_MRT4530_16632C.1.pep
ATHPEQELKRGNVDDNSDDDAAKEAASLTIKENIMNHPEQIAHGYAXQMDCHTAKIADKVAELDTKTDRRSDKELEKEPNGXTNGDARMANMITTKPTVAETSSEDRPVVRDAMHDMRQTVADSVIKN

SEQ ID NO: 112781 - protein, 71 aa, Oryza sativa
  Clone ID: PAT_MRT4530_16633C.1.pep
TPPPSYPSTATPAIPAKATSTNSALSNASNCGRIKCIQMWPIEGIKKFETLSYLPPLTVACSDPSECPASS

SEQ ID NO: 112782 - protein, 528 aa, Oryza sativa
  Clone ID: PAT_MRT4530_16634C.1.pep
MAAKSQPAEAAELVGSSSPAVTPPPPPTETRASDDGDSEGDDEAATDFERITDHQLQESIKRTRHSLGLCARLRDGGVKFLRRIRRMEKELDRRRAAGLRKGVITWRPTVKSPSQDDSHAFKDGDKLNWVNTSSKHHQNVPITPTTNYGQAEDSAFFKELSYFGREKHASLKKVEQSSRTTVSHQPKNHAVCPKRADDKQLHMDNKIIVNKRKLGSKSCLRKRPKNNSFDSNGMYDKLHTKDVTLGRSTKRWEHTKNHITEFRGLFDSKERNKKKDVVLLDDEDMEPAKSINVEMAHKWTDLETFELICSDIECLEPEEYLKSPVINFYMQYLRKSRTCGDLYIFNTYFYSKLEEVLSRMGDHDDSQFSKLRRWWKHIDIFRQPYIILPIHGDFLIAEWQHLQNDSSYTIPFSGRIWNHLSKNINKEKVQVPSQRNKYDCGIFMLHYIERFIQEAPERLTRENLCMFGRKWFDPKETSGLRDRIRALMFDAFESARMDDESSQSESHSDDQSGDEDKDRDGVMVVVID

SEQ ID NO: 112783 - protein, 60 aa, Oryza sativa
  unsure (1)..(60): unsure at all Xaa locations
  Clone ID: PAT_MRT4530_16635C.1.pep
MDYFHAKLLMEFYGNLXVEDLWYNWPMVRNINVIRCQLAADKPFYDNEWNNGTSFFYTPA

SEQ ID NO: 112784 - protein, 620 aa, Oryza sativa
  Clone ID: PAT_MRT4530_16636C.1.pep
MAAVAAAEKAVRCLGRGFDMAGDLRLKYCKGGGAGCLVERRGETTPLTVPGVGVIADVPADVRCDKGDRVRFKSDVLEFNKMSELFNQRSSVEGKIPSGQFNASFDLDSGSWAHDAPHTRCLAMDGYFISLFDLRLDHRHLALDAGVLADVPPAWDPSAIARFIEKYGTHVIVGLSMGGQDVVYVKQDKSSSLSPSEIKEHLDRLGDQLFTGTCAMPPLHCRSKDKFKIPEAFNVFDAQVAQQRLHGITTLVSSKEGVTVIYSKRGGNTTVSSHSEWLLTVPAMPDVINVKLVPITSLIRGVPGTGFLSHAINLYLRYKPPVADLRYFLDFQHHCVWAPVLGELPLGPCSHRQGSSPALHFSLLGSKLYVSSTEVVVPKLPVTGMRLHLEGKKNNRLGIHLQHLSTTPTFVAAARADKPPVWRGTEAVTDDRYYEPVQWRMLARVCTAPVKYDPRWCAGDRRRRPAACVVAGAQLHVVAHDAANNVLHLRLLYSQLPGYAVVQSKWARGAARPPSGRSSSFLSIPFSGSPSTSSGAAEKGGRPEQGASPVGVANVNSGVFAGGPPVPVGAQKLLKFVDTSQVTMGPQDSPGYWLVTGARLDVDKGKIMLHVKFSLLAQVS

SEQ ID NO: 112785 - protein, 85 aa, Oryza sativa
  unsure (1)..(85): unsure at all Xaa locations
  Clone ID: PAT_MRT4530_16637C.1.pep
MYVLHRQLAVEKGCAPEHTPQTMCQPXQTHTTERKAKHRTGHHYARPIATELTTPLRHEDSKTTPSRGSRRQKTPTSSIQRLDKV

SEQ ID NO: 112786 - protein, 101 aa, Oryza sativa
  unsure (1)..(101): unsure at all Xaa locations
  Clone ID: PAT_MRT4530_16638C.1.pep
RRGVVARLRRDVVAGAGRIEVGVGIVGAAESCSAATTSPAASATRQPAAIWGERERSRLDXREREAAAALIPEMRRXRRRRRRRARDDGKIRWRRRRGDAL

SEQ ID NO: 112787 - protein, 116 aa, Oryza sativa
  Clone ID: PAT_MRT4530_16639C.1.pep
MASQSAGLLFALLSFLIFPVIWAVPESLITAELSTAMPGNGGFVVWADRAFGPFSGSLMGAAAVRSILVVVLLIIGAAFRCVLPGAPPPPTRRRRRSRLRERGRLGVKNTQFCGSG

SEQ ID NO: 112788 - protein, 1970 aa, Oryza sativa
  unsure (1)..(1970): unsure at all Xaa locations
  Clone ID: PAT_MRT4530_1663C.1.pep
MFLGSARRDYSLFVNIYFTFTNMSNTGDNGNTGYKEKEAPVNTNGGNTASNSSGGPFLGWTLLVEMYTNGWIICWTIHFILLWIRKKHLQLAKEADDLVEQQRGSTQLGRTYYEILLRSENDHSAIRNAKKYFKSSMKLARVLKENPSSQKSLFLKELIDAYNNMGMLELELDNYEEAEKLLVQGLKICDEEEVHQYDDARSRLHHNLGNVYIELRNWNRAKGHIEKDIEICRKIRHTQGEAKGFINLGEVHSRVQKYEDAKLCYNKALQITKCLEDEDALMDQIHQNIETVTKAAKVLEEMKIYEQKLKKLARDTSNARGTSKERKLLLEQYAWLANLMEKARMITAWPKLKEFSKGQKRVANELHDKEKQSDSLLVIGESYQKLRNFSKARKWCMKSWNMYRSIGNLEGQALAKVNIGNVLDSCGDWAGGLSNVQLDALENMHYSHMVRFDNIEEAKKLQQEIDNLKRMSDQHEARDTVSDYCSETESEDGNVSDNILNTEDNDGNIANNSSEEFDDDVVLASLVHKSRSSKTKASKMHSSTKNVDGSCGMDESPEEDVSKSFSNHYGRKRVRVVISDDEAEEAPEIDQSKRTLTGRADSLSTSERIANTANRNRNQHTSHPIETREVDSVCTPCPAEESICSFKSGSPVCHGNDGPDLGASSIGKLSVSKPAASGSKVGTLASNSRPQGQNAVGLQSSDADHKFWVFKIGEHLVYLDANACTREGAFSIESLKVEVACVYYLQIPDDKRSKGLLPIIGELKCCGKVLDDTDSRDYIDQLASEQKSIDVVIDVIPHLIYHVYNEDWVPKRLMKLYVDFCTKLSEAPNKKLLKKLYNLEVSEDEVIVSDCGLQDLSITPFLDALKLHKTIAVLDLSHNMLGNQTIERLQQIFSSSSQTYGGLTLDLHCNRFGPTALFQVFLLSLNLFIKVKLQICECAVMTNRLEVLNLSGNRLTDACGSYLFTVLQKCKECVFCLHIVTALYSLNVEQCSITSRTVQKMADALHEGSVLSHLSLGNNNPISGNTMLSLLSKLASLKRFSELSLTGIKLNKLMADKLCLLAQSSCLSGFLLGGTNIGSGCEAIGVLLSNPQCSLRSLTLDRCNLGLAGIVGIIQALAGNDRLEELRIAENTNLALQRTLQYDEDAQDVSPGTDQNQRTNAEANDRIDPDKMEVPDSEDEEAVYEDTRAATGSDGSCASSCQRNSSSGCHAIQELADAIISAKQLKVLDLSRNGLSEEDIQSLYSAWASGPRGDGMARRHVAKEVKRLADVVCLVDIPKHQTLTKKSDSLIDDLRETFDNLRRYRLMLNPEKCTFGVPSGKLLSFLVSSRGIEANPEKIKAIENMKSPTRLKEVQKLTGCMAALXQEAEEAFIALKRYLSNPPVLVAPQPNEELFLYIAATPYSVSTGIVVEREXQRPVYYVSEALHDAKTRYPQIQKLLYAVIMTSRKLRHYFQAHRVTVVSSFPLGEVVRNKDVVGRIAKRVVELSQFDVHFVPRTAIKSQVLADFVADWTMPDNQSDNQIDNETWTMAFDGALNSQGVGAGFVLTSPSGDQFKHAIHLKFRATNNTAEYEGLLAGIRAAAELGVKRLIVKWDSELVANQVYKDYKCSNPELSKYLAEVRKLEKRQEPLEPGTFLDILTKPSVKEAIGEINTAAPDISSEVTEAEHAIVDIETTDDWRTPLIKFINSEELPEDDAEAEKITRKAKIYCMIGNDLYKKAPNGVLLKCVSSDDGRHLLLDIHEGICGSHAAGHTLVGKAFRQGFFWPTALKDACDMVQRCEACQFHSKHTKLPAQALQTIPLTWPFSCWGLDILEPFPRGQGGYRFLFVAIDKFTKWIEAVPTGEIKADNAIMFIKGIFCRYGLLHRIITDNGSQFISTDFQDYYIGLGVKICFASVSHPQSNGQVERANGIVLQGIKTRVYDRLMSHDKKWVEELPLVLWAIRTTPTTSNKETPFFLVYGSEAMLLSEL

SEQ ID NO: 112789 - protein, 195 aa, Oryza sativa
  unsure (1)..(195): unsure at all Xaa locations
  Clone ID: PAT_MRT4530_16640C.1.pep
MSSLRFLDLVKPFVPFLPEVQQPETKIPFNQKLMWTALTLLIFLVMSQMPLYGIVSSDNSDPLYWLRMVIASNRGTLMELGITPIISSGMVFQLLAGTHMIDVNLDLKSDRELYQTAQKLLAFILSAGTATVYVFSGLYGPPSDLGAGIVFLLILQLVXAGMIVILLDELLQKGYGLGSGISLFIATTSASHHVE

SEQ ID NO: 112790 - protein, 59 aa, Oryza sativa
  Clone ID: PAT_MRT4530_16641C.1.pep
YYTAIRSGYGCVRFYDSDEDKGHGVRELISDGGLVSHNRSEMGVEVVTALNYTESLPVQ

SEQ ID NO: 112791 - protein, 162 aa, Oryza sativa
  Clone ID: PAT_MRT4530_16642C.1.pep
MKKATSGTARRNDPASPSSPAVAYSHWRTASGLVSLPPVVCSRCFGATRRIFEGLSVLVRGRRCRGTPDPDFTLLRADQAAPHRLSTPPPDLKDERAAAGSICAAWFIANTVVRIPAPPRLAGRLPLPLDHAHRTVLDARLPTPCLDLAGRAKVVRCGKWLR

SEQ ID NO: 112792 - protein, 51 aa, Oryza sativa
  unsure (1)..(51): unsure at all Xaa locations
  Clone ID: PAT_MRT4530_16643C.1.pep
VFFRIGIEFDLVFSKRPLVHWLXGLGHAGGEFSRAREVLAALEKGYGEVGS

SEQ ID NO: 112793 - protein, 151 aa, Oryza sativa
  unsure (1)..(151): unsure at all Xaa locations
  Clone ID: PAT_MRT4530_16644C.1.pep
GFSPLKKNKPMFFFSQKPKVKXXGKKDKSLRELKAFXXREGNFAGXGXRGGKREKPETCFPQXGTFFYQPPPFFPXQFFLFXPXRSFXCGKERPLINPVXLFXLGQLPNFXLSQLPTQXKRGXKEPPWFFFTKPAPNXTXVXKGREFQTKP

SEQ ID NO: 112794 - protein, 174 aa, Oryza sativa
  Clone ID: PAT_MRT4530_16645C.1.pep
MFFIEFRQRVQARGDSRYSRRVGREGASGRGMHLRDDTVGREEPHQPGMSPGQGRCRRTKTTSGGSRAFLTVDGGCAVEPLRLGARKGAIFSVPAGDALTRAACRDVCQNMHTPVHDESMKPMEIASETAACNAHRRRFYVCIVCPGLASCGEFERADEEPGSNLPIGKDKSIV

SEQ ID NO: 112795 - protein, 63 aa, Oryza sativa
  unsure (1)..(63): unsure at all Xaa locations
  Clone ID: PAT_MRT4530_16646C.1.pep
KVNGEGCMPKEEDFAITSPTSRRPKGPSQPLRPVCHWANIRQLAHXRPMYPNYTVYPHRRPFH

SEQ ID NO: 112796 - protein, 51 aa, Oryza sativa
  Clone ID: PAT_MRT4530_16647C.1.pep
PVRPGSVCRPVGARRSDRRRRQARQAISAVRPEIQHRAVTPQSDTGVQRHL

SEQ ID NO: 112797 - protein, 63 aa, Oryza sativa
  Clone ID: PAT_MRT4530_16648C.1.pep
MAGGLGDLWPSTTAEGAVGGNADGEAGGGHPPTRIWWREQSAMMRAATWSAAADLLPPESGGS

SEQ ID NO: 112798 - protein, 72 aa, Oryza sativa
  Clone ID: PAT_MRT4530_16649C.1.pep
RAAAAEHGGRRHGRGATAREERRAGPMTPAWPRPPRCPASPRTGSSMARAAPPPPPPGWTKLATTTRARARH

SEQ ID NO: 112799 - protein, 410 aa, Oryza sativa
  Clone ID: PAT_MRT4530_1664C.1.pep
MRTNPTTSRPGVSTIEEKSTGRIDQIIGPVLDVTFPPGKLPYIYNALVVKSRDTDGNNRVRAVAMSATDGLMRGMEVIDTGAPLSVPVGGATLGRIFNVLGEPVDNLGPVDTSATFPIHISAPAFIELDTKLSIFQTGIKVVDLLAPYRRGGKIGLFGGAGVGKTVLIMELINNIAKAHGGVSVFGGVGERTREGNDLYMEMKESGVINEKNLEESKVALVYGQMNEPPGARMRVGLTALTMAEYFRDVNKQDVLLFIDNIFRFVQAGSEVSSLLGRMPSAVGYQPTLSTEMGSLQERITSTKKGSITSIQAVYVHADDLTDPAPATTFAHLDATTVLSRGLASKGIYPAVDPLDSTSTMLQPRIVGNEHYETAQRVKQTLQRYKELQDIIAILGLDELSEEDRLTVARA

SEQ ID NO: 112800 - protein, 59 aa, Oryza sativa
  Clone ID: PAT_MRT4530_16650C.1.pep
TQGPERQNPTKADFCRMFSYSHVKTFHKLPLKYGSAICIPINTGILRELIFRHKPPQSS

SEQ ID NO: 112801 - protein, 194 aa, Oryza sativa
  unsure (1)..(194): unsure at all Xaa locations
  Clone ID: PAT_MRT4530_16651C.1.pep
MASDMDSGKPPSGVAIDQACPKQLWINLILGSNGVVRPHLGSGGNVQAYPSVYGEFTGYCCDFMWSGQTGQGLPRESIKLSSTLRVLRFVFTEVRRSXLAAHRRSDRRHCGGQTGGHTAVRPAATGVGSRRSRRMYHSTQNPLYFGAQGINSSHSSQTSXFIHSSISTSLARRTLTVMKRACALWTCGFVAVPF

SEQ ID NO: 112802 - protein, 82 aa, Oryza sativa
  Clone ID: PAT_MRT4530_16652C.1.pep
KKAQREGCADIAFNTNASSIVSHIARKSFIVRAIQNDVLAYAYRMSREEAQRLKRTKRNEFGAFTPLQLMSCQDIYNGSNIS

SEQ ID NO: 112803 - protein, 83 aa, Oryza sativa
  Clone ID: PAT_MRT4530_16653C.1.pep
IGCRMLPSHCTMLIYRMHVMPLCDEHHMHWKGTHDHIEERYLLTVSCERLPTTVVGDITLERAAVPLRSVQLLQTAQPVLPKR

SEQ ID NO: 112804 - protein, 186 aa, Oryza sativa
  unsure (1)..(186): unsure at all Xaa locations
  Clone ID: PAT_MRT4530_16654C.1.pep
XAXXPGXXFXPRAGXFSKXXXXGFPXXEIIXGXLXGAPLPXXLXGXKPXXGXFPGDLEKXGGFRXGALXWXXXGXXPXGKIAPFXXXXGXGSXPRXXFXXHPXXXVXGGXGGPXQXGGLXKXXXPPRXGXXSXXXXVFFLXNXXXXXXLXSXGXXGYXAXXXXXHNXRXXEQNKYXEKKXKIKKKQ

SEQ ID NO: 112805 - protein, 127 aa, Oryza sativa
  Clone ID: PAT_MRT4530_16655C.1.pep
LIFNSGKTQTSSPYIDQIGSGQILLPFVAAAVGYPNLAAAVGYSNLAAAVGYPIAAPCVVTAAAAVPGEPAEAGAAGAGSRRKRRCSGTALALVALAAAAEVAVLEGTAGGVFYVGDWWLHECAKWE

SEQ ID NO: 112806 - protein, 342 aa, Oryza sativa
  unsure (1)..(342): unsure at all Xaa locations
  Clone ID: PAT_MRT4530_16656C.1.pep
PPPPPHTPHPPHRAGRGNARSTDPAAPQPHDPPPPHPXPPQPPTPHTPPLPPAGGAPTRHTPQHHTTAPHKKKKPTRPPTPXPPPPPPSHSPPPPXSLPHPPPPTPTPTTPTTHPTHPPPAHPPRNPKHNPITPPPIITPPPPPPPPSPPPHPPPPPPPPHSPTPPLTPRRPQPPPPLSHGTNPPLSLSLGPTPPPPXPPRSKRPPAGQINPPIDSLPRPPPPRPRGRFPSPPPARLASPSWLLPLARVCAVGPRFPSPSARLASPSPSRTXTPAAPLSRQPAHSLLLPASHCLPPSPIPHAPAMPRSCLVPIISTVAPETFTVEKIIFSRSKAVASHRRVA

SEQ ID NO: 112807 - protein, 72 aa, Oryza sativa
  Clone ID: PAT_MRT4530_16657C.1.pep
RFTDGHLAAAAKIDCQMSSKNTRSTFILQFGGMRLGDSDLATRPYAGNGCPGDSNPVIVASIIKTTYGGFYT

SEQ ID NO: 112808 - protein, 319 aa, Oryza sativa
  Clone ID: PAT_MRT4530_16658C.1.pep
MEYRDKLVLAPMVRVGTLPFRLLAAEYGADITYGEEIIDHKFLKCERVTNESLGTTDFLERGTDTVVFRTCPQERDRVVFQMGTSDAVRALKAAQLVCNDVAAIDINMGCPKSFSLSGGMGAALLSKPELIHDILTTLRRNLDTTVTCKIRLLNTRQDTVELARRVEKIGVPALAVHGRKVKDRPRDPAKWDEIADVVSALSIPVIANGDVFEYEDFKRIKDATGAASVMVARGAMWNASIFCPKGKTPWEDVKREYVRKSILWDNDLKSTKQTIKEMIMHYSCLEFPEGKGVNKCDTIADLAKLYGEEYYNFVLSNRN

SEQ ID NO: 112809 - protein, 509 aa, Oryza sativa
  Clone ID: PAT_MRT4530_16659C.1.pep
MDAHSDDEIAIPLSDDDERFNTPKKKPSIPLNCSSFTPDCDEEITPAVGMKFEDIEAVEKFYKSYVHTVGFSVRIGQQKKLNEVVQCKCFMCSRQGWKSKKGNEISDPSKKRPNEKIESYIWLFKTFLHAMGGKAPTLIITDEDASMKAAINQVLRNTVHRLCMWHIMKKISDKIGPLWRENKGNEWLSKSYDIRESWIPAYFMDISLAGILRSTSRSKSLNSFFNRFIHLFEKLREKIVAARDIVVLKTWENVYNDYGNLLEEIAIDSSEMAVRKKISAACNKFEDLIQKAKHSAEAIDFLTSSVLSLEAPLDQMVAGGRQTRQEEFESFLGCNIPTEVDILPTTDTHSRGRIKRIRSKENKNQGSNTSKYQGGKERIPRLCKICKEMVFHDSRNCPNKTSIRLQGFERYYIQFNLDEHFYHQWRPTTRGKDDDLFTARFVAATNGDEDAEEMQRYRIARMATKEAEGAAGGVATMVQPWVTGCGVVFGPSPRPPCTSASSSLTCKGT

SEQ ID NO: 112810 - protein, 351 aa, Oryza sativa
  Clone ID: PAT_MRT4530_1665C.1.pep
MAEYEGLLAGLRVAAGLGIRRLLVLGDSQLVVNQVFDLVRRCRACQFHAKQIHQPAQALQIIPLSWPFAVWGLDILGPFKRAPGGFEYLYVAIDKFTKWPEAYPVVKIDKHSALKFIKGITARFGVPNRIITDNGTQFTSELFGDYCEDMGIKLCFASPAHPRSNGQVERANAEILKGLKTKTFNILKKHGDSWIEELPAVLWANRTTPSRATGETPFFLVYGAEAVLPSELTLRSPRATMYCEADQDQLRRDDLDYLEERRRRAALRAARYQQSLRRYHQRHVRARSLCVDDLVLRRVQTRAGLSKLSPMWEGPYRVIGVPRPGSVRLATGDGTELPNPWNIEHLRRFYP

SEQ ID NO: 112811 - protein, 99 aa, Oryza sativa
  Clone ID: PAT_MRT4530_16660C.1.pep
RGAPFFFFFCGQTARDTSRDNHYSCAWLNGLWAGDLPSRGEWPYRNQFKGGNNHKTDSTCYARLYSAGTRTAHETHSFVTDRASTDQALTNLGTNLTKP

SEQ ID NO: 112812 - protein, 71 aa, Oryza sativa
  unsure (1)..(71): unsure at all Xaa locations
  Clone ID: PAT_MRT4530_16661C.1.pep
AXXACHSRHPPSRRVRGGEXRPHRRRPSLWAQGFAGXRSGGGEAGGGDVRRRRTAAASPPESPGGGRRESV

SEQ ID NO: 112813 - protein, 66 aa, Oryza sativa
  Clone ID: PAT_MRT4530_16662C.1.pep
RRGRGRARRPVGCAEAGTEGWRRGSGIWSPAIQDCNLYGLASGPCTLVHHIFISCIRNRWYAGTED

SEQ ID NO: 112814 - protein, 527 aa, Oryza sativa
  Clone ID: PAT_MRT4530_16663C.1.pep
MASPAASKPHVVLIPYPAQGHVTFVHTEFNRARLLRSRGAAAVAGADGLPPPGQPAELDATQDIWAICEATRRTGPGHVRALVERLGREAAAGGVPPVSFVVADGAMGFAVHVTKEMGIPTYLFFTHSACGLLAYLNFDQLVKRGYVPLKYESCLTNGYLDTRLDWVAGMIAGVRLRDLPTFIRTTDPDDVMLNITMKQCELDAPAADGILLNTFDGLERAALDAIRARLPNTIAREDGRCAAWLDAHADAAVVYANFGSITVMGRAQVGEFARGLAAAGAPFLWVIRPDMVRDAGDGDGEPLLPEGFEEEVVASGSGRGLMVGWCDQEAVLGHRATGAFLSHCGWNSTVESLAAGVPMLCWPFFSEQVTNCRYACEEWGVGVEMARDAGRREVEAAVREVMGGGEKAAAMRRKAAAAVAPGGSSRRNLESLFAEIAGGVQPIGLCQFIRGNCDIVGVKNGNEDKSILEIDKVTTVASLSTGTLPTTESTEPLNLGKFRTGASLSTDIHIAKWDICRFGFMGRAASV

SEQ ID NO: 112815 - protein, 57 aa, Oryza sativa
  Clone ID: PAT_MRT4530_16664C.1.pep
PSWGTVQTGSGATSRIQCTLNNVMIINICNYKGKEAIPYLVSRDCLHHLYVYVLGHR

SEQ ID NO: 112816 - protein, 102 aa, Oryza sativa
  Clone ID: PAT_MRT4530_16665C.1.pep
MTTCRTATSCAVHLRAEARTSSPPTPVLGLIGSLLGWPPPGGPLCYRDDLSAPVGHLHLSPSPLCSLVCLRASAPPLPWAPPSKRQPQVRQVSAAMMKTTSC

SEQ ID NO: 112817 - protein, 58 aa, Oryza sativa
  unsure (1)..(58): unsure at all Xaa locations
  Clone ID: PAT_MRT4530_16666C.1.pep
PGLGVIHHFINPRVGSGGTFPXNYTLFFQWYPVVQWGWVTLWYTNHQDVTKSPVNNIN

SEQ ID NO: 112818 - protein, 37 aa, Oryza sativa
  Clone ID: PAT_MRT4530_16667C.1.pep
MTSGGNEETLGYDQQPATKKLGHVRWDNGIGTNIVKD

SEQ ID NO: 112819 - protein, 66 aa, Oryza sativa
  Clone ID: PAT_MRT4530_16668C.1.pep
MQAAAAARDSRLALPESAGVDSDWSSRGLAMAMAVEVGVSCCDGGYGCFVLSRQRWNQRRRRRNPR

SEQ ID NO: 112820 - protein, 81 aa, Oryza sativa
  unsure (1)..(81): unsure at all Xaa locations
  Clone ID: PAT_MRT4530_16669C.1.pep
SLILSGXXATSPYPSSFLFSPTSLRFHLLLLLYILPLHLLPHGRRTPWEHQGFRIALPHKRWSFQPTKSTHRSRFAIGRVG

SEQ ID NO: 112821 - protein, 499 aa, Oryza sativa
  Clone ID: PAT_MRT4530_1666C.1.pep
MRTNPTTSRPGVSTVEEKSTGRIDQIIGPVLDVTFPPGKLPYIYNALVVKSRDTDGTAIINVTCEVQQLLGNNRVRAVAMSATDGLMRGMEVIDTGAPLSVPVGGATLGRIFNVLGEPVDNLGPVDTSATFPIHRSAPAFIELDTKLSIFETGIKVVDLLAPYRRGGKIGLFGGAGVGKTVLIMELINNIAKAHGGVSVFGGAGERTREGNDLYMEMKESGVINEKNLEESKVALVYGQMNEPPGARMRVGLTALTMAEYFRDVNKQDVLLFIDNIFRFVQAGSEVSALLGRMPSAVGYQPTLSTEMGSLQERITSTKKGSITSIQAVYVPADDLTDPAPATTFAHLDATTVLSRGLASKGIYPAVDPSDSTSTMLQPRIVGNEHYETAQRVKQTLQRYKELQDIIAILGLDELSEEDRLTVARARKIERFLSQPFFVAEVFTGSPGKYVGLAETIRGFQLILSGELDGLPEQAFYLVGNIDEASTKAINFEDENKLKK

SEQ ID NO: 112822 - protein, 456 aa, Oryza sativa
  Clone ID: PAT_MRT4530_16670C.1.pep
HQLPDPLPSAAGSSPSPSRVVAVGVAAEWGLPDLASSSDGGGLPARSAPGRPPPAPLSPSSRRRRRRRPRTPPPRAASRVASLTTPPSTPTPPAPPPSAASRVASPTTGSPSSSRLPSFSSPSRWRLVERIDEQAALPYTLCTGSGLSAHRAGPARPCRASPACWWGGPGTARRSGCAGTGPTQGGPCRAWAGPKRRAVGRAFGPRALWPTILRSEGPPSTVEEYLILRLDLNDLPKHALEKLHEVTAAVPAGGIERLRHGHDRSVRELHLQQPAHFLAQRRLADAAEPHDGEHLDMLLPDELLLDQQLDQGVRLALDADELVAVMAGVAVDAVPGVALADGEGAYLGGEAAALAVGLEAVLQPAAHAVARAAPDAEPIEADAVLGVVGELAHLLHPLPDEVVHGGAVVGLRLHPEERVHGGQLVPQLRDLAADAAELPVLLTQQLPNRAHKYSWP

SEQ ID NO: 112823 - protein, 55 aa, Oryza sativa
  Clone ID: PAT_MRT4530_16671C.1.pep
INYFTIYFYPMTSMPDSNALHMPCSTFFLLHFCNQFPFLISRTNLVKPSGNREMA

SEQ ID NO: 112824 - protein, 53 aa, Oryza sativa
  Clone ID: PAT_MRT4530_16672C.1.pep
KENFQIYCILASSYVLNIHGIHRFMAYTELHHQVQISDASTFYINFPQSYTKA

SEQ ID NO: 112825 - protein, 52 aa, Oryza sativa
  Clone ID: PAT_MRT4530_16673C.1.pep
MGLAGSGLGRWRRQWLDDGNDNDSTTHAKLAQNLRAGEASPNAKSPHCEWPY

SEQ ID NO: 112826 - protein, 130 aa, Oryza sativa
  unsure (1)..(130): unsure at all Xaa locations
  Clone ID: PAT_MRT4530_16674C.1.pep
LLRRLVFATAVADDNNVFTDRLAFAAANWCLXPPFMGIHVFTNRLAFTAVDWCLRGWLVTPPSMGIHVFTAGRRLAFIAADWCFCLYSWRTLPLLMGVFVFIISRLKLLLWLVFSLPLMDDFVPTLATSA

SEQ ID NO: 112827 - protein, 63 aa, Oryza sativa
  Clone ID: PAT_MRT4530_16675C.1.pep
GPVRTHGGGGLGAQDDDHGPTAGAYGPGGEMHARRESADGGHGVCHLSPSGPPSPEHSLSICA

SEQ ID NO: 112828 - protein, 613 aa, Oryza sativa
  Clone ID: PAT_MRT4530_16676C.1.pep
MLEKEGKLIMSREDEEIMAWFERTTRDAADVQRETLRRILAENAGVEYLRELGLAGLTDAGSFRARVPVVTHADLDPYIQRVADGDASPVLTAKPVTAISLSSGTTQGKRKRLLFNDDLLRSSIRFFHASYAFTNRAFPVEDGRVLQFMYGSRHETTKGGLTATTVMTNLLRSEEFTASMAARSRPRLPSCSPSEVVFSPDFDESLYCHLLCGLLLAGEVRAVSASFAHSIVVALQALERVWRELCADIRRGAASPARVTTPAVRRAVAPILAAPNPALADALERRCAALGDWSGVIPALWPNARYVQATMTGSMEHYVKKLRHYAGGVPLVSGNYASSEGVIGINAEQHAPPESVVFTVLPDAAYFEFIPLKPPCTDAAADDDNPAAAGSSCYVDADDANPVGLTDVVVGEHYEVVMTTFTGLYRYRLGDVVKVAGFHHATPKLRFVCRRSLILSINVDKNSEHDLQLAVDSAAKILAGDGENHKQLEIADYTSHADTSSDPGHYVVFWELNGGGEEDGGGVLQRCCDEMDRAFGADAGYAQSRKTCAIGALELRVLRRGAFQEVLRHYVAGGSSAGQFKMPRCVAPSNAGVLRVLKDNTINIFFSTAYDYD

SEQ ID NO: 112829 - protein, 252 aa, Oryza sativa
  Clone ID: PAT_MRT4530_16677C.1.pep
MADLLVGPAALRRSGPVRPAGSRQPPAAPRVARPRRRRTPRLPQHTAPHAAPAMDESDEQSNGGGGGGHRGYEWKLPAALSANTTSVHVTALDGVVNVNSLFTVAVFVGLSLADPGELRSLAGDASCDAGQGVARSLLVLEVVAFSSFLFSSLVAQGLKLALNLINSKDPHDTLHAHIDARLLRLGMLASAVGSVVGCVFLMVSMVMVVQIRLGTLGCATNRAAAKAAAGLVGLVTTALAVYVGTVFYTFTH

SEQ ID NO: 112830 - protein, 120 aa, Oryza sativa
  Clone ID: PAT_MRT4530_16678C.1.pep
SSPDCRVILVAFSRSLVVTGALLLILSCQRQPVHATRKDLLLIGSPWTMKMLHVLVGTLLSSSSSSIGCTDVDLLALAKGIEERCRRLHAWRSAHAEILVQEAPLKLVYACRLGFVNTCC

SEQ ID NO: 112831 - protein, 177 aa, Oryza sativa
  Clone ID: PAT_MRT4530_16679C.1.pep
MASAISRAAARLPLLRLSSQALLPTQIARFRSEFVQPNKPTADGIKLAQAVCDTEMNLASILLVQKSLDEKLAQHKLLSNVSLFEDKEVSQRSEEHSKQLTVQDIQMKKDELLSDIRRVEILEGTLRSLQKTRFQSQDNNICAQRLKGSEDGFTLCYSPLDFVSSAGFFYVYYYYYM

SEQ ID NO: 112832 - protein, 78 aa, Oryza sativa
  Clone ID: PAT_MRT4530_1667C.1.pep
MSTTTAYDDPDRTGNPTLGPSSSQANPGQPFHILVVEQILRIKTLTWTEPQTKPYPLDMWKYGSALQQRPELNPYSTR

SEQ ID NO: 112833 - protein, 80 aa, Oryza sativa
  Clone ID: PAT_MRT4530_16680C.1.pep
NQATFTKWHKCPFVLFAILNCCDWRCFAIVTTCIDSSIPISQHGTSLCQDIMHLQQTVCNLSMRTCLLTECLNLTGGVYP

SEQ ID NO: 112834 - protein, 289 aa, Oryza sativa
  Clone ID: PAT_MRT4530_16681C.1.pep
MSISWKACAQRQQLHRSSGMWVRHHSDIAMGVRGVRAPPLPLPIPAVHHGCVLSRVVTRVFWGMGSTRGKREDGTPCVAAWFLLRWMLGGSGWMTLAPSWVRVYGGWTRMEPAEGQKAQLHKWTKRHGMKKFASSVRSAMAKGGCANNGIIGPACWGCNTMGISATIVAPSIAKGAITATIAPAATSHLMSYFPHGACATTDTPITGDHRLTAATRGGAAAAAIDQLGRSHQPSTESEVTPPADASSRPPVTVFGSGRRGRVGAATGEAARWPSARARGGGGVNEGCGV

SEQ ID NO: 112835 - protein, 79 aa, Oryza sativa
  Clone ID: PAT_MRT4530_16682C.1.pep
QHVLWCCSRSYIPNLFFLGATRLYFFVPTKKIDLVWKVIFSSIANLDRLPIFRVIGNDTLILGWLLLVRGKRTVVALLG

SEQ ID NO: 112836 - protein, 215 aa, Oryza sativa
  Clone ID: PAT_MRT4530_16683C.1.pep
PAPPLSDTPTCYMREKGIHNCLMISTGAAVYRSNRAYASAGRGDLGFGGGLMAPTQLVDRCGGGAPASRCCEPVIACDGGVRGGAGAMGEVTHEMGCGRRRDCRCDGALGYAWGDDGGTDAPASGFGAHDWWFIRDGGLVTLPPPPPQDEFVMMMQPMIAFHLIDMVLQPQQAGPMMPLLAQPPLAMALLYSSFNIWTTLVRSNTPPPLYFTLAT

SEQ ID NO: 112837 - protein, 116 aa, Oryza sativa
  Clone ID: PAT_MRT4530_16684C.1.pep
MVTDSLSVARRASHPGLSSSLSNPMSEVTTPFHPAAPSDLRFNRFRPTFAESDWIYKSLFVCYVDREAINDDEYLIAAWLRDNKRDEEQSSHLEVRSFDFDGARQSSDLCLLSFSS

SEQ ID NO: 112838 - protein, 146 aa, Oryza sativa
  Clone ID: PAT_MRT4530_16685C.1.pep
MAAAPATTSLLSALLQLPLAPFSGRRSPPPPSVVHVAPPRSPTAAVAATKGYNVQIVVDENEGEESIFRRFRREVMRAGVLQEIKRRRRYESKKDERKRKAREAGRRNRRRRMMEEPRFPEDDADSEAARRARDDEKDNWEIDGIL

SEQ ID NO: 112839 - protein, 93 aa, Oryza sativa
  Clone ID: PAT_MRT4530_16686C.1.pep
RGRGQELISHDGLETGRRSRRQIQVGGCPPPASPPTAPAAVVEGQRSPTPRAHSPDPPPPLRAGHRRSRSRSLGRRIRPSRRRRRQIRRAPTP

SEQ ID NO: 112840 - protein, 64 aa, Oryza sativa
  Clone ID: PAT_MRT4530_16687C.1.pep
TLVAPLVIEMGGAISFLQNLNLAIVKRPRFQKHFSSSTGLFVAFKLFHRRVCLPMGNEQDFGIF

SEQ ID NO: 112841 - protein, 44 aa, Oryza sativa
  Clone ID: PAT_MRT4530_16688C.1.pep
IARAFGVDFHTRPRVQIQVSELRTPFKVWIKLNRRSYASENASF

SEQ ID NO: 112842 - protein, 82 aa, Oryza sativa
  Clone ID: PAT_MRT4530_16689C.1.pep
MSGGFGSDGLSVRLPSPMVVSLFRLRRHCRQSYSLLAVLLPRARAMDPPPRQPDQCAGIAPKVGGDRSAPRPPNLHAGSAHT

SEQ ID NO: 112843 - protein, 85 aa, Oryza sativa
  Clone ID: PAT_MRT4530_1668C.1.pep
MASKGHPPGGFFLHVQCYRRGSRRPAPRFAGRGRRWGESQRREIRPPSSSPYTCHPIQRRGRKLAGHAQPKGAPPPMGKEEWQPE

SEQ ID NO: 112844 - protein, 111 aa, Oryza sativa
  Clone ID: PAT_MRT4530_16690C.1.pep
YWVEPKIKNYIRVSDDKAQELYQSFRGSFKVFQGEVPKPLYSFTTGGIFGPQSLRKRGSLWNCFVRQGMLRPAMLHKHECFRKFIRSSGACLEYGIRTCGAAQLSPYSVVL

SEQ ID NO: 112845 - protein, 84 aa, Oryza sativa
  unsure (1)..(84): unsure at all Xaa locations
  Clone ID: PAT_MRT4530_16691C.1.pep
GGGRWRGRRRRRQRGEDFHVQPGLVSTHXGINMHTRGHCKLSHKSIQLLLAHHHPPYRGFYLSSGRTQHLTRGCIGFRSPASFN

SEQ ID NO: 112846 - protein, 765 aa, Oryza sativa
  Clone ID: PAT_MRT4530_16692C.1.pep
MAAAALPRLLLAAAVLCAAFAPVSGFTDPSDALGLWELYRTLDSPWQLSGWTSQGGDPCGRGGEQRPWHGVLCRDSSIVALNISGLGVGGWLGLELLKFYSLKILPVFNFFASLNHDDRRDVSFNNIAGEIPRNLPPSVEYLNFAANQFEGSIPPSLPWLHTLKYLNLSHNKLSGIIGDVFVNMESLGTMDLSFNSFSGDLPTSFSSLKNLHHLYLQHNEFTGSVILLADLPLSSLNIENNSFSGYVPGTFESIPELRIDGNQFQPGFKRASPSFTRSAHSPPTPHPPPSSPPPPMSPPPPAVKENLKHKPEPLKPSLSHSSMYNHNQHRKSHSRVTAAAIATVTGTAFVLLIVGLVLKSCTYSPKSTANNAKSPPANVEKVPKANEVLYSWNSLMNDCEASSSDVIKPERAMKTKVWAKTSKNFLTAKQFQAVDILAATRNFSKECFIGEGFTGQVYRGDFPGGQLLAIKKINMVDLSLSEQDELIDMLGKMSNLKHPNISALVGYCVEFGHCALLYEYAENGSLDDILFSAATRSRALSWKARMKIALGVAYALEFMHSTCSPPVVHGNIKATNILLDAQLMPYLSHCGLARLSQFVSAIRTDSEALNSGKGYVAPELTDPATDSIKADIYSFGVILLVLLTGQKAFDSSRRQNEQFLVDWASPHLHNLDSLERITDPRIHASMPPQAISTLGNIILLCIKKSPELRPPMTVITDKLLKLVQSTGLQKTSTTTQHLEVDAQEPSFKTTRPKSKCNRRLHLPEI

SEQ ID NO: 112847 - protein, 87 aa, Oryza sativa
  unsure (1)..(87): unsure at all Xaa locations
  Clone ID: PAT_MRT4530_16693C.1.pep
GRSSRPRRRRQXRTAPVANRIVESPVVPXLYRFVREELGCVFLTGEKLKSPGEECNKVFLGISQGKLIDPMLDCXLKEWNGEPLPIN

SEQ ID NO: 112848 - protein, 74 aa, Oryza sativa
  Clone ID: PAT_MRT4530_16694C.1.pep
RWTHSCAVRVWAWCPSFEYRKIVCWAHGLPAGCSCPSIVRSSLVVLGSIGAWACCLPPPSIISLEILTVVFVSL

SEQ ID NO: 112849 - protein, 67 aa, Oryza sativa
  Clone ID: PAT_MRT4530_16695C.1.pep
GTFIHALLKLPLHRRILATTSVHMVLSVPPYRSSICAHLLKTKLVTYAQAMLATNSMTLSKRFSMVP

SEQ ID NO: 112850 - protein, 122 aa, Oryza sativa
  Clone ID: PAT_MRT4530_16696C.1.pep
RPRTRGFPWRSPPPPPPSALASSSPPKPTTPTLAVATGRPVSSPSPPLPTLPAGAPAPPSVRGISRGMKMGIAAGGLGAGTGRQANSRARRRTPGDLGGAPSRTSRSGLTRAPRPRRGPAPS

SEQ ID NO: 112851 - protein, 111 aa, Oryza sativa
  unsure (1)..(111): unsure at all Xaa locations
  Clone ID: PAT_MRT4530_16697C.1.pep
MCDGKLRGRGRVARIEAGDGXGDKVGDGGGADPVRGSGGGADPICGDGGGADQLRGNGGGSNAARGDGGGAFPVRGGAGGSDAARGDGGGAVPVRGGSGGSVAARGAGGGA

SEQ ID NO: 112852 - protein, 64 aa, Oryza sativa
  unsure (1)..(64): unsure at all Xaa locations
  Clone ID: PAT_MRT4530_16698C.1.pep
MNPELHSRHPRQPAPWAPRVSRTXEHGRLTAGPHEAATRRARRRPRRRGRREAAPMPLWSPAAA

SEQ ID NO: 112853 - protein, 70 aa, Oryza sativa
  Clone ID: PAT_MRT4530_16699C.1.pep
VLCSSQSIHRQISFKPRQLPVLCEYPCIPAACIALHLLWFEIACSGGSSTTWVLGSCVGICCRMSQPPFQ

SEQ ID NO: 112854 - protein, 293 aa, Oryza sativa
  Clone ID: PAT_MRT4530_1669C.1.pep
VFIGLHSKIYHDLIGWLVEVYIDDVVVKSKEIEDHIADLRKVFERTGKYGLKMNPTKCAFGVSAGQFLGFLVHERGIEVAQRSVNAIKKIQPPENKTELQEMIGKINFVRRFISNLSGRLEPFTPLLRLKADQQFTWGAEQQKALDSIKEYLSSPPVLIPPQKGIPFRLYLSAGEKSIGSVLIQELEGKERVVFYLSRRLLDAETRYSPVEKLCLCLYFSCTRLRHYLLSNECTVICKADVVKYMLSAPILKGRVGKWIFSLTEFDLRYESPKAIKGQAVADFIPQRPHKSTL

SEQ ID NO: 112855 - protein, 59 aa, Oryza sativa
  Clone ID: PAT_MRT4530_166C.1.pep
MGFSGGFVRGSIMSMDQVGNSLTDRIEVSAHNVWIGKGGAYTGEISAEQLEDIGCQWVI

SEQ ID NO: 112856 - protein, 76 aa, Oryza sativa
  Clone ID: PAT_MRT4530_16700C.1.pep
LWAVLLLPSLITCSPRSCCCDQRHLTTQRRYCCSPHNGMTPEETSYQQDANRPPTTKKTPRWWRSIICSPLPTIIT

SEQ ID NO: 112857 - protein, 569 aa, Oryza sativa
  Clone ID: PAT_MRT4530_16701C.1.pep
MDEEARAAGCSPAPPRAPAASCGAAAELCLCSPTGVEGIEQVPGCPCFEDAGAVVVSGEAPEGPGVLCSEDGAELKLAEQGALDVRLGSPAVGIHEQQLLHRGTSGSDEAGAINEISPVEVSPSEASSNLDTAGAIGGSPLMLESLPETSDTRGCEQEVMPGVVVGSSNRDASSEVGVESERGSDADGRNGLGEGELVSSVDGGGAEKSSKVTGVLSEEGVDGMETALEPCVASVGSITQVEEGVDRMETSLDDSEASDGSTTQDFDTDVETESSGSSIEEQDMGYGVHIPHTEQAICEVARGNKSSEVKSSDRMSSVTLPTLILASGAAMLPHPSKVLTGGEDAYFIACDGWFGVADGVGQWSFEGINAGLYARELMDGCKKAVMESQGAPEMRTEEVLAKAADEARSPGSSTVLVAHFDGQVLHACNIGDSGFLVIRNGEIYQKSKPMTYGFNFPLQIEKGDDPFKLVQKYTIDLQEGDAIVTATDGLFDNVYEEEIAAVISKSLEAGLKPSEIAEFLVARAKEVGRSATCRSPFSDAALAVGYLGYSGGKLDDVTVVVSVVRKSEV

SEQ ID NO: 112858 - protein, 80 aa, Oryza sativa
  Clone ID: PAT_MRT4530_16702C.1.pep
TLVSGTFYPILSKKHDTGKLGLCLLLLSQWTMFMPVCKNTDLPPNGIAPDFCGLTIDSVGPSEKASQWAHLKVCILCRKG

SEQ ID NO: 112859 - protein, 881 aa, Oryza sativa
  Clone ID: PAT_MRT4530_16703C.1.pep
MAMKRVVFLLLLVAASALVKSSRGGGGGEEKLGKFYGWRRHLSSGPAASSLVLSGDLVDKIWSVCLQDIVSPEDTFGFGESFAWDELSSHSTEDELKATLFMELMALLPPEKSSFTYDCIRANCFSLGVPQIFSVALSNYLESQKSLVGSNFYPRRRLVDKLIGDAPSMAPAFAPSMSSGGEVHSPLSVAEAPLTPSNSLNMEPPSPYYPSKSAHKHQGVAPPVSPSEEYHDYMKVVLIAVLPTAALSFLAAFLCFYCCGCNKSKVSVGEQRDDHPLLHLQFSNLPGSSPDVHVPASPLHKDDHGVRPSNAGVSMSKCFPCCFKTSSDATTPTLVTGGTQENNATSDAPKLMPPPPPPPPPPPPPPPPPPPRPPPPPPPIKKGAPPPAPPKATMARFPKLSPTESSRSEESSASELASESSETEVNAPRAKLRPFYWDKVLANPDQSMAWHDIKFGSFHVNEEMIEELFGYGAGNQNNVKDKEISIADPSPQHVSLLDVKKSCNLAVVFKAMNVRAEEIHDALVEGNELPRLLLETILRMKPTDEEEQKLRLYNGDCSQLGLAEQVMKALIDIPFAFERIRALLFMSSLQEDASSLRESFLQLEAACGELKHRLFLKLLEAILKTGNRLNDGTFRGGANAFKLDTLLKLSDVKGADGKTTLLHFVVQEIIRSEGVREARLAMENGRSPPFPSTSDDNSNESLQEDGNYYSNLGLKIVSGLSNELDNVKRVAALDADALSTSVANLRHELLRAKEFLNSDMASLEENSGFHRSLESFIEHAETETNFLLKEDKRLRMLVKRTIRYFHGNDEKDDGFRLFVIVRDFLVMLDKACKEVGASQKKATNKSQANGNSNNPSSQSNPQEQQFPAVLDHHFDSSDSND

SEQ ID NO: 112860 - protein, 84 aa, Oryza sativa
  Clone ID: PAT_MRT4530_16704C.1.pep
LRITAVLRSPFRLILSRCRESHSIGCLDSTGHITPANIHGNYTLSELSGIVTNDLTIVNYCKYACFSALMQLTHQIMCVLPKDR

SEQ ID NO: 112861 - protein, 71 aa, Oryza sativa
  Clone ID: PAT_MRT4530_16705C.1.pep
PTNEVRTTTWMFIGMVWLGLGCMPFGIHEGTLSPSTQLQISKFWMPSINQILKNELKPQKIYHEFHIYRRG

SEQ ID NO: 112862 - protein, 506 aa, Oryza sativa
  Clone ID: PAT_MRT4530_16706C.1.pep
MATELTEYLLLLPLLVVPLLYLAASSSRRSGRLRLPPGPWALPVIGHLHHLALAGAPTHRAMRDMARRHGPLMLLRFCELPVVVASSPDAAREIMRTHDVAFASRPIGPMLRLVFQGAEGVIFAPYGDGWRQLRKICTVELLSHRRVHSFRPVRADELGRLLRAVADQAASSSSSPVNLTGMISAFVADSTVRAIIGSRSRHRDTFLRLVEDGLKIMPGMSLPDLFPSSRLAMLLSRVPAKIERRRRGMMGFIDTIIQEHQESRAAAEDEDLLDVLLRLQKDMDSQYPLTTMNIKSILIDMFGAGSESSATVLQWTMAELMRNPRVMQKAQDEVRRALAGHDKVTEPNLTNLPYLRLVIKETLRLHPPAPLLLPRKCGSTCKILGFDVPEGVMVIVNAWAIGRDLTYWDKPEEFVPERFEHNGRDFKGMDFEFIPFGAGRRICPGITFGMAHVELVLSALLYHFDWELPQGMAAKDLDMTEDFGVTTQRRSNLLVRPIHRVSVPVE

SEQ ID NO: 112863 - protein, 269 aa, Oryza sativa
  Clone ID: PAT_MRT4530_16707C.1.pep
ALGPKLAAALVIVAGDTSSRFGVDRVLSARPLTFMGGNAYGLYLWHWPILVIFLVWQGRQSVGWFTGSAIIVAAVVLAIVSTRFIERPARRIKWVEVAWYRSVPVVLGCVIIAAVPLVSWQGYLKNQVAEASKNSSADNPGAAALIPGFEFQAIQPIQPRDLEQRCGGLRMANVTSNRFPVEQQRAGKSIVVIATAFPTVDAALNTNGREQLAAGFDHQSGLPLHGQCASATADCNAFNQEATDYVTERKPDAVLTVGTVASRHHRMKP

SEQ ID NO: 112864 - protein, 101 aa, Oryza sativa
  Clone ID: PAT_MRT4530_16708C.1.pep
FQVYLGATLGLHAYNLALNSGGDGRARRNTRSPLPLGGRRGRRIWCLSCCFDGGKNGEGEGEELGQRTARALLTSLLWVPDCAVELPEMVARAGLRCRTPH

SEQ ID NO: 112865 - protein, 220 aa, Oryza sativa
  Clone ID: PAT_MRT4530_16709C.1.pep
MSDAQAQPIRPGDVYPPSAADHHQARRERDKAVAADQGGGGGDLRVTEADLPTAGKRVVTATAGGQVMAQFTVPVPSAEEETTDAVTIGEALQAAGSDDNEPVGLADAAAVQAAEMRTTGLAGVVPGGVAAAAQQAAEANMRRRPDGDDGENKATTTTLMKDVVGGAAEALPADMVATREDADRVAAAAARNAARRGGGGGKGVAEAVAAAAEMNEGRMV

SEQ ID NO: 112866 - protein, 67 aa, Oryza sativa
  Clone ID: PAT_MRT4530_1670C.1.pep
QQPSTPTPSGPKTTTAPALLSPPGPDSPPKRPYSPLPSSPPKRPDSFTKNGFHSPISSNMTVSSSAT

SEQ ID NO: 112867 - protein, 200 aa, Oryza sativa
  Clone ID: PAT_MRT4530_16710C.1.pep
MVIVIDSASFSSEIEIQVQLHISGALDYMRPNTNGSLVGMVKMTTGNPRCPPQNQNIHSLRSGHRVPVDVLPPDGKLLASFRTSLGSFLAAHRSPLPREECGRRDEGPHGPPRAPLPDLHRGREQWRAPRLRPWPVDAHNLVIHLDNARVAEQHPREKKREEKKETRHVAAQASELCSLATARLDGCFLQPQIGSARRAA

SEQ ID NO: 112868 - protein, 169 aa, Oryza sativa
  Clone ID: PAT_MRT4530_16711C.1.pep
MTEALLCLPQRQADSGAPERCWLKKITDLMGATHLQAVAAGLASRFGSMSHAALSSSRSHAARPAPHQGIVRGGLPREWNEHGYICACPNELWLHKDAPVNLEDQRERRENNVRREEWYAKFLPSLTEKYDVFVNLVEFLQIYTIAIQADKGDDNMMANYFPIILKAQA

SEQ ID NO: 112869 - protein, 50 aa, Oryza sativa
  Clone ID: PAT_MRT4530_16712C.1.pep
MVLQLKKQDGSVTAEAGQEERRRTGNCCKLDQEVVLQLKEEKSEFHQENP

SEQ ID NO: 112870 - protein, 172 aa, Oryza sativa
  Clone ID: PAT_MRT4530_16713C.1.pep
MAKGLLKGTTAHRAFFWQGLALAKLACLAIWLSSYSLRPRSLLLTRSISSEVRVLRNMAFAMWLSPMQPSRVWSATASPRSSPSGRRTSWYTSNKPLTGKAFLYFSVMAPRKPAPASTTGLDPGKIDEEHTGYLGASLIDEAELAKLVSIRVVTEEQAFASGKAVVPKPDEN

SEQ ID NO: 112871 - protein, 1518 aa, Oryza sativa
  Clone ID: PAT_MRT4530_16714C.1.pep
MNNTMSLLLLLLGLSILAMNSTAATTDNGQFIYTGFAGANLTLDGVATVTPAGLLQLTNGTSALKAHAFHPDPLHFRDLPVAGGGGSGNGNGNDVHSFSVSFVFAILSIYPNLSSHGMAFFVSPTKNLSAAAPRSYLGLFSNKTDGDVANHIFVVELDTIQNTDFMDINNNHVGVDINSIRSVRSYPTGYYDDGDNGNLKNLTLNSHEPMRIWIDYDQETTRIDVTVAPLEISKPKRPLGSVIYNLSTVLTDSAYVGFSSSSGDIDSQYYVLGWSFAINGAAPAIDISKLPKLPREGPKSSSKVMEITLPIATAMFVLVIGVIVLHLLRRQLRYAELREDWEVEFGPHRFSYKDLFDATQGFKNKSAKIFKIEVAVKRISHESRQGIKEFIAEVVSIGRLRHRNLVQLLGYCRRKGKLLLVYEYMPNGSLDKYLHGQEDKNTLDWAHRFHIIKGIALGVLYLHEEWDQVVVHRDIKASNVLLDSDMNGRLGDFGLAKLYDHGVNPQTTHVVGTMGYLAPELARTGKTSPLTDVFAFGAFLLEVTCGRRPVEHNRQDNRVMLVDRVLEHWHKGLLTKAVDERLQGEFDTDEACLVLKLGLLCSHPVPQARPSMRQAMQYLDGDMKMPELIPANLSFGMQAMMSNEGFDSYMMSYPSSSMVSHGTFMSGLSGGSLMNVQAEIQKPESKQYSEYSSPFDLQSTNAEERVVTADTWNRIHRTWNRIHRFCHYHFRSVVLYRIRVQQQYRWHVTPTNLADPAARVAFKLKHTRTTIKGWMQANRKRGILCEDCKFTIDYLDCIEEFRRLSEWGTVPPSSGARQISFGGARQAGILETKRKAFFKAHATKNFRNSRIKTIKHDGIEVADHFGKSQLMFSFYSRLLGSSLQPSWEFDLQHLYSDEGRDSNLLAAQGLPFSQEEILLALQAMNSNSAPGPDGFSPSFYRAAWNTIKEENCSVKILSKVLATRLQRVFLRMIHLDQTGFLKGRCISENLIYATELIQACYRRKCQTIIVKLDFTKAFDSVIWSSLFKILAVRGFPENWISWIKGLLSSSKSAVLLNGVPGRWICCKKGLLQGDPLSSYLFILVADVLQRLLERNTEIRHAIYQDRPCTTIQYADDTLIIYRAEEADVLALKETLLQFSKATGLQINFAKSTMITLNVDQSKELVLSGLLQCKLEKFLMSYLGLPLSIHKLSAADLQPLVNKVDGFLSGWEASLLSQAERLVLINAILSSLPVYAMSAFKLPPKIIEEIDRRRRAFLWTGDDVCSGAKCLELLQNFSLSDEMDFRLSAKLGKLTTRKFYEARLPPGLPSPIWDLIWKCRAPLKVKLFAWLLAFWTQINIQPQAQDITQFHRLGPTMQVLALHWQDLQLYPIFLKTNPPFALTFNPVRWVPREWIRIQAPIPSQSSGQHPKTLEEAAAVPASACAATAAAPLELVCDGRGSSGTRGDTDDGSGKKRGDGGETNVCAVTAAVPAGGAATVALKCESTASLRRGGSCVSSPLRGEAVGIKVGAKIQQQSRV

SEQ ID NO: 112872 - protein, 51 aa, Oryza sativa
  Clone ID: PAT_MRT4530_16715C.1.pep
MSGDQADDVREELSVGRDNSAFVENVLDGGVYSTTTYSNVNIRDYVNRKQA

SEQ ID NO: 112873 - protein, 117 aa, Oryza sativa
  Clone ID: PAT_MRT4530_16716C.1.pep
KLAPANLGNPGVERGCFGLGPKGRHGPPGDGLRASGGNLHWPGFFFELSGGDYSSPPHNCLGFFQQPTFLGGLIGSREIEGGLNFYRGPPFWPPLFPGAGEGPGLFELVPPEGALFS

SEQ ID NO: 112874 - protein, 96 aa, Oryza sativa
  Clone ID: PAT_MRT4530_16717C.1.pep
PCREKYTFSRPRTIVHLYKKARELQLHQTSVTRKPFGICMLDLALLTRGEKLVGLGVERDLAHRATDAITASAENTKGWWCRARTRLLSWTVERHV

SEQ ID NO: 112875 - protein, 129 aa, Oryza sativa
  unsure (1)..(129): unsure at all Xaa locations
  Clone ID: PAT_MRT4530_16718C.1.pep
FXPKXXXAPLEXKXPPGGPGXPPTGGGXXXXGXKRXEISLGFSXGXXRVXSPXFXGXFXXXFXPXLWXXSGDXFGXEXXPXGPXQRXXFRNLGLEEGXXRVXFWGXFWWXXEIXFCAPWSVPRXXXXXX

SEQ ID NO: 112876 - protein, 42 aa, Oryza sativa
  Clone ID: PAT_MRT4530_16719C.1.pep
MFQSTIIDHGCNRGAEAACRVPLQQQPVAPKVTCKGTKYKLD

SEQ ID NO: 112877 - protein, 300 aa, Oryza sativa
  Clone ID: PAT_MRT4530_1671C.1.pep
MSWHRAGVLLLGAQSCLPVPGVPAVGGVGSVLLFMARMGWELCHVFRPYTVVLWTLRYSTFRRNNRCFVAYVVDPQIFDVSPKQPLLRGLWPLAKYTLELCVSTPPPVAAAAMKECVLDEYATKHRISIDRFLQLRIFVKVHDRFNASRIFLYMYSCSMKMLSFGVPCKEKAEYECNRLPAMIDAHLFRDYHLAFWFGLFCAWGQPQDGDLHLWLPHQCRCHLVYFVHFDALLLCKPWLLNALFWLDSQLQGRVTRSEGRMGLDCGDSLVWPCVTRFAKLGKKKEVEENNYTMEVTKQTM

SEQ ID NO: 112878 - protein, 238 aa, Oryza sativa
  Clone ID: PAT_MRT4530_16720C.1.pep
MEPLSIFQLSVPRGEFYEPPPSSEHILSPGYQIRPKFISMVREKSFSGLGQENPYHHLREFEQLCSCLKIRGMKQEVVQWRLFPFSLHERAKQWYTSTVECVNGNWEKLRDRFCLAFFAVTRITTLRVEILSFRESAFYLDITAGGSFMHKTPAEGKEILDRISENTSFVGQCVEPHPEAFVSGSEEPSFAKPETEPSTCSGLTKESSLKPSPDSKDIQAPGCAPIFRDDPHSDYEKT

SEQ ID NO: 112879 - protein, 497 aa, Oryza sativa
  unsure (1)..(497): unsure at all Xaa locations
  Clone ID: PAT_MRT4530_16721C.1.pep
MERPLFELFAPRGEFYEPPPSSEPILTPGYEICSEFISMVREKSFSGFGXENPIHHLREFEQLCSCLKIRGMKQQTVRWKLFPFSLREGAKQWYTFTVGCVNGDWEKLRDRFCLAFFPVTRITTLRVEILSFXQINKESIGAAWSRFTNLVQSGPTLSIPDYVLLQHFQTSLDRESTFYLDITAGGXFMHKIPAEGKEILDRISENTSLVGQCVEPHPEAFVSGREEPSFAKTEPKPSTSSSLTTESSMKPSPDSREIQAPGCAPKFRDGPHTDYVKTLIGILPDNTPIEEVMAVLLHESPESTLELHSKEPPSQPPIEREPCPSGHQNVVLDICQETTLFLHDASLEKENLQAMDKLETSTLEDENSTNEHESFSFKXPQWSCSHKESPESCLISATFLCENHNHLTVLNSIMFRRVELVTINKALPGDTPDYLVGTCIIAXKKRCILRLFSIAPTEHAFKAQGYCTRGNKKTTKEQCTITSTFIALSLVLTRLSI

SEQ ID NO: 112880 - protein, 110 aa, Oryza sativa
  unsure (1)..(110): unsure at all Xaa locations
  Clone ID: PAT_MRT4530_16722C.1.pep
SPDSKEIQAPGCAPKFRDDPHSDXEKTLTGILPDNTPIEEVMAVLLHESPPIEPEPCPSGHQNVVLDICQETTFFLHDASLEKENLIWHGQNAYLRHNPHQDGGDIDNYM

SEQ ID NO: 112881 - protein, 101 aa, Oryza sativa
  unsure (1)..(101): unsure at all Xaa locations
  Clone ID: PAT_MRT4530_16723C.1.pep
SKRAHYVINELHRYFTHIIIHYXALYIYRKYTQKLRDVYFLQQHFVVFNSLLQRSSFQHTHVEILSTYNIKASFNLICFPSSNRSKGHTASSSIVRRCIHR

SEQ ID NO: 112882 - protein, 135 aa, Oryza sativa
  Clone ID: PAT_MRT4530_16724C.1.pep
PPARHAAVLVLVVEFGEMRKKAMVAVGEGDEQAGLPPHPVSSSRTQAPHTPVCLAAVPRWARSSFTRIHHLYQRKPPRIYLEDGDTRAGRKSPTYSSMPAATATISSIPPTFSVLSAAHPHLHLPQPRDDQLSIQ

SEQ ID NO: 112883 - protein, 330 aa, Oryza sativa
  Clone ID: PAT_MRT4530_16725C.1.pep
MKQETVRWKLFPFSLHERAKQWYTSTIGCVNGDWEKLRDRFCLAFFPVTRITTLHVEILSFQQINKESISAGWSRFINLVQSGPTLSIPNYVLLQHFHTGLDRESAFYLDITAGGSFMHKTPAKGKEILDRILENTSFVGQDGPHTDYEKTLTGILLDNTPIEEVMVVLLHESPESTLEQDDLHFIQKDSGETLELHSKEPPSQPPIEPEPCPSGHQDAVLDSCQETTTFLHDASLEKENLQAMDNIETSTLEDENDTFEHEISSFKFPQESCSHKESSEFCPFSITSLCEDHNHLSGLIFNMFRRLVVDAFIYHKYCKSRICCGTNLGV

SEQ ID NO: 112884 - protein, 64 aa, Oryza sativa
  Clone ID: PAT_MRT4530_16726C.1.pep
PRCTPTSRWWRRRWWRRRRGRTLHKHSTTLYNLINTLKNPSILKHQKHLSPKFCRLIVLLNSVV

SEQ ID NO: 112885 - protein, 156 aa, Oryza sativa
  unsure (1)..(156): unsure at all Xaa locations
  Clone ID: PAT_MRT4530_16727C.1.pep
MCAATWKSERRTRQGPTPYAHRGDKSMLKRLIHGFYAAAIVRLPIDEMPALLPAILDSNLYFGPLDPVSNIVTNVVSRLPPAANVMASAXLKALXVLRYLHTTEEDLATVHLIEADCCTHTFDVGSGTTKTTLRCTXGATGHTDMDSLTMAMLTPL

SEQ ID NO: 112886 - protein, 362 aa, Oryza sativa
  Clone ID: PAT_MRT4530_16728C.1.pep
MEPQSIFQLSAPRGEFYEPPPSLELILTPGYEIRPEFISMVREKSFSGLGQENPYHHLREFEQLCWCLKIRGMKQETVRWKLFPFSFHERAKQWYTSTVGCVNGDWETLRDRFCLAFFCVTRITTLRVEILSFQQINKESIGAAWSRFTNLVQTGPTPSIPDYVLLQHFHTILDRESAFYLDITAGGDDPHSDYTLTGILPENTPIEEVMAVLLHESPESILEHDDLRFIQKDSGETLELHSKEPPSQPPIEPEPCPSGHKNIVLDICQETTLFLHDASLEKENLQAMDKFETSTLADENSTNEHESFTLKIPQESCSHKESLESCPISTTSLYENHNHLTFFNSSMIRSLVVDAFIYHKYC

SEQ ID NO: 112887 - protein, 65 aa, Oryza sativa
  unsure (1)..(65): unsure at all Xaa locations
  Clone ID: PAT_MRT4530_16729C.1.pep
LPAILDSNLYFGPLHTTEEDLATVHLIEADCCTHTFDVGSGTTKTTLRCTTGGXGHTDMDSLTMA

SEQ ID NO: 112888 - protein, 639 aa, Oryza sativa
  Clone ID: PAT_MRT4530_1672C.1.pep
MVNTRSNGNGPKNNNNNNNGENPTLAQVLAQQTQLMNMMMQQLQNQQNQGNNHAPPQNKLAEFLRVRPPTFSSTTNPVEAGDWLHAIEKKLDLLQCTDQEKVSFASHQLHGPASEWWDHFRLNRTTAEPITWLEFTAAFRKTHIPSGVVSLKKKEFRSLTQGSRSVMEYLHEFNRLARYAPEDVRNDEERQEKFLEGLNDELSYPLMTGDYSDFQKLVDKAIRQEDKYNRMEQKKRRIAQFKTQQGNNQKPRLTLGPQSMPQGGSSSVVRPQRHFFNNNAGNNIRNQAPRPVAASTQQQPAKREQGSKPVRQRLVSIMSLLQKPKMLQMSSLNQIALEEIPIVREYPDVFPDDLPGYYRRFIENFSKIAKPMTRLLQKDVKYKWSEECCVLMQDGKVVAYASRQLRPHEKNYPTHDLDFAPPSPPSLQPCAAAVPVIAVAREDRRRGHQVAAVLVRPFAVAEDRRSTVAVVKPKSSAVSTSSPSPSVGLPPLLWSSVRTEVRNLGRPSSFTAGHRSSAVAANPSRRRHPPRRRPSSFIVCRRGEYHRVRLDVLYAALAPCALAPPSPPSLQSCAAAVPVIVVAREDRRRGRQVVAVLVRRFATVGDRRSIVAVVKPKTAAVSTSSPSPSLGLPPSLWSP

SEQ ID NO: 112889 - protein, 515 aa, Oryza sativa
  unsure (1)..(515): unsure at all Xaa locations
  Clone ID: PAT_MRT4530_16730C.1.pep
MERPLFELSAPRGEFCEPSXSSEPILTPGYEIHPEFISMVREKSFSGLGQENPYHHLREFEQFCSCLKIQDMKQETVRWKLFTFSLHDRVKQWYTSTVGYVNGDXDKLQDSFCLAFFPITCITTLRVEILSFQQINKEPIGAAWSRFTNLVQSGPTLFIPDYMLLQHFQTGLDRESAFYLAITAGGSFMHKTPAEGXEILDRISENTSFVGQCVEPHPEAFVSRREELSLAKPEPKPSTSSGLTKESSVEPSPDSKEIQAPGCAPKFRDDPHSDXEKTLTGILPDNTPIEEVMAVLLHESPESILELHSKEPPSQPPIEPEPCPSGHQNVVLDICQETTFFLHDASLEKENLQAMDKLETSTLEDENSTNEHESFSFKVPQCSCSHKESSEFCLITITSLCENHNHLLGLTSNMFRRLVLDAFIYHKYCKSHMCLXVLILQRHVSMVELVTINKALPGDTPDYLVGTWIHAXRRCILSLFSIVPTEHAFKAQGSCTRGXKKTTKEQCTITPTPIP

SEQ ID NO: 112890 - protein, 545 aa, Oryza sativa
  unsure (1)..(545): unsure at all Xaa locations
  Clone ID: PAT_MRT4530_16731C.1.pep
MESQSIFQLSAPRREFYEPSPSSEPILTPAYEIRPEFISMVREKSFSGLGHENPYHHLREFEQLCSCLTIRGMKQETIRWKLFPFSLRERAKQWYTSTVGCVNGDREKLRDMFCLAFFPVTRITTLRVEILSFQQINKESIGAAWSRFTNLVQSGPTLSIPDYVLLQHFHTGLDRESAFNLDITAGGSFLHKTPAEGKEILDRISENASFVGQCVEPHPEASVSGREEPSFAEPEPEPSTSSGLTKESSVEPSPDSKEIQAQGCAPKFRDDPHTDYEKTLTGILPNNMLIEEVMAVLLHDSPESILEQDDLQPPSQPPIEPEPCPSGHXDVVLDSCQETTSFLHDASLEKENLQAMDKLETSTLEDENSTNEHESLSFKVPQCTCSHKESSEFCPISITSLCENHNHLSGLTSNLFRRLVVDAFIYHKYCKSRMCLXALILQRDVSMVELVTINKELPGDTPDYLVGTCILAXKRCILRLFSIAPTEHAFKAQGYCTRGNKKTTKEXCTITSTFIPRSLDYEKADVQGTKQSKCNTLLHLHKTIK

SEQ ID NO: 112891 - protein, 797 aa, Oryza sativa
  Clone ID: PAT_MRT4530_16732C.1.pep
MGGKNLVVLFLVSVVMAMVPGSTQLQASQTWSLLKIQQMLGYPAVLGHWHNYTDFCYGGDYKTTSAFVECYGDSVTQLHIIGGGGGSPTPPPLPKTFSIDSFFTTLSRLPDLRVLTLTGLGLWGPLPGKVSRLAALEIVNVSGNYLYGELPLALSRLGNLQTFIADDNMLSGELPAWLGRLPVLAVLSLRNNSLEGTLPGSVSDMASLRSLSLASNNLSGNLPDMSGAKNLQVIDLANNSLGPEFPRLGRKVASVVLAGNRFSDGLPPELASFYLLERLDVSRNRFVGPFMPALLSLPSIEYLSVAGNRFTGMLSGNMSCGNNLKFVDVSSNLLTGSLPTCLAAGAVGKAADSDSDSSKTVLFSANCLATGDDTQHPSPFCKNQAIAVGIVPDQARRKPSGARSGLVAGVVAAAIAAAVLAGVAVFLAVRKASMRRAQARPPRRLVEHASSAYPSKLFADARYISQTVKLGALGIPAYRSFSLVELEAATNDFEVSNMMGQDSHGQMYRGRLSNGTPVTIRSLKVKRSQTSQSFNHHIEMISKLRHRHLVSALGHCFEYNLDDSTITQLYLVFEYVQNGNLRGRISQGTEGRKLTWVQRISTAIGVAKGIQFLHGGIIPGLFANNLKITNILLDQNLVAKIGSYNIPILSETMKSEGGSGNKYPSDSVPNGDKLDIFDFGVILLEVISGRPITSIYEVEIMKEQLQSALTAEGTAKRRSFVDPAVSKGCSDESVKTVMEICLRCLAKEAVQRPSVEDVLWNLQFAAQVQDDWRGDSRSSEESPLSPSQIPRDLEDDQ

SEQ ID NO: 112892 - protein, 97 aa, Oryza sativa
  unsure (1)..(97): unsure at all Xaa locations
  Clone ID: PAT_MRT4530_16733C.1.pep
HHRRPWHGFHATTGKRGLGWANRGHQREEDDDANSLVQRTTTXATRFDGGSARLNDGDGAPVVFGGCEGAAEVLLLRAHPTAATDGNGDGYRGGATR

SEQ ID NO: 112893 - protein, 286 aa, Oryza sativa
  Clone ID: PAT_MRT4530_16734C.1.pep
MARGGAARTQRRREAATGGDRPAAEGDGVAAMGAAIAAGGWGRTRQHFHMGLNRESAFYLDIIAGGSFMHKTPAEGKEILYRISENTSFVGQCVEPHPEAFVSGREEPSFAKPKPEPSTSSGLTKESSLEPSPDSKEIQAPGCAPKFRDDPHSDYEKTLTGILPDNTPIEEVMAVLLHESPESILEHDDLRFIQKDSGETLELHSKEPPSQPPIEPEPCPSGHKNIVLDICQETTLFLHDASLEKENLQAMDKFETSTLADENSTNEHESFTLKIPQESCSHKESL

SEQ ID NO: 112894 - protein, 177 aa, Oryza sativa
  unsure (1)..(177): unsure at all Xaa locations
  Clone ID: PAT_MRT4530_16735C.1.pep
LVAVVIEHIDCARRHCLWRKTIDPQTKSHSLAAWDIVCRLTNRGCMGIINLEHQNIALLMKHLDKFFNKRNLPXVRFLWSKYYHNKPLPPQPMYENGSFWWKDIFQLIPLFRVISTLQIHQGNIALFXKDHWGNDILKSXFPSLFSFAISEDISVSAFHQQDLXDNFQLPLNTQALQ

SEQ ID NO: 112895 - protein, 53 aa, Oryza sativa
  Clone ID: PAT_MRT4530_16736C.1.pep
RAYGKRIITPCRHFFLYPCNTSVSNVISFCYLPASALKIFAEVVIFVDLYTSF

SEQ ID NO: 112896 - protein, 76 aa, Oryza sativa
  Clone ID: PAT_MRT4530_16737C.1.pep
HLYTLDPRPCELNVTATLWMALITRLDMFSHHPAPLSTPLPRRLCRHVYVSDAEGATTSPAPRLALPMGHNSGASA

SEQ ID NO: 112897 - protein, 63 aa, Oryza sativa
  Clone ID: PAT_MRT4530_16738C.1.pep
TTLLLAVTDINTDYDVCTLADDVHARRPLHNLGPAAFNVFQVIYQTLRLPSIRLSGTHPCIDQ

SEQ ID NO: 112898 - protein, 81 aa, Oryza sativa
  Clone ID: PAT_MRT4530_16739C.1.pep
HNPPLTIHTTLRFHAHPIPRRWTVPSSAVVNPAAGQPDTPADPTPSRPPSPPVPRKGSSYITDQAVTHSRLWQALYVFQGF

SEQ ID NO: 112899 - protein, 1127 aa, Oryza sativa
  Clone ID: PAT_MRT4530_1673C.1.pep
MSSVCAAAPSFAVDSWTRVYTHMPRYKPEYLFGTKGFVQELRTMSFAIGFGTAPLYAQIPHDRDEEKCRVKVTLNSNREDIPSVMFEAGWGSYIHACQEVARITIGELRESYNDRLANTKYRYHPRQPQGSDRGSYLEPAGIENDATTRHLVEMLWAMDETRAEIVIAAQDREDRNRGKICKLEDKVDHLEKELAALTGEAPPKKARVCLTARKRALFVPRYQLAPKVRVVEKEATPAPADPPVVNQLQNQQNQGNNHAPPQNKLAEFLRVRPPTFSSTTNPVEAGDWLHAIEKKLDLLQCTDQEKVSFASHQLHGPASEWWDHFRLNRTTAKPISWLEFTAAFRKTHKPSGVVSLKKKEFRELTQGSRSVTEYLHEFNRRARYAPEDVCTDEERQEKFLEGLNDELSYPLMTGDYHDFQKLVGKAIRQEDKYNRMEQKKRRIAHFKAQQGNRNHGMEVEDLRRPLMVSTPSNQALSSQRSPSVRIEIQGVPFLANLILLESKDLDVILGMDWLARYKGVIDCANRKVTLTSNDGEVVTVHALSSEPLRSSLNQITLEEIPIVREYPDDLPEEHEEHLRLALEKLREHQLYAKFSKSGGVAVDPSNVESVTNWKQPKTVSEIRSFLGLAGCVLMQDGKVVAYASRQLRPHEKNYPTHDLELAAVVHALKIWRHYLFGTRIEVYKDHKNLNRGFVAALEAKPTLIDQVREAQINDPDIQEIKKNMRRGKAIGYLEDEQGTVWLGERICVPKNKDLKDAILKEAHDTLYSIHPSSTKMYQDLKERFWWASMKREIAEYVAVCDVCQRFKAEHQKPAGLLQPLKIPEWKWEEIGMDFITGLPRTSSGHDSIWVIVDRLTKVAHFIPTDGQTERVNQILEYMLRACALDFGGSWDKNLPYAEFSYNNSYQASLQMAPYEALYGRKRRTPFLWDQTGERQVFGTDILREAEEKVKIIQERLRIAQSRHKSYADNRRRDLSFEEGDHVYLRVTPLRGVHRFHTKGKLAPRFVGPYKIVSRRGEVAYQLELPQSLAGIHNVFHVLQLKKCLRVPTEEANLEQIEVQEDLTYVEKPIRILEIDERRTRNRVIHFCKVQWSNHSEEESTWEREDELKSAHPHLFASSSESRGRDSI

SEQ ID NO: 112900 - protein, 109 aa, Oryza sativa
  Clone ID: PAT_MRT4530_16740C.1.pep
MILKTVVKQAAKYWPRRERLDAAIDHVNTEGEEGINFSAERQPERDVTPAGDEIIKEINDVLIAMDKTWEENLLPVCSQIFRRDIRDSSELTQAEAVKALGFLKKKAAA

SEQ ID NO: 112901 - protein, 1034 aa, Oryza sativa
  Clone ID: PAT_MRT4530_16741C.1.pep
MAVSLQDWSKISFGSVRKEIQRLERRLKFLRNEVFTDAIIREERLLEQQLCDLFEREEIMAKQRSRIEWLKEGDRNTSFFHARASARRRTNKIKLLVRDDGSSCSESQGIKLMAEHFFKKLFTSEQCESVEEVLEAIPCKVDESINEELCKAYSDEEIKEALFQMGPTKAPSPDGFPALFYQSHWNFLENDICRAVRGFLTGDEIPEGLCDSIIVLIPKIHNLVHLSKFRPISLCNVLYKIASKVLANRLKIFLPDIVSEFQSAFVPGRLITDSALVAFECLHSIRRQHSKNPFFALKIDMMKAYDRIEWSYLQGCLTKLGFAPAWVSSVMRCVTSVRYAVRINGELTRLVIPSRGIRQGDPVSPYLFLLCTEGLSCLLQRKESLGLLHGIRNGHQGPPISHLLFADDSIFFAKSDPRSVQVLKSTLQSYCNASGQKINLQKSSLLFGRYCPDAIKTCVKDCLQVSNEALQDTYLGMPTEINCAVTSSFNFLSERVWKRVNGWNDRPLSRAGKETMLKAVVQAIPTYIMSCFQVPTTICDKMKSSMANHWWGYEDGRKKMHWRSDLVIFNQAMLARQGWRILTDPNSLCSRVLKGRYFPDSDFWSAPKPRSASFTWRSILFGRELLKKGVRWAVGDGSTIKITKDKWIPGVQAGMVNTRFPIPDDVTVDWLMNPERNAWDEEIVKAVFNDDIAREVLQVPISRHGGEDFVSWPHDKRGLFTVRSAYNLVRSNLFVVAQSSNGRGQHSGANVDSQFWKALWTINAPGKMLIHLWRSVHDCLPTGFQLRRRHVPATEGCIFCGHDDRIEHVFLVCPFAATVWDAIKEKFQINLCRRELCNIRQWVFDFLTRSSHIQKTVLAVTLRHIWEARNFSRNNPVTTHPRQVIHKIVSYVDMIVQHCPKDRNASGCDLPLPVTKWKPPPPGMVLINSDAALFQASNQTGLAFVIRDHSATCLLAANKRITGLLSPELAEALAIRFALEHAKAEGFQNVLMASDCLSVIKRIQSGARDLSVVGVIVRDIKKLETEFLECSFIV

SEQ ID NO: 112902 - protein, 173 aa, Oryza sativa
  Clone ID: PAT_MRT4530_16742C.1.pep
MFLRRILSGGGGVAALRAARAVKETTGIVGLEVVPNAREVLVGLYTRTLKEIEAVPKDEGYRKAVESFTRHRLQICQEEDDWKRIEDRIGCGQVEELIEEAQDELKLIAKMIEWDPWGVPDDYECEVIEDDTLIPKHVPQHRPVALPEEFFKTLDAVKSDPALQGESPPQVKP

SEQ ID NO: 112903 - protein, 206 aa, Oryza sativa
  Clone ID: PAT_MRT4530_16743C.1.pep
MVSGSGVCAPRVVVDARHHMLGRLASIIAKELLNGQRVVVVRCEEICMSGGLVRQKMKYLRFLRKRMNTKPSHGPIHFRSPAKILWRTVRGMIPHKTKRGEAALARLKAYEGVPPPYDRTKRMVIPDALKVLRLQPGHKYCLLGQLSKEVGWNYYDTIRELEEKRKEKAKVAYDRRKQLAKLRVKAEKAAEEKLGPQLEILAPIKY

SEQ ID NO: 112904 - protein, 282 aa, Oryza sativa
  Clone ID: PAT_MRT4530_16744C.1.pep
MAAMLLRLHPCPLLFPPPPPHPHLRRQLAVYSIPKSSFRSAAAAARARNPPRLASVGGAERRRVGDDYDEEEEDLGQALERTRQLVECAMFASVAGLAYFLSNSLAIENYFSCFFPLPIVISSLRWGLEAGRKTAVATVLLLFTLSGPVKASTYLLMHGVVGLAMGTMWRRLETNWNVSIILCSITRALGACGYVLLSSFLIRENILGLITVNIHASLTYILAAAGVNTIPSMDAIYVLFGTLLLLNCGFFIFLLHIMYTIFLTKLGIKPSLRPPRWLDKAI

SEQ ID NO: 112905 - protein, 64 aa, Oryza sativa
  Clone ID: PAT_MRT4530_16745C.1.pep
MRRGPTAATGATIARCHNLDVAVRLWGCNLRSSSSTPLQDLPHHREARCGDVITENPDQTTDLR

SEQ ID NO: 112906 - protein, 114 aa, Oryza sativa
  Clone ID: PAT_MRT4530_16746C.1.pep
MRASARGGKIAGIYTVVRGLAKGKNRARGGEGDFRIGNKIVPGGTRQRSNALHNASRTSLPTTPSLDRAKEWLPNFDHTYLCTVKGLGVQTRSIKLMKASHTAASALHTTRLHR

SEQ ID NO: 112907 - protein, 39 aa, Oryza sativa
  Clone ID: PAT_MRT4530_16747C.1.pep
PPQIRLIQSPHAPIRRHCFPTPWFGSDRIESAARGRQIR

SEQ ID NO: 112908 - protein, 218 aa, Oryza sativa
  unsure (1)..(218): unsure at all Xaa locations
  Clone ID: PAT_MRT4530_16748C.1.pep
ARARAEFGTSITAPGKGDIPTYVVGVNADQYSPYEPIISNASCTTNCLAPFVKILDQKFGIIKGTMTTTHSYTGDQRLLDASHRDLRRARAVELNIVPTSTGAAKPXGAVASNLRGKLNGLSPGATPNVSEVDLVGACVQKTFAEEVNHALRDCSDNEAEGFFXSCDVPXVXSVDFKCLRRGHHLHLGFKMVIGANDMGERESPGTNNQWGILRQRGR

SEQ ID NO: 112909 - protein, 42 aa, Oryza sativa
  Clone ID: PAT_MRT4530_16749C.1.pep
ETAKQHNNERLAYGYICNVECLAVNEVVSFHRKHEDVRDVVT

SEQ ID NO: 112910 - protein, 81 aa, Oryza sativa
  Clone ID: PAT_MRT4530_1674C.1.pep
YGKLVCKNATNWGDIPKFIKANLKLNPKFRGGKGKKKKKKKGGAPLFFFFFFFFFFPKKNKPFFYGTSLKQGGGKNFFETN

SEQ ID NO: 112911 - protein, 217 aa, Oryza sativa
  Clone ID: PAT_MRT4530_16750C.1.pep
MIAKVTEEQFGIKPKDQTSVYRPPYPEWFDRVPLPGRYKIPDFFQFSGQDDISTREHISRFLAQCGEASAEEALKVRLFPLSLTGSAFTWFSSLPPNFIRGWVDLEKQFHQYFFAGDNELKFLDLISVRQQEGELAVEYIQRFRDVRNRCYSLSLSDEQLADLAFRGLSAPIKDRFFFHEFDSLAHLIQTVSAYESRCQEEEKNQFWGNQGKDNFEA

SEQ ID NO: 112912 - protein, 104 aa, Oryza sativa
  Clone ID: PAT_MRT4530_16751C.1.pep
NFIGLNKLCVGADHIEPLQRFFCARVRPVVSSLPSAEPVHHHHVADVQATALRRSRRDHVRWLEGPRPTQTSPALMRCCHQQDHATALLVLLLLVGALFYPVNK

SEQ ID NO: 112913 - protein, 65 aa, Oryza sativa
  Clone ID: PAT_MRT4530_16752C.1.pep
IKLKVIMGHSVPHAFYKRARKFHNESRFLTSGPTRTCKGNVNTHAVAKFRLCLNRKGRICSWTLP

SEQ ID NO: 112914 - protein, 31 aa, Oryza sativa
  Clone ID: PAT_MRT4530_16753C.1.pep
HMLVWGGRGTRMDADIEQLLIKWSKRFRSQD

SEQ ID NO: 112915 - protein, 67 aa, Oryza sativa
  Clone ID: PAT_MRT4530_16754C.1.pep
LVLFFVREPFFLYFWCINDELQCFFEKTLRVCPPKKKKKKKKKKKKKKKKKKKKKKKKKKKKKKTPQ

SEQ ID NO: 112916 - protein, 85 aa, Oryza sativa
  Clone ID: PAT_MRT4530_16755C.1.pep
MGSQLCSATCGPHVHGLRTYSCSRAMVTLPFARTSKKRSQGIRCDYIGSATNVIIVTTTTLMLLAGRLRLAPSANTEATAGLYLE

SEQ ID NO: 112917 - protein, 140 aa, Oryza sativa
  Clone ID: PAT_MRT4530_16756C.1.pep
MRRLATPPPAWPHAAELPSGRAAPSRSRRSAARARRRSTAICCPAACRRAAIVLLPGRAPPSGCRALLPRRAQLSAYFPRAPPSRRRALLPRRAAAGLLPARAAGAPVRPPPPPLSPRRLAGACSLPPRPRRRTARGVSA

SEQ ID NO: 112918 - protein, 78 aa, Oryza sativa
  Clone ID: PAT_MRT4530_16757C.1.pep
PLFGAGKGGKAEKGAPPRPAGCFVGPQTGGPGVNGPPGNGRGGGNRPPEKGPPAMPPFFFFFSPQPFDPFLTPRRGPP

SEQ ID NO: 112919 - protein, 574 aa, Oryza sativa
  unsure (1)..(574): unsure at all Xaa locations
  Clone ID: PAT_MRT4530_16758C.1.pep
EISNIKMNGRYILVIMAAGGGKKLSYQLPAVLHATIQGVVISLLXMRHTAVVNGAMIFAQTTRILAXKGPVSQXFVYKALDKGEGELKILYVTPEKISKSKRFMSKLEKCHHAGRLSLIAIDEAHCCSQWGHDFRPDYKNLGILKVQFPSVPMIXEQVAKELSERGILADYYHADMDVISREKVHMRLTLLPPLFLMFLDLVAFGMGINKPDDSELVLNQRQEDNLACQLLEKGCRFRLGENIVRFVIHHSLSKSMETYYQESGRAGRDGLPSECILYYRPGDVPRQSSMVFYENCGLQNLYDIVRYCQFLLVGMCDNCTSSLELKEIDATHHTKIIVSLLHDIQLNDQRATLLQLVDKFKAKWKDLGCSNESIDLKKEGIEQLVVQLILDRVLVYNSPSTATIETFIWSTSLVTLNKEEFQHTAYATNAYVALGPLWKPALQGNRPVKLSVAFHSQDKGSGSKRTKRNQMSNLEAKLDDLRRELSSSNGGVFPHAVLSAQQISLLNRQKPTTVAELEKLIGKVKTGKYGSAIIELMLLHIDSEVAGGKACASKRQKKDKEDVICVESSEEEDV

SEQ ID NO: 112920 - protein, 241 aa, Oryza sativa
  Clone ID: PAT_MRT4530_16759C.1.pep
MGSALSGSGSGSLLVLSVSVVGILFTSILLLAYYLFLACSWRRRSHQTARPTPPLPSFFLAADQPRRGLGLEEAAIRRIPTLRYQQQQQHNKQQQCGVCLGEFREGERLRRLPPCLHSFHIDCIDAWLATALTCPLCRAHVTVDTNHIAAATTSTRHDDDQLLSGVHQPMRRSFSLDSCHLYLAIILHPHQLSDSDTRSRSRREPKPAVLESERPSRTLRRSFFSFSHTTTSPVPTPILPI

SEQ ID NO: 112921 - protein, 60 aa, Oryza sativa
  Clone ID: PAT_MRT4530_1675C.1.pep
PGKSLTMTTVAFWLATLVHEFRLLLSPDPTHSVYLQKVLMLSCETDTHLAETDSLLRVER

SEQ ID NO: 112922 - protein, 83 aa, Oryza sativa
  Clone ID: PAT_MRT4530_16760C.1.pep
HPGNLFMGVVGLINGFSCFFAAFFFFLGLCLLDQDLRAGGKNKALFQFGPFLFGFSPPGVLNPSFWVFGHFSCPCFPFFCPPS

SEQ ID NO: 112923 - protein, 148 aa, Oryza sativa
  Clone ID: PAT_MRT4530_16761C.1.pep
MPAALKPYRDNELRNLRNDDQQGPYQEHDHVYRYNVYNDLGEPDSDNPRPVLGRAPAGGAPGAGGEQRRGDEWRAGWGKGSTRHTGGYDGVRGLCDRCAWRRSGAGGRRRGGQRRTGVRDVEAGVANTKSWSSVGRRTGRRRKRVMPA

SEQ ID NO: 112924 - protein, 154 aa, Oryza sativa
  unsure (1)..(154): unsure at all Xaa locations
  Clone ID: PAT_MRT4530_16762C.1.pep
PSTLRYTSRIDMVCLCVYGRSQHRLRKSIMESTDGKSPTRIELGRHYIVSGPMSLSLTXRPADLRXKKGTPREDLRHRISEPTHPPQPTKPELIEAKSPGDLVGSTRLRSCRSSYQRTPIPSISGLRVSPIDKYHQKHIKTEIVQDSPTPAVGS

SEQ ID NO: 112925 - protein, 70 aa, Oryza sativa
  Clone ID: PAT_MRT4530_16763C.1.pep
KITCKYIKNQEMILAAMYYDHSDSCSSNILRFSYLNGNPHSSVATLYRRTSCLKLATNWCPTLPIVRWKG

SEQ ID NO: 112926 - protein, 350 aa, Oryza sativa
  unsure (1)..(350): unsure at all Xaa locations
  Clone ID: PAT_MRT4530_16764C.1.pep
GVGVPRPSGPGQAEAAREAARVRQAEEAAREEAAREVEALRAERAELEAAWARVEEGRRSVDAMVEVGRKAHRRHISELEARKAALAEIAREVEEXSRRREEALEARAMALEEHAGAVERGLMDREAATALREATLAAHEAACAEEESALRLREDALAERERALEEAEATTRRLADSLSLREAAQEEQAEAREKELAAGARIGGAGGGSGGGRSCRSGTGGVPGGAGGSGAGGLGGGGGGAEGRGVRGGGGGGGEREGGKGGGSTDGGRGAGDDGSGGGGVVDNCSGGGVGGCGGVGEGGIDGDASIVWWPRRLVSVDLAAAAAEKGDPALAGMCGDGAERNGREGGERR

SEQ ID NO: 112927 - protein, 543 aa, Oryza sativa
  Clone ID: PAT_MRT4530_16765C.1.pep
MGKKAGTTSSWLTAVKRAFRSPSKDDSPNKAARLRDDTDDDKGKRERRRWLFRKSSSPSPAPPTPPPPQQQQQQSRAAAVTEEQRHAIALAVATAATAEAAVATAQAAAEVVRLTRPSSSFVREHYAAIVVQTAFRGYLARRALRALKGLVKLQALVRGHNVRKQANMTLRCMQALVRVQARVRDQRMRLSQDSISLSAAAASAAPCGSSKSSYSVDTSTFWDSKYTHDFAAADRRSIERSRDGSSFAAGDDWDDRPRTIEEIQAMLQTRKDAALKRERALSYAFSHQIWRNPAPSVEEMDVDGQPRWAERWMASRASFDTSRSTVRASAAAAPGRASTDHRDQVKTLEIDTARPFSYSTPRRHGNASYHASSSPMHRAHHHSPVTPSPSKARPPIQVRSASPRVERGGGGGGSYTPSLHSHRHHASSGGAAAVPNYMAATESAKARVRSQSAPRQRPATPERDRMSFGGGGGGGGAKKRLSFPVPIDPYGAYAQSLRSPSFKSAAGRFSSEQRSNVSSSCAESLGGDVVSPSSTTDLRRWLR

SEQ ID NO: 112928 - protein, 99 aa, Oryza sativa
  Clone ID: PAT_MRT4530_16766C.1.pep
MATACARTRCRRRQPAAEAAAQRRRRTTGATARPGAARREREGKEKGEMPHREWPAWRKTTANGDGDHGQTAATGGRGPECPKGGKERGIFLRPFKTPI

SEQ ID NO: 112929 - protein, 310 aa, Oryza sativa
  Clone ID: PAT_MRT4530_16767C.1.pep
MHVLFCSDSRRTLQNQTNTCTTSTEENPTPEAHIHTNKHPPSAASAAALASTATPMVRKLPLSSVLYTINSARDIPPSSPPPPAATPPAWMWPSCKHPRAHSFRSPSAASAAAAAKTIASIFLDSGESSFANSSARMHHDCASDSLSTESDVSATAEDMADAIVRGLRSDRLLFEPRAPSSSILDKKPVRRAAGGGDDDDDGAASFGGGVAVAFDSEDPYEDFRASMAEMLAAHGVGDWGWLEAMLGWYLRANGKETHAAIVAAFVDLVVSTAARGSSSSRHSSFTLAGTDLESSSAGGGAAGHISFRLR

SEQ ID NO: 112930 - protein, 75 aa, Oryza sativa
  Clone ID: PAT_MRT4530_16768C.1.pep
MAPFSFSVLTSDGYDDALSFPSHLARRLMMATLGALIPGVPRCKIDGFEDGYLNSSVSHVNATHINVVFETFFLD

SEQ ID NO: 112931 - protein, 91 aa, Oryza sativa
  Clone ID: PAT_MRT4530_16769C.1.pep
MSRASSYAAGSSFVVRELGDNSSSAPQARCPPRRATLTKTGRSSFGIGALAKYSCRLCALDRLPHSALRFLSVESKQDDEAKLRRQGSFRA

SEQ ID NO: 112932 - protein, 100 aa, Oryza sativa
  Clone ID: PAT_MRT4530_1676C.1.pep
GRLTELVAPHRETAQAPLCRFGRGLRVKSHKGSGRLGPRGRGRSHPTPPRGNQEEGGHLTLGPDVPEGVRPRGRLCLPQASGRLPFSREAVGRDATPKAW

SEQ ID NO: 112933 - protein, 166 aa, Oryza sativa
  Clone ID: PAT_MRT4530_16770C.1.pep
MARKVIALAFLLLLTISLSKSNAARVIKYNGGESGGGGGGGGGGGGGGNGSGSGSGYGYNYGKGGGQSGGGQGSGGGGGGGGGGSNGSGSGSGYGYGYGQGNGGAQGQGSGGGGGGGGGGGGGGSGQGSGSGYGYGYGKGGGGGGGGGGDGGGGGGGGSAYVGRHE

SEQ ID NO: 112934 - protein, 57 aa, Oryza sativa
  Clone ID: PAT_MRT4530_16771C.1.pep
MMTPYSIGGTDHALGGLDRKKQSHLQEHRIYTTDTHNARALTPMSIFEDWAGKSWRD

SEQ ID NO: 112935 - protein, 341 aa, Oryza sativa
  Clone ID: PAT_MRT4530_16772C.1.pep
MEPEPDHTKPSTSAAAAGHRKHLAMLERLSKRAAAPAPSQDSPVAAFLSRFAAAKLAAESALSACRSSPDDAQPSLSAAAAAIDDLDRLVAEASHSLPPYELRSALAAASDLRAAHRLAASDLRPKKSFSFRNKSKAPKNPPQDPPPTLPPPPDQPNPSVEAILPGLGFRGRRDATLVKDLRVSDEKDGDFTLADLVSCQVYLKGKCRALHVHKLKDCRVFVGAVFGSVLIEDVERCAFVMAAHQIRIHEATATDFYLRVRSRPIIEDCCGVRFAPHALKYEGIGEDLRDAGLEEETGNWANVDDFKWLRAVQSPNWCLVPEEERLQTIDISDVQEREYDN

SEQ ID NO: 112936 - protein, 49 aa, Oryza sativa
  Clone ID: PAT_MRT4530_16773C.1.pep
LVFAKEFDGFGWVSVGIHGGQVCAPGLRLQAFFFIMTNTYLLYSAGSRC

SEQ ID NO: 112937 - protein, 149 aa, Oryza sativa
  unsure (1)..(149): unsure at all Xaa locations
  Clone ID: PAT_MRT4530_16774C.1.pep
XPAPHPLSSSPRARGGQPHLQPRHSERPSRPTATTTVYRPPPPPPQHPELGFAGRSIGFIDSARTESEQDAAAEWNKTICPRFDSPNRTRRRLLGFGRGNGAGKRMQIRGRILVSSLLRFAMKLLVAAVLACLDPAAPGAGNASQRADA

SEQ ID NO: 112938 - protein, 50 aa, Oryza sativa
  Clone ID: PAT_MRT4530_16775C.1.pep
MAAKVEAKMRMPPQTATAEGGMERHGEQRGKEQRDERKLQSNLDTLVLTP

SEQ ID NO: 112939 - protein, 286 aa, Oryza sativa
  Clone ID: PAT_MRT4530_16776C.1.pep
MAGSGGGGGVEEVADHREKRGTPTLTTTMLAARGPPPLPPLPPSPPSTGCRSPSAGRRALARLSPPPLRSSAPLCFTGRRTLARRLRRPPLSPARRHPFLPRGKENYDGCEKGKCRNCPTTVIGRASGASTPNPRINGDQGAANIGRNGWPEIEVCRRGYAFHGQIDNWLVLRSPPPPNGVCMGIIPKLVSTTQSHLERGVGAVGCRVTGEEDAPATGPCPGSLIPFTDVAGGVSDPAATAVALTRHGRAARKRLHGDEHYSCAMASWLHGNDAGALHVSGFMASR

SEQ ID NO: 112940 - protein, 994 aa, Oryza sativa
  unsure (1)..(994): unsure at all Xaa locations
  Clone ID: PAT_MRT4530_16777C.1.pep
MEHLYPSKQPRPINTPLLLHSQHTLPGEMLQRISVRLRIYICNHKKYRIMFQAPLLGIILLVMSLRNINIDLGNLSVYVDVAKAAKSKSENNKNAQSVADKKNEIILKGKCLLATISDINEXDCITFVAYALVCKDALILLHDMQYYLPPPAAXENSNIFPSALPPGLPPLXGIEHQIDLIPGASLPNRAPYKTNPEETKEIXCEVQKLLYKGYVRESLSPCALPVILVPKKYGSWRMCVDCGAINDITIRYCHPIPRLDGMLDELSAVVVFSKVDLRSGYHHIRMKLGDEWKTAFKTKFGLYEWLVMPFGLNNAPDTFMRLMNEVLCAFIGKFMVIYFDDILIYSKSMGEHLDHFRVVFNALRDARLFGNLEKXTFCTDRAYFLGYKVTPXGIEVDQVKVEAIQGWHVPKTITQVXKFLGLARFYRRFVKDFSTIVAPLNEFTKNGVLFTWGTTQENTFNMLKDKLTHAPLLQLPDFYKTFELECDASGIGLGDVLFQEGKPVAYFSEKLSESVLNYSTYDKELYALVRTLXTWQHYLWPKEFVIHSDHESLKHIRSQGKLNCRHTKWVEFIESFPYVIKQKKGKDNTIVDALSRRYTLLTQLDYKISSLETIKDQYMYDDNFKDVLLHCKDGNTWNKFVFNDGFVFRANKLCILASSVPLLLSLKALGGELIGAFWIKKTEDILVGHFFWPKMRRDVERFIGRCTTCQKAKSHLNPHGLYMPLVVPSVPWEDISIDLVLGLSRTKRGRDSIXFIVDRFSKMTHFLPFHKANDASHIVVLFFREIVRLHGVPNIIVSDRDTKYLSHFGERXWAKLRTKLLFFITYPQIDGQTEVVNRTLYTMLRVVLKKNIKIWKECLSHIEFVYNHXLDSTIKMCPFEIVYGLLPHAPXDLMPLPSFEKLNFDAKQRAELMXKLHETTKENIERMNAKYKLAGDKGRRELSFEHGDFVWLHLRKDRFPDLRKSKMMPRADGPFKLLAKINENAYKIDLPAYF

SEQ ID NO: 112941 - protein, 144 aa, Oryza sativa
  unsure (1)..(144): unsure at all Xaa locations
  Clone ID: PAT_MRT4530_16778C.1.pep
TRLISSWRQPWSPWHRVWVLLLHVLDDANSHRLPHVPHGYAPVXLDCHXTSHIAVKFAELVTKIDRRSGKELEKEPKFLKNGDAGMVKMIPTKPMVVETFSEYPPLGRFAVRDMRQTVAVGVIKNVEKKDPTGAKVTKAAAKKK

SEQ ID NO: 112942 - protein, 52 aa, Oryza sativa
  Clone ID: PAT_MRT4530_16779C.1.pep
APGVCLPQGPHRVQAPVFSLPPDQGRGGGFIPPPFFFSCDLLTLLGPFFVVP

SEQ ID NO: 112943 - protein, 54 aa, Oryza sativa
  Clone ID: PAT_MRT4530_1677C.1.pep
FSIFHCCKIDCRKHSVSDNSRCKLRIQHNKRTGVQVPTCHTKSVTIYLRFQYIE

SEQ ID NO: 112944 - protein, 80 aa, Oryza sativa
  Clone ID: PAT_MRT4530_16780C.1.pep
MELHMRRTAVRISASNTGRPVVFRLSRPSPRGSPPQSPAGCCRPPGPAPSPPVARESSISATCGVGNLRIRSRMLGKYSW

SEQ ID NO: 112945 - protein, 132 aa, Oryza sativa
  Clone ID: PAT_MRT4530_16781C.1.pep
LPIPVRHRSALSAPEAANGSGMPPPKPLPCSTMAPTSNPKTIKPRSSAGVLSSEVTSTAPSSSPANPVPPPVPRRPPPGPPQDPNSSPEFGLSPAPEKKRSSSELEKKQLSMTVGFWLLALWAITSLTYALD

SEQ ID NO: 112946 - protein, 124 aa, Oryza sativa
  unsure (1)..(124): unsure at all Xaa locations
  Clone ID: PAT_MRT4530_16782C.1.pep
TPVSPPRSDPFPAQVLPSLIIGVPLSRLFLLLSGVSVICPPYVLSLSPLLVVVYPFVLCRLLRPPSYHVIILVVLVVLFCWLSSFWSSIRFALVVLPCINNCVVVSVVAVAAVVLTFVFCWYXY

SEQ ID NO: 112947 - protein, 266 aa, Oryza sativa
  Clone ID: PAT_MRT4530_16783C.1.pep
MRWLAAARAASSPLPSCSMSRRRRRCHWSRPSSSTRWLMKYQDLAVLCWGLFLLDQRIQQPRKKKKQQRWWHGWSDEIAANTPLLPEPAELIDPPPPPTTCTRAAPCADLRPTAREPEREGKRERDSGAAPPPPTGGAASSPSLPPNRHSPRPLSRLSRDGSGDGDRRWIRPQWWRLRTDQAVAAPSDPFRLPPVADLTAVAVSAPFLVWRRGQERRWARELVAVEGGDADNGNGNDDGDDDHSGRRRRRRRRRPRGGLLWEVARV

SEQ ID NO: 112948 - protein, 114 aa, Oryza sativa
  unsure (1)..(114): unsure at all Xaa locations
  Clone ID: PAT_MRT4530_16784C.1.pep
MHGFVRSTSATIRTGLRASVVKYNSATTSLMVCCGVPPAFPGTGINTLAFGKASSTLDATSALLQELSKDFALKDLGDLHYFLDIEVXQNVYWAGSPDDRRSIXGFVVFLGPNL

SEQ ID NO: 112949 - protein, 103 aa, Oryza sativa
  unsure (1)..(103): unsure at all Xaa locations
  Clone ID: PAT_MRT4530_16785C.1.pep
MGVTLGSGGGNRQIRAASAGSGGVVAGGGKGVYNDGGDGDGDIRVSAXGGRDGDSDGMAAGEDRGSSSGAPESGTPTLDLDGAGEPARPGAAGGLAGGWRGRG

SEQ ID NO: 112950 - protein, 49 aa, Oryza sativa
  Clone ID: PAT_MRT4530_16786C.1.pep
MLAAILGWTGCCPTPQYSTFDLRPCKIVNSRGTSDPVFPLSYRIMPIVI

SEQ ID NO: 112951 - protein, 400 aa, Oryza sativa
  Clone ID: PAT_MRT4530_16787C.1.pep
MFSHHGHGHGQYQPPATGPQHEPTFKIFCRADEGYCLTVRHDAVVLAPTNPRDDCQHWYKDMRHSTRVKDEEGHPAFALVNRATGLAVKHSLGQSHPVKLVPYNPEYQDESVLWTESKDVGHGFRCIRMVNNIYLNLDAFHGDKSHGGVHDGTTVVLWEWCKGDNQCWKILPWGPEAYAPPPPPAYGHQAYPPPPPNREPGHGYHPAPAFYPPQPPPSHDEPGYGYRPPPVGPPGAGYGNRLPRALASEPTVRILCRADEAYSLTVRNGAVCLAPTNPRDDFQHWVKDMRHSTSIKDEEGYPAFALVNKATGEAIKHSLGQSHPVRLVPYNPEYLDESVLWTESKDVGHGFRCVRMVNNIYLNFDAFHGDKDHGGVHDGTTVVLWEWCKGDNQRWKILPW

SEQ ID NO: 112952 - protein, 49 aa, Oryza sativa
  Clone ID: PAT_MRT4530_16788C.1.pep
CTFNLTKHTQFDPYYHYTTSTIATKLEHSRNCKKKKKGLLSQLHSLIHQ

SEQ ID NO: 112953 - protein, 66 aa, Oryza sativa
  unsure (1)..(66): unsure at all Xaa locations
  Clone ID: PAT_MRT4530_16789C.1.pep
WXMXRAXXXEEEXRCAGICGGXVDGXGGGGGGXGSRXRGRCWGGKQAGXGGAAHRXAGGGRRRXRG

SEQ ID NO: 112954 - protein, 450 aa, Oryza sativa
  Clone ID: PAT_MRT4530_1678C.1.pep
MPRTTSRLRCRRWWRCGRPVHGRGGTGGRTTPARRMERFAAMCGGFRAKPRGGRGGGLRHRAEGGTAAPADARARRKGAAGGDVDEEEGEAGAGDGVPEKFGRRRGLAGKEDGTPVPGEVVATSAGAQGRGRGGRRRNRGGNTTVASGEALPEVSAENRGGGLNLSADNKESLIRPFKIEELDKALQEAKLNTAPSPDGFSILFCRAFGLKRFILEGCVTIHEVLHEMRTKNREGIILKIDFEKAYDRVKWEFLIEITATKFILYCFEEMAGLKINYHKSEVFTIGLEESDTIGASQMLNCPIGHFPMKYLGLPISPEKVLNPDFDFLGQKLEKRLGNWGPGSLSHAGRAVQINACMSSIPSYAMGFYLLPEGVHQRFDKIRGRYYWAGNKLKGKYHMVKWEDMAFPKDFGGLGFTETRRMNAALLAKWIIKLESNDQSLCLQVLRGKYM

SEQ ID NO: 112955 - protein, 65 aa, Oryza sativa
  Clone ID: PAT_MRT4530_16790C.1.pep
FFFFFFGWLTCRCTFALSHPISSITQQHFHQFKAHKGHPALSPITPAQFITALQQAFCNNPKLKR

SEQ ID NO: 112956 - protein, 378 aa, Oryza sativa
  Clone ID: PAT_MRT4530_16791C.1.pep
MATSFDRWEKDPFFPAAEEVQESADRMESVYRRWLQERKEVGGGAVETAAERGGGGWGRAAGDLRRELHTALGTAKWQMDYALICLDFRYGLDTNSLDELQRAIKSNYSVVLAGKDTRARHDDFVSAIGHRILEVEKFLKESNTTEGRGPLSWVRLDEGEREELAHFLSAGTYQKRDEVVTITSAGDIEVGSNARRVKKGVSIDSSNDSSGSAESGLVSTKEETAPGHRRTASAYADIGSWTITIPDEANGIDEQSFDDLPKVPLVKSPSSSVLMNAFQSKTRMKTKNGAKKLAGADQQDVVETLPLTNSRSCQGFDGLFQRSKSCLSTSDDEDNCNKKLYGCLGAFRRLLQRSQYQVQYGRPIQLLILAIVVLLVFC

SEQ ID NO: 112957 - protein, 141 aa, Oryza sativa
  Clone ID: PAT_MRT4530_16792C.1.pep
MATWGDRWEKDPFFPAAEEVQESADRMESVYRRWLQERKEVGGGAVETAAERGGGGWGRAAGDLRRELHTALGTAKWQLDELQRAIKSNYSVVLAGKDTRARHDDFVSAIGHRILEVEIVFDESNTTEGRGPLSWVRLDEG

SEQ ID NO: 112958 - protein, 813 aa, Oryza sativa
  unsure (1)..(813): unsure at all Xaa locations
  Clone ID: PAT_MRT4530_16793C.1.pep
MAAAAARRGSSLLSRCLLSRPAAAASPAVPSALRRADGTQGLLPGILQRFSTAAVAEEPISPPVQVNYTQLLIDGKFVDSASGKTFPTLDPRTGELIAHVAEGDAEDINRAVHAARKAFDEGPWPKMTAYERSRILLRFADLIEKHNDEIAALETWDNGKPYAQAANIEVPMVARLMRYYAGWADKIHGLVVPADGPHHVQVLHEPIGVAGQIIPWNFPLLMFAWKVGPALACGNTVVLKTAEQTPLSALFASKLLHEAGLPDGVVNVVSGFGPTAGAALASHMDVDKIAFTGXSTDTGKVVLELAARSNLKSVTLELGGKSPFIIMDDADVDHAVELAHFALFFNQGQCCCAGSRTFVHERIYDEFVEKAKARALKRVVGDPFKNGVEQGPQIDDEQFNKILRYIKYGVDSGANLVTGGDRLGDKGYYIQPTIFSDVQDNMRIAQEEIFGPVQSILKFNDLNEVIKRANASQYGLAAGVFTNNLNTANTLTRALRVGTVWVNCFDVFDAAIPFGGYKQSGIGREKGIDSLKNYLQICAGDGEDGRQWGSTAPWVVPRCGVRRAKAPGLVLLLCRRPAEPRPPSYPFFHLVGHGVFPGTGRSGWGAAGRKLPPNSPSISSFHSSPTSSKLAGLGGLIDPRCILSPARISPINLDDFVSPLPPPPVMPAAETVVVPAETAAVVAPLVVVSKEADSAGDEALDLRLFLQGRDGRCVVMELDFGVLCDNITFFVAMAPHPSSPPPPLLCVGGLLPSDRSGRGERRGWEGRGGAATSFLWRRPVAEPGRRRRSPPPSPVGVSRGRRGMRKGCGEKRS

SEQ ID NO: 112959 - protein, 73 aa, Oryza sativa
  unsure (1)..(73): unsure at all Xaa locations
  Clone ID: PAT_MRT4530_16794C.1.pep
KXIHTVLLFTPTLVISXDSNHSLASISVQNVYLKFKISQVLNLQVAEXXGIRKFPTRRSYFRSSSSSICISPA

SEQ ID NO: 112960 - protein, 68 aa, Oryza sativa
  unsure (1)..(68): unsure at all Xaa locations
  Clone ID: PAT_MRT4530_16795C.1.pep
PPHLELWKEKSPGQYEREXCVLPQHLEEEVPALPLGKFGASLPKLFGWQDDYLSVPVEGPCKPAPFRF

SEQ ID NO: 112961 - protein, 75 aa, Oryza sativa
  unsure (1)..(75): unsure at all Xaa locations
  Clone ID: PAT_MRT4530_16796C.1.pep
ILYFLXXFSFFFLFNTLIQSQARASKPFIPHQPIPRIHLQITQEQVTGTSNSSINYVTRSESMAQSSIHYITTKS

SEQ ID NO: 112962 - protein, 113 aa, Oryza sativa
  unsure (1)..(113): unsure at all Xaa locations
  Clone ID: PAT_MRT4530_16797C.1.pep
PRAAGTSDRDLGNLMELKYLNLSGCHMRGQLPASFGRLKSLVYLDLSCCSXLLGIPQALRGLTNLEYLNLSMPNEQEWCGDRLHLAGLPEVIGSLIKLRELNLVRCMDYILGK

SEQ ID NO: 112963 - protein, 191 aa, Oryza sativa
  Clone ID: PAT_MRT4530_16798C.1.pep
MRCTTYVLHSWFIVSDMCANNLIDRPLVLVSYNKIKLAISLLMEPSSRFGFTINDGAKLKLDERLSLPPTKLDRKKRKRKGLAKPPMEIESALSSAHRCWWLCARRKTTTYDDHLHQSPASAWGPLKPSYSSYDYTVGAPRPGRWGPPSSRRVHFLPETSVAIRPPMDGDDDADNHRHALSCVPHTHRIYN

SEQ ID NO: 112964 - protein, 115 aa, Oryza sativa
  Clone ID: PAT_MRT4530_16799C.1.pep
MADLTGGGGGGGGSAGSRRPLGFLKNAAKHKHGFVQLLLMGSVLMMSLRTLGQKHRRRDLIYDNADLRREHDDLSLRMRDVQDALRREADADESGALASHLRRIFAAHPASTDDK

SEQ ID NO: 112965 - protein, 89 aa, Oryza sativa
  Clone ID: PAT_MRT4530_1679C.1.pep
MPCQIVGQVHPRGCAPSLSAAFSSRHLRILLPWSAKEAEVTGKERHEIFVRVKERISAYTEGFLRFIRDSLIGEVNHVSIQVITNGGVV

SEQ ID NO: 112966 - protein, 184 aa, Oryza sativa
  Clone ID: PAT_MRT4530_167C.1.pep
ERCYSDIEATKGKWLPTLRTLVSKINSTFSRNFQEMAVAGEVSLDEHGLDFEQYGILIKVKFRQTGQLQVLSAHHQSGGERSVSTILYLVSLQDLTNCPFRVVDEINQGMDPINERKMFQQLVRAASQPNTPQCFLLTPKLLPDLEYSDACSILNIMNGPWIEKPAKAWSTGDCWRTVMSVSGH

SEQ ID NO: 112967 - protein, 102 aa, Oryza sativa
  Clone ID: PAT_MRT4530_16800C.1.pep
YCHHLYSSSNSRYYTNKSTNNFTYTTTMPPVSQFPPARVFLKNAASTPSPITISTSRRASLTSPLSPRYTTSSSNASQSMAQMLSQRPSAREAQGSARRVTN

SEQ ID NO: 112968 - protein, 411 aa, Oryza sativa
  Clone ID: PAT_MRT4530_16801C.1.pep
MNALAATSRNFKQAAKLLGLDSKLEKSLLIPFREIKVECTIPKDDGTLASYVGFRVQHDNARGPMKGGIRYHHEVDPDEVNALAQLMTWKTAVANIPYGGAKGGIGCSPGDLSISELERLTRVFTQKIHDLIGIHTDVPAPDMGTNSQTMAWILDEYSKFHGYSPAVVTGKPVDLGGSLGRDAATGRGVLFATEALLAEHGKGIAGQRFVIQGFGNVGSWAAQLISEAGGKVIAISDVTGAVKNSNGLDIAKLMKHSSENRGIKGFDGGDAIDPRSLLTEECDVLIPAALGGVINKDNANEIKAKYIIEAANHPTDPEADEILSKKGVLILPDILANSGGVTVSYFEWVQNIQGFMWDEEKVNNELKTYMTRGFRDVKEMCRSHHCDLRMGAFTLGVNRVARATVLRGWEA

SEQ ID NO: 112969 - protein, 294 aa, Oryza sativa
  Clone ID: PAT_MRT4530_16802C.1.pep
MLVSTFEHALRHLKSLWFLDLSDNHLIGHVPLEISTLTKLAWLDLSYNDLDGLITEELFDGLKSLKNIGLSDNRLKIVVGSDWIPPFRLKVANLASCHIGPLFPSWFKWPMGISHINISRANSLSGVIPWQLSNLEAMTKRKSMLRKLPNNYSRGVDRYLSRFKHMVGELSVTTKRQDLKYQGFALLGIVTIDLSSNYLTGRIPSGGQLDTLYNNNPSMYDGNAGLCGDILKKKCPGNDASNDYGSYKDHYELLYLCFGLVIGFVLGLWVVFSTLLFKKSWRIAYFRLFDKIMY

SEQ ID NO: 112970 - protein, 332 aa, Oryza sativa
  Clone ID: PAT_MRT4530_16803C.1.pep
MPVVLVVVVFVGVVVGGASASAGPLKAHYYRHVCPAAEAVVRDIVTARVAADPAALPAKLLRLFFHDCFVRGCDASVLIDTVAGSGAAAAAEKDAAPNGSLGGYDVIDTAKAVLEAVCPGVVSCADIVALAARDAVSYQFGRDLWDVQLGRRDGVVSLASEALANLPAPSDNFTTLESNFAGKGLDVNDLDLHAGAHTIGVGHCNLFGARLFNFTGAAAPSADPSLNAAYAAQLRAACGSPSNNATAVPMDPGSPARFDAHYFVNLKLGRGLFASDAALLADRRAAALVHGLTDQDYFLREFKNAVRKMGRVGVLTGDQGEIRKNCRAVNGK

SEQ ID NO: 112971 - protein, 293 aa, Oryza sativa
  Clone ID: PAT_MRT4530_16804C.1.pep
MPSVVVTVDQSGKGDHRRIQDAIDAAPANDSSRTVIRIKPGVYRRVGNQEKVVVDKPYVTLTGTSATSTVIAWNESWVSDESPTVSVLASDFVAKRLTFQNTFGDSAPAVAVRVAGDRAAFYGCRFVSFQDTLLDETGRHYYRGCYVQGATDFIFGNGRALFDKCHLHSTSPDGAGGAFTAQQRSSESEETGYSFVGCKLTGLGAGTSILGRPWGPYSRVVFALTYMSSTVRPQGWDDWGDPSNQRTAFYGQYQCYGDGSKTDGRVAWSHDLTQAEAAPFITKAWVDGQQWLR

SEQ ID NO: 112972 - protein, 141 aa, Oryza sativa
  Clone ID: PAT_MRT4530_16805C.1.pep
MARRVGGGAPRGPPPRREHATSRRARPFGLGLCGGLRPGSLGAKLMRTYPLTMLTSLSYCAEGVVPAALTSPCENNLDLIAVVISAENDDLLNFHRHDAKYGRSHLQDKSWPCYVEGGRTGMGIKQSDCEKAVVKNIVKVT

SEQ ID NO: 112973 - protein, 67 aa, Oryza sativa
  Clone ID: PAT_MRT4530_16806C.1.pep
KEKQKKFCLMDQKARWMSVLNTRLKKPKVVSHYHLPTRENWIVLSPLKGKETICRPRQSLANMYARG

SEQ ID NO: 112974 - protein, 84 aa, Oryza sativa
  Clone ID: PAT_MRT4530_16807C.1.pep
GRLARLRVLVRNTGVDLCVRLRFRGNGELLRGQVLITAQHYAAVQKVQRDGCAYIAFKSNPNCMVSHIARKSCILRAIAEDALA

SEQ ID NO: 112975 - protein, 149 aa, Oryza sativa
  Clone ID: PAT_MRT4530_16808C.1.pep
MVASSARRTKTTNKMAAGFVEQFSARSSGLRALGLVAAGSGKERQPTRYVVLCVGGGSGDGSSSEKEAARIGATPSRRGARQRQTRLRGGGQGIIEGAGSIIVRGGRCGALLRWLVHGGALLLGPSSASCSTPWLPLTIIYNFKMLLLH

SEQ ID NO: 112976 - protein, 164 aa, Oryza sativa
  unsure (1)..(164): unsure at all Xaa locations
  Clone ID: PAT_MRT4530_16809C.1.pep
TTQPSTRPSLPCVRPRPPPPPPXSPWPPPPPPHXSRRSPLSPRAPVXSPPPSPPSPRXRPPSPCVRAQPPLPPCPRPPLPPAPXPPSPPRPWPPPLVLWRCRHDRHKPPSPFPSSQGCPPPLPVHAWPPRSRAWLSTAPPRHPHSRVAPTSQSPPCHHPKHLPP

SEQ ID NO: 112977 - protein, 113 aa, Oryza sativa
  Clone ID: PAT_MRT4530_1680C.1.pep
MSVVEATVTFRPRPPPRLAKRAGEASRPTRHQRRHGSAYMTPPCDINVGKIHHKRPRLEKGAMGGPPPKGRHTATTVCVVRRRPPRARGDRIWTPKARNGHLEVGEGARCISA

SEQ ID NO: 112978 - protein, 280 aa, Oryza sativa
  Clone ID: PAT_MRT4530_16810C.1.pep
MGSSNREPVPARGFGSLVQIPDKIQNSLKVHFGRFLKKNGFGGGSEAEMLPMQMQGTCTTVAPEVRLDKQLQAWKNNPIWSDEPPEIKVTVPQGSLCNLNLKFKAGLPPDAVYNIIIDPENKRVFKNIKEVISRKVVLDEGQRQIVEVEQAAIWRFLWWSGVLSVHEQCGVILSAATAAIVRAVAVDEVINSGRLPPPPFSWYLRGITTRTTAMLVNDLIAETARLRGLANNAIDKQYVEGKCDTSRDHLTEECNDIKERWRQRRKTGRHGNSLRLTAQG

SEQ ID NO: 112979 - protein, 232 aa, Oryza sativa
  Clone ID: PAT_MRT4530_16811C.1.pep
MLPMQMQGTCTTVAPEVRLDKQLQAWKNNPIWSDEPPEIKVTVPQGSLCNLNLKFKAGLPPDAVYNIIIDPENKRVFKNIKVKFKQGRTGFMKKFEGCWKIEPLFVDKEACHPLDPCTLEKYDSCTNGTGRVGSSITLDQLIEPDMVPPPPFSWYLRGITTRTTEMLVNDLIAETARLRGLANNAIDKQYVEGKCDTSRDHLTEECNDIKERWRQRRKTGRHGNSLRLTAQG

SEQ ID NO: 112980 - protein, 191 aa, Oryza sativa
  Clone ID: PAT_MRT4530_16812C.1.pep
MQKHTGTSRQMAGLLPGVLVAVLLAAAAAPASAKDYTVGDSSGWTTGVDYTAWARGKTFNIGDTLLFQYTSAGHSVVEVSEADHTSCSAANPLRSYKDGTTIVTLTRSGTRYFICGSTGHCGAGMKLTVTVATLSGSAAGGTRLAKPSSSDADPTTTTTTRTSSATGGATGSWAPRTATWLLFFAAVGALL

SEQ ID NO: 112981 - protein, 54 aa, Oryza sativa
  Clone ID: PAT_MRT4530_16813C.1.pep
ALQSRHLPALTHPASQPPSDPASQSGNSFPPPSIISARQANEWSYLTPIYNIHT

SEQ ID NO: 112982 - protein, 470 aa, Oryza sativa
  Clone ID: PAT_MRT4530_16814C.1.pep
MEERAGARRRPPMAVPPLLLFLLLLSSFSSCAAAASGAPVGEDYVRPPAAARRCGLHHRKALLSLFPWSKKKDSSSASDPQQVHISLAGEKHMRVTFVTDDNSVPSVVDYGTEAGTYTSTSQGESTSYSYLMYSSGKIHHVVIGPLNDNTVYYYRCGGHGPEFQFKTPPSQFPLSLAVVGDLGQTSWTTSTLNHIKQCAHDMLLLPGDLSYADYMQHLWDSFGTLVEPLASTRPWMVTEGNHEKERIPFFKSGFQSYNARWKMPYEESESTSNLYYSFKVAGVHAIMLGSYTDYDESSDQYAWLKADLAKVDRKRTPWLIVLLHAPWYNSNWAHQGEGDSMMAAMEPLLYAAHVDMVIAGHVHAYERAERVYKGGLDPCGAVHITIGDGGNREGLAHRYRNPKPAWSVFREASFGHGELKIVNATHAHWTWHRNDDEEPVRTDDVWITSLAGSGCIQDGSHEYRKILMSP

SEQ ID NO: 112983 - protein, 96 aa, Oryza sativa
  unsure (1)..(96): unsure at all Xaa locations
  Clone ID: PAT_MRT4530_16815C.1.pep
PLWNINAHRFRNCTXGRAQDKVGLINGKTEFSGELLLGQLLIEPQHYVVXKMAQLEGCTNIGLKTDPITMVSHIAGKEVIFCACPTNVDTNAYRMK

SEQ ID NO: 112984 - protein, 63 aa, Oryza sativa
  Clone ID: PAT_MRT4530_16816C.1.pep
LTSLWPSVSPQRHIRARVQFPNQSPIKSPLAGVPNISTLCGGGFLSSFSYNISMVVTTCTCLW

SEQ ID NO: 112985 - protein, 41 aa, Oryza sativa
  Clone ID: PAT_MRT4530_16817C.1.pep
MEESKESSKLERLRSTAKQQKGKLYIIKICISMLICGSPNH

SEQ ID NO: 112986 - protein, 96 aa, Oryza sativa
  Clone ID: PAT_MRT4530_16818C.1.pep
NMMCSNLKNNRTPHGTNVQTYIFNIHVVKESTELRMPRHTFNLLWYMRQKCWVWTPNTGSTNHQWESYPSSAYMRSFCQTMCDHTAYFPCMQSGSL

SEQ ID NO: 112987 - protein, 65 aa, Oryza sativa
  Clone ID: PAT_MRT4530_16819C.1.pep
CYYPLDLITLMLPPFFSLPLFDAVFSFTVASVLQFEQTQDKTSIECKRACACSAQDIALSSSQKV

SEQ ID NO: 112988 - protein, 314 aa, Oryza sativa
  Clone ID: PAT_MRT4530_1681C.1.pep
MSPDLMREILPDKMKRRPHQGINSTARPDVVAASMGAPLPWRRIDQAALGSIGAGEPRFVPAKWGAAARPWVAACVAACPGLEELRLKRMVVTDGCLKLLACSFPNLKSLVLVGCQGFSTDGLGYCRYQLQVLDHIGDEGLKIVASSCIQLQELRVFPANANARASTVTEEGLVAISAGYTVFLYIGMYAERLEMLSVAFAGDTDDGMTYVLNGCKNLKKLEIRDSPFGDSALLAGMHQYEAMRSLWLSSCNVTLGGCKSLAASMANLNIEVMNRAASINEADNANDAKKVKKLYIYRTVAGPRGDAPEFISTF

SEQ ID NO: 112989 - protein, 166 aa, Oryza sativa
  Clone ID: PAT_MRT4530_16820C.1.pep
MGFVTAAADAVVALLSLTMAVAAPLFDAQVVLPRGLYPAPLVGIHRWFAAEFGHYLVADPPPFFRGLVWLDLAFLWPVCVANLYGILARRPWSAATSIMAGVYVLTYMSAIFGEMLGSGRTTPKLIQLYVPFALAAVTAVLRGFCSCSAQATAVASHAPTARKKRL

SEQ ID NO: 112990 - protein, 222 aa, Oryza sativa
  Clone ID: PAT_MRT4530_16821C.1.pep
MAARRFSAATPSSPLLLRRRLLSFQPQPTAAAAEADAGAGEWVRRAGALSLLGLTGAVAASAVSDLSVFLSAPGQNPRIPCPISIGVFQAIEKASQNQQIVNAIGAPIVRGPWYSASIAVNHARHSVSCTFPVSAPQGNGLLKFKAVRSGDESWFSFLQPNDWEILLMDAILDVPTDDGKHQTIRVTIPDNTAPPPAIDCKACKSQPTLTPPPPPYPSPPQK

SEQ ID NO: 112991 - protein, 225 aa, Oryza sativa
  Clone ID: PAT_MRT4530_16822C.1.pep
MTTEFLRVEKYLSVKRMELQPELSLGPTWPAPGFVSSTTKSTKSSSSESDGSSRKKRKHFTWEEPVSHANLELQLNDPLPLDWEQCLDLQSGRMYYLNRKTLKKSWIRPKEQSVNLELNISTTQPTVVVVPTIIDGGSTGAAATPVAVAVVAEETKKGGTIVSSGPGGNMVAVPCVNCHLLVMLCKSSPSCPNCKFVQPLAPPPPALPHRKLDAVKPLETLSLLH

SEQ ID NO: 112992 - protein, 212 aa, Oryza sativa
  Clone ID: PAT_MRT4530_16823C.1.pep
MGFVTAAADAVVALLSLTMAVAAPLFDAQVVLPRGLYPAPLVGIHRWFAAEFGHYLVADPPPFFRGLVWLDLAFLWPVCVANLYGILARRPWSAATSIMAGVYVLTYMFCVVSAHAQHRLLLLHLMPQLLGRKGSRSDEYREIPKEVPIMVTSWIRYEDGCHAQCQGWWCNMGAGHPTGAAAISYGVGTQLPIGDLKDSWTIHEGKQSNLSF

SEQ ID NO: 112993 - protein, 835 aa, Oryza sativa
  Clone ID: PAT_MRT4530_16824C.1.pep
MAMQEELNNFTRNQVWTLVERPDQNVIGTKWIFRNKQDEHGVVVRNKARLYQMDVKSAFLNGPISELVYVEQPPGFEDPKLPNHVYKLHKALYRLKQAPRAWYECLRDFLLKNGFEIGKADTTLFTKKFENDLFICQIYVDDIIFGSTNASFCEEFSSIMTKRFEMSMMGELTFFLGLQVKQAQDGTFISQTKYMKDILKKFGMKDAKPIKTPMPTNGHLDLGENGKCVDQKVYRSMIGSLLYLCASRPDIMLSVCMCARFQAEPKECHLIAVKRILRYSVHTLNLGLWYPKGCDFELLGYSDSDYAGCKVDRKSITGTCQFLGRSLISWSSKKQNSVALSTAEAEYVAAVSTMTREKRQKASQDVSGDESPPIRFPHGRLGKEKVVEGGSGSGTRTSPRFTRQSSNRPVQIRHVDSGQGSDAPNTRGRGRGGGRSSLAGRASHDFPVGSRENPVQLYKSLGFDTTPMHHIGRPKSNYLHQLAKLIMARENPVVEMKWIDWAYMRKKNNEVFNQVMQVCHNKNLGDILALEYDWNEEVIAQFYATAFFGTTRKGTPYVKWLTEGVRHKISMAQFAEMLGLDDEDLNRPNIHSKAPLPMIKTKFMYVKDAPRTCIGSTHGLHPNYKVLYSIFRWSLLPKVGDATALPSKHAHLLSRMRYHQPPFSVMKLIWYEIANTILEPKRGCIYAPFIMKMIESITGVFYIKDGRHNPFRPRAPPSSSPVTAKKVKKIERRQKEDRREAGKEVSDDSEDEVYVDPFEAYEAARNIVGEGPSTYFNEESSHSDDDVDDDDEGDTEAAAEDAPTDVDEGDTAAQSDESHLSSDTEIVPSDGDGDE

SEQ ID NO: 112994 - protein, 1322 aa, Oryza sativa
  Clone ID: PAT_MRT4530_16825C.1.pep
MAHEGSPAVREAKIELLEGRLGRFVMDDKETPQEMYDRMMILVNKIKGLGSEDMTNHFVVKRLLRAFGPRNPTLVSMIRERKDFKRLTPSDILGRIVSHEMQEEEAREVRQMVKNAAMIKNQEVALKAKQEEESSCEESEDEEMTFIVKRFKHFLRKSDYGKGRKDDDKGKRQSKRALANPLCNIWLTSLRDVNETLQEKFASLDKSHKDLDVQFDTLWNSTSQPNVVSNSSNPSTSNGCARCYNIDLNSHATNVDAMQAHKKENERRKSSTSKFRTCPLTGQTPGSSGQNDRKFLPCKTGSSGHFVRKFWASNRGKGLAGSSGYNARKFRPEGLFYDSYVISKNSEGKVVAYFIGNYNDEYRTCVWVPKALAYFSGGSSWVVDSGCTNHMTGERSMFISLDEEGGSRENIVFGDDGKGKLLHMDLFGPVAYISIGGNKYGFVIVDDFSCFTWVYFLHDKSEAQDVFKRFEKQAQNLYDLTIKRVRSDNGGEFKNTQVEEFLDEEGIKHEFSAPYDPPQNGIVERKNRPLIEAARAMLDEYKTSDVFWAEAVSTACHAINRLYLHKILKKTSYELFSGKKPDVSYFRVFGSKCFILSKRPRSSKFSPKVDEGFLLGYESNAHAYRVFNKTSGIVEVTRDVTFDESNGSQGEQVVVHVVGVVDPNQAIGTKAIGDIRPVETQDDQEDRDQPPSSTSNSPTSVVSAEPEVPGPIDRNLRTSPGPVEDALGDPDWVMAMQDELNNFTRNQVWTLVERPKQDVIGTKWIFRNMQDEHGVVVRKKARLFQMDVKSAFLNGPISELVYVEHPPGFEDPKLPNHVYKLHKALYGLKQAPRAWYECLRDFLLKNGFEIGKADTTLFTKKFKSDLYICQIYVDDIIFGSTNASFCEEFSSIMTKRFEMSMMGKLTFFLGLQVKQAQEGTFISQTKYVKDILKKFGMEDAKPIKTPMPTNGHLDLDDNGKCVDQKAGSSGVLGPELPVSVPPTMVIMPREKRQKLSQDVPADSRTPVRGPRGRLGKEKVGDFYSGSQIPIHSRRAGSIVIRDAPRSPSPAASESDNGGNEDEPGSKSNPFRLYKTRAVDPDPKRPRVNYLKNLLKCGNDRMVSPDTLPADSQDDRFRTLVQVNWYNSVIMGRSHPVVEMKWLDWQYMSSKNNIVFNEVRKVCERKHVADLLALQYSWNEEVIGQLYSTAFFGTTKKGLDFVKWTIQGQQYRVSMAQFAAALGIAAGKDVYDISDDEEFVDPFAAYETARDIASGEGPSGTSRFFNEESSHSEESSDGEESDAPTVNVPTDPDEAVDAAGQDINSPHSGDTEIIPSDGDNDEA

SEQ ID NO: 112995 - protein, 1213 aa, Oryza sativa
  unsure (1)..(1213): unsure at all Xaa locations
  Clone ID: PAT_MRT4530_16826C.1.pep
VPSGHAPQFDGTHNAAWKHKMKLHLISLHPSIWKVVCTDVDVPHDNMELTSEQEQLIHRNAQASNAILSALSLEEFNKVDGLEEAKEIWDTLQLAHEGSPAVREAKIELLEGRLGRFVMDDMETPQEMYDRMMILVNKIKGLGSEDMTNHFVVKRLLRAFGPRNPTLVSMIRERKELKSLTPSDILGRIVSHEMQEEEAREVRQMVKNAAMIKNQEVALKAKQEEESCCEENEEDLEVKPKPKPQDKVEGEGGVATVAFKSSSSIKERLFNNWSDDDDDSYHYSCFMAQGRKVMTQKSSHISLDVDSSDAESDNELDDVLKSFSKPAMQHLAMLMRALDSKEQSLERQEELLILEKKRNLALEESLAKECAKNEQLANELNLANGSLASRRDVNETLQEKFASLDKSHKDLEVQFDTLWNSTSQPNVVSNSSNPSTSNGCARCYNIDLNSYATNVDAMQALKKENERLGTLVKYGCVKTYHSKDALYKTITAHPNKDGHGLGFSGGSHVSKRVMVNGKECLMFVREGKAPQASEAYSSSGSSWVVDSGCTNHMMGERSMFTSLNEEGGSRENIVFGHDGKGKVMGLDRVCSACQAGKQVGSPHPIKNIMTTTRPLELLHVDLFGPVAYISIGGEFKNTQVEEFLDEEGIKHEFSAPYDPPQNGIVERKNRTLIEAARAMLDEYKTSDVFWAEAVSTTCHAINRLYLHKILKKTSYELLSGKKPNVSYFRVIGSKCFILSKRPRSSKFSPKVDEGFLLGYESNAHAYRVFNKTSGIVEVTRDVTFDESNGSQGAXVVVHVVGDVDPSKAIGTKAIGDIRPVETQDDQQDRDQPPSSTSNSPTSAVFAELKVPGPIDQNXPEVPGSTVWNLRTSGSENVPTAQVDGIDAAGTLEHTDQAQXPPVHHPRIHHTVQRDHPVDNILGDIRKGVTTRSRVPSFCQHFSFVSSLEPTRVEDALGDPDWVMAMQGELNNFTRNQVWTLVERPKQNVIGTKWIIRNKKDEHEVVVRNKARLVAQGFTQVEGHDVGETFAPVARLEPIRILLAYAAHHDFRLFQMDVKSAFLNGPISELVYVEQPPGFEDPKLPNHLYKLHKALYGLNQAPRAWYECLRDFLLKNGFKIGKADTTLFTKKYKSDLFICQIXVDDIIFGSTNASFCEEFSSIMTKRFEMSMMGELTFFLGLQVKQAQEGTFISQTKYVKDILKKFGMEDAKPIK

SEQ ID NO: 112996 - protein, 238 aa, Oryza sativa
  Clone ID: PAT_MRT4530_16827C.1.pep
FSSIPLNLGLTVLCSVRPDVLVIPVRNFRGSGFCRPEVPVFLAWNFRGRLGKEKVGVFYSGSQIPIHSRRAGSIVIRDAPRSPSPAASESDDGGNEDEPGSKSNPLRLYKTRAVDPDPKRTRVNYLKNLLQCGKDRMVDWYNSMIMGRSHLVVEMKWLDWQYMSSKNNIVFNEYSWNEEVIGQFYFTAFFGITKKGLDFVKWTIQGQQYRVSMAQFAAALGLDDDDLSRPHIFVEDAL

SEQ ID NO: 112997 - protein, 105 aa, Oryza sativa
  unsure (1)..(105): unsure at all Xaa locations
  Clone ID: PAT_MRT4530_16828C.1.pep
MGNCWFKGNPYFNRVSSNATKSESPKMQSPSERKEKDDSMLPSNAKEVEELRRESARNPLIAFTFEELKRITKNFRQDSLLXGGGGFGRVYKGYITSDLREGLTI

SEQ ID NO: 112998 - protein, 2111 aa, Oryza sativa
  Clone ID: PAT_MRT4530_16829C.1.pep
MSDLGGKNGENRNEDGARSKGTPSPKGVTIHFDYSKLTIPPHNFVSVPSGRAPQFDGTHYAAWKHKMKLHLISLHPSIWKVVCTGVDVPHDDMELTSEQEQLIHRNAQASNAILSALSPEEFNKVDGLEEAKEIWDTLQLAHEGSPAVREAKIELLEGRLGRFMMDDKETPQEMYDRMMILVNKIKGLGSEDMTNHFVVKRLLRAFGPRYPTLVSMIRERKDFKRLTPSDILGRIVSHEMQEEEAREVRQMVKNAAMIKNQEVALKAKQEEESSCEESEDEEMAFIVKRFKHFLRKSGYGKRRKDDDKGKRQSKRACFNCGEYGHFIADCPKSNEAKAKGGKKKPERAHVAEAHMAEVWYSRDEEDPEVKPKPKPKDKVEGEGGVATVAFKSSSSSNKRLFNNLSDDDDDFYHYSCFMAQGRKVMTQKPSHTSLDIDSSDEESDNELDDVLKSFSKPAMQHLAKLMRALDSKEQSLERQEELLILEKKRNLALEEILAKESSLRNVNETLQEKFASLDKSHKDLEVQFDTLWNSTSQPNVVSNSSNPSTSNGCARCYNIDLNSHATNVDAMQALKKENERLGTLVKYGCMKTYHSKDALYKTITAHPNKDGHGLGFSGGSPVSKRVMAYFSGGSSWVVDNGCTNHMTGERSMFTSLEEEGGSRENIVFGDDGKGKLQFIIRVSIVRDDSSIEFKGVLKGDLYLVDFDVDRVNPEACLIAKSSMGWLWHRRLAHVVMRNLASLLKGEHILGLSNVSFEKDRVCSACQAGKQVGSPHPIKNIMTTTRPLELLHMDLFGLVAYISIGGNKYGFIIVDDFSRFTWVYFLHDKSEAQDVFKRFAKQAQNLYDLTIKRVRSDNGGEFKNTQVEKFLDEEGIKHEFSAPYNPPQNGIVERKNRTLIEAARAMLDEYKTSDVFWAEAMSTACHAINRLYLHKILKKTSYELLSGKKPNVSYFHVFGSKCFILSKRPRSSKFSPKVDEGFLLGYESNAYAYRVFNKTSGIVEVTRDVTFDESNGSQGEQVVVHIVGDVDPNQAIGTKAIGDIRPVETQDDQEDRDQPPRHRHPIALQVLCLLSRKFRVLLTGTSGHLQARKFRVLQSGTSGSVAVKTCQWHKVEDALGDPDWVMAMQEELNNFTRNQVWTLVERPKQNVIGTKWIFRNKQDEHGVVVRNKARLFQMDVKSAFLNGPISELVYVEQPPGFEDPKLPNHVYKLHKALYGLKQAPRACFEIGKVDTTLFTKKFKSDLFICQIYVDDIIFGSTNASFCEEFSSIMTKRFEMSMMGELTFFLGLQVKQALVGIFISQTKYVKDILKKFGMEDAKPIKTPMPTNGYLDLDDNGKCVDQKVYRSMIGSLLYLCASRPDIMLSVCMCARFQAEPKECHLIAVKRILRYLVHTPNLGLWYPKGCGFELLGYSDSDYAGCKVDRKSTTGTCQFLGRSLVSWSSKKQNSIALSTAEAEYVAAGSCCAQLLWMRQTLKDFGYNFTKIPLLCDNESAIKIANNPIQHSRTKHIDIRHHFLRDHETKGDICLTHVRTESQLADIFTKPLDEKRFCELRSFHFQIFEFSSIPLNLGLTALCSVRPEVPVTPVRNFRGSGAGNSGVLGPELPVSVQPASNLDFATVSFNHCTPTLLILVAVVIMPREKRQKLSQDVPADSSPPVRGPRGRLGKEKVGDFYSGSQIPIHSRRASSIVIRDAPRSPSPAASDSDDGGNEDEPGSESNPLRLYKTRAVDPDPKRPRVNYLKNLLKCGRDRMVDWYNSVIMGRSHPVVEMKWLDWQYMSSKNNIVFNEVRKVCERKHVADLLALQYSWNEEVIGQFYSTAFFGTTKKGLDFVKWTIQGQQYRVSMAQFAAALGLDDDDLSRPHIFVEDALSPTSTTFMYEKDAPKDCLGTTRGLRPYYRVLYSIFRWSLLPKVGDATALPGRHALLLSRMRYNKPDFSIMKLIWSEIYETVCEPKRGFIYAPYIMKMIEAKTGICYFKDNQHKPFRPHAPTTSATPTTRVTRASTSAAPSFSAAPQRSESSSPIKKALRAIFCMCAKTAKSDEGPSGTSRFFNEESSHSEESSDDEESDAPTENAPTDPNEAVDAAGQDIDSPHSGDTEIIPSDGDNDEA

SEQ ID NO: 112999 - protein, 568 aa, Oryza sativa
  Clone ID: PAT_MRT4530_1682C.1.pep
MVFFPEEVVEHILGFLASHRDRNAVSLVCREWYRVERLSRRSVLVRNCYAARPERVHARFPGLRSLSVKGRPRFVPAGWGAAARPWVAACVAACPGLEELRLKRMVVTDGCLKLLACSFPNLKSLVLVGCQGFSTDGLATVATNCRFMKELDLQESLVEDRDSRWLGCFPKPSTLLESLNFSCLTGEVNSPALEILVARSPNLRSLRLNRSVPLDVLARILCRRPRLVDLCTGSFVRGNIVGAYAGLFNSFQHCSLLKSLSGFWDATSLFIPVIAPVCKNLTCLNLSSAPMVRSAYLIEFICQCKKLQQLWVLDHIGDEGLKIVASSCIQLQELRVFPANANARASTVTEEGLVAISAGCNKLQSVLYFCQRMTNSALITVAKNCPRFTSFRLCVLDPGSADAVTGQPLDEGYGAIVQSCKGLRRLCLSGLLTDTVFLYIGMYAERLEMLSVAFAGDTDDGMTYVLNGCKNLKKLEIRDSPFGDSALLAGMHQYEAMRSLWLSSCNVTLGGCKSLAASMANLNIEVMNRAASINEADNANDAKKVKKLYIYRTVAGPRGDAPEFISTF

SEQ ID NO: 113000 - protein, 102 aa, Oryza sativa
  Clone ID: PAT_MRT4530_16830C.1.pep
MRPPFRIRGVRRMSAALAAVNVAVAAAGAAAEWVGVTERCGRREEAAVGAAVALAAVRIVAMVGTARAQEVTALAVVSAGGSGGGGEGPTVEFAKRETRLRV

SEQ ID NO: 113001 - protein, 282 aa, Oryza sativa
  Clone ID: PAT_MRT4530_16831C.1.pep
MAVKDRFTGNPGRLTMLTTSGSVIGTPYVKWLTEGVRHKISMAQFAEMLGLDDEDLNRPNIHSEAPLPMIKTKFMYAKDAPRTCMGSTHGLHPNYKVLYSIFHWSLLPKVGDATALPSKHAHLLSRMRYNQPPFSVMKLIWYEIANTILEPKRGCIYAPFIMKMIETITGTAKKVKKIERRQKEDRREAGKEVSDDSEDEVYVDPFEAYEAARNVAGEGPSTFFNENSSHSNDDDDDDGDEGDTEAAAEDAPTDVDEGDTAAQSDESHLSGDTEIVPSDGDE

SEQ ID NO: 113002 - protein, 673 aa, Oryza sativa
  Clone ID: PAT_MRT4530_16832C.1.pep
MSMMGELTFFLGLQVKQAQEGTFISQTKYVKDILKKFGMEDAKPIKTPMPTNGHLDLDDNGKCVDQKVYRSMIGSLLYLCASRPDNMLSVCMCARFQAEPKECHLIAVKRILTYLVHTPNLGLWYPKGCDFELLGYSDSDYAGCKVDRKSTTGTCQFLGRSLVSWSSKKQNSIALSTAEAKYVAAVSTMPREKRQKASQDVSGDESPPIRFPRGRLGKQKVVEGGSGSGTRTSPRFTRQTSNRPVQIRDVESGQGSDASSSRGRGRGGGRSSGAGRASHDFPVGSCENPVRLYKTIGFDTTPMHHIGRPKRDRLIDPETQPEESQDPRFRTLTQLDWYNSVIMARDNPVVEMKWIDWTYMRKKNNEVFNQAMQVCHNKNLGDILALEYDWNEEVIAQFYATAFFGTTRKGTPYVKWMTEGVRHKISKNAPRTCMGTTHGLHPNYKVLYSIFRWSLLPKVGDATALPSKHAHLLSRMRYNQPPFSVLKLIWYEIANTILEPKRGCIYAPFIMKMIESVTGVFYIKDGRHNPFCPRVPPFSSPVAPRSIPSTSGGPSSSAPPPSSSSSPIKKALQAIFCMCAKTAKKVKKIERRQKEDRREAGKEVSDDSEDEVYVDPFEAYEAARNVAGGDDDEDDVEAAAEDVHTDVDTAAQSDESHLSGDTEIVPSDGDGDE

SEQ ID NO: 113003 - protein, 512 aa, Oryza sativa
  Clone ID: PAT_MRT4530_16833C.1.pep
MSGTSSDEPTLENLAHKLKGMENWYEELMRNSKSYKESTDKHLKTLSESLVKVVDQIEKMNQSHKQLTENIQNMIIEHENIVRRIGLLEAAGEEGAGATAHRHQRYDDEDEEQSVADDVEEDESVGNRRQRRVRDKDDPLSKVKFTMPSFDETYYQEMMIALSRCDLQETEDARISRFYGSLNREIRDILEYKEYNTMNRLFHFACKAEREVQGRNKHRSSFAGATSTRQSTPRQATTAVRSPTSTPSNAQEKSKNASVQTPAKSATSVASTGRTRDITCHKCHGIGHIARDCPNRRALFVNDDGEYTSTSDCDDEYALAATDHAGGQDNDDIEEVHLHPESLDQYPSLIVKLALSAKEKCEEQNQCHNLFQSKVLVKDHTVKMIIDSGSCNNLASEEMVKKLGLTTHPPPHPYHIQWFNTCGKMKEYEDVFHDEIPPRMANGRESAHNQEDGIESRTTPILEEEDDEDITSLDTLITSHTPMIIPSPSPVRPPETALTSNGPSAFMPTRFG

SEQ ID NO: 113004 - protein, 599 aa, Oryza sativa
  unsure (1)..(599): unsure at all Xaa locations
  Clone ID: PAT_MRT4530_16834C.1.pep
ALEKVRSDNGGEFKNTXSEEFLDEEGIKHEFSAPYDPPQNGIVERKNQTLIEAARAMLDEYKTSDVFWAKAVSTACHAINRFYLHKILKKTSYELLSGKKPNVSYFRVFGSKCFILSKRSRSSKFSPKVDEGFLLGYESNAYAYRVFNKTSGIVEVTRDVTFDESNGSQGEQVVVHVVGDVDPSQAIGPEVPGYPVRNLRTSDSEDVPTAVEDALGDPDWEMGMQEELNNFTRNQVWTSWAPSRFFATRKKNMGWLLFQMDVKSAFLNGPISELVYVEQPPGFEDPKLPNHVYKLHKALYGLKQAPRAWFEMSMMGELTFFLGLQVKQAQEGIFISQTKYVKDILKKFGMEDAKPIKTPIPTNGHLDLDDNGKSVDQKDCDFELFGYSDSDYAGGQYAREKRQKLSQDVPADMRPPVAFESDIDENENEPGTESHPLSFFQKRLFDPTLRRQRVNYLKNLLKCAKDRMVSPDTLPVDSQDDRFRTLVQVDWYNSVIMGRSHPVVEMKWLDWQYMSSKNNLVFNEVRKYSWNEEVIGQFYSIAFFGTTRKGLHFVKWTIQGQQYKTSMAQFAAALELDDDDLSRPHIFEEDALSVTSTTF

SEQ ID NO: 113005 - protein, 1452 aa, Oryza sativa
  Clone ID: PAT_MRT4530_16835C.1.pep
MSDLGGKNGENGNEYGASSKGTPSPKGATIPFDYSKLTIPPHNFVSVPFGRAPQFDGTHYAAWKHKMKLHLISLHPSIWKVVCTGVDVPHDDMELTSEQEQLIHRNAQASNAILSALSPEEFNKVDGLEEAKEIWDTLQLAHEGSPAVPEAKIELLEGRLGRFVMDDKLLRAFGPRNPTLVSMIQERKDFKRLTPSDILRRIVSHEMQEEEAREVRQMVKNAAMIKNQEVVLKAKQEEESSCEESEDEEMAFIVKIFKHFLRKSGYGKGRKDDDKGKRQSKRACFNCGEYGHFIADFPKSNEAKAKGGNKKPEHAHVAEVWYSGDEEDPEVKPKPKPKDKVEGEDGVAIVAFKSSSSSKERLFNNLSDDDDDSYHYSCFMAQGRKVMTQKPSHTSLNVDSSDEETSLRVVNETLQEKFANLDKSHKDLEVQFDTLWNSTSQPNVVSNSSNPSTSNGCARCYNIDLNSYATNVDAMQALKKENEKLGTLVKYGCMKTYHSKDALYKTITAHPNKDGHGLKFSGGSPVSKRVMINGKECLMFVREGKAPQASEVTCPFTGQTPRSSGQNDQKFLSCKTGSSGHFVRKFRASDRPKGVTGSSGYNARKFRPEGLYYDSYAYSSGGSSWVVDSSCTNHMTRERRMFTSLDEEGGSRKNIVFGDDGKGKVMGLGKIAISKNQSLSNVLLVNSLSYNLLSVSQLCKLGFNCLFTDVDVTVFRRDDSSIAFKGVLKGDLYLVNFDMDRVNPEACLIAKSSMGWLWHRRLAHVGMRNLASLLKGEHILGLSNVSFEKDRVCSACQAGKQVGSPHAIKNIMTTTRPLELLHMDLFGPMAYISIGGNKYGFVIVDDFSRFTWVYFLHDKSEAQDVFKRFAKQAQNLYDLTIKKNTQVEEFLDEEGIKHEFSAPYDPPQNGIVERKNQTLIEAARAMLDEYKTSDVFWAEAVSTACHTINRLYLHKILKKTSYELLSGKKPNVSYFRVFGSKCFILSKKPRSSKFSPKVDEGFLLGYESNAHAYRVFNKTSGIVEVTRDVTFDESNGSQGEQVVVHVVGDVDPSQAIGTKAIGDIRPIETQDDQEDRDQPPSSTSNSPTSVVSAEPEVPSPIDRNLRTSPGPEVPDFTVRNLRTCGSEDVPTAQVPSVHHPRIHHTVQRDHSVDNILGDIRKGVTTRSCVAGFCQHFSFVSSLEPIRVEDTLGDPDWVMAMQEELNNFTRNQIWTLVERPKQNVIGTKLFQMDIKSAFLNGPISELVYVEQPPGFEDPKLPNHVYKLHKALYGLKQAPRAWYECLRNFLLKNGFEIGKADTTLFTKKFKSDLFICQIYVDDIIFGSTNASFCEEFSSIMTKRFEMSMIGELTFFLGLQVKQAQEDTFISQTKYVKDILKKFGMEDAKLIKTPMPTNGHLDLDDNGKYVDQKGCDFEVLGYSDSDYAGCKVDRKSTTGTCQFLGPSLVNWSSKK

SEQ ID NO: 113006 - protein, 507 aa, Oryza sativa
  Clone ID: PAT_MRT4530_16836C.1.pep
MALFSRLRASSPPLAPADPFVLSLVFKSCAAAADARFLPHAASLHAFAVRSSAVSSVFVATALADVYAKAGCLGLALKVFDEMPHKNVVSWTTLVASLTRAGRRHEALRRFSEMRASGVHCDSYAYAAALTACADAGLLSRGREVHAFCAKLGLDSTPYVANTLATLYARCSDVDRALAAVSRMGTRDVAAWTTVISAYVQTGRAKEAIEAFVRMLREESSVAACRMNTHMLQLLLRVQILLGSALIDMYGKSGSMLDADIVFSHRVKDDVVSWTAMIVGYAEHGHSKKALELFQEMCHVGLKPDHVTFIGVLNACCHAGEVELGLRYLNEMNQIYGLYPAKEHYGCVVDLLGRAGRINEAEELIGKIAANERDGVVWTSLLRACAARGEEETGKKAAERAMEAEPWGAGAHVAMANLYASKGQWHEAAQERHMMKQKGVVKGAGWSSITVGGEGRRVGVFVASDRTHPQDSAIYRMLELIYFGTGMARYVPDQLDLGSEVDMMISS

SEQ ID NO: 113007 - protein, 105 aa, Oryza sativa
  Clone ID: PAT_MRT4530_16837C.1.pep
FSGIFKRGSSSRTNRHDEPSTPSSADASMIDFVYVASRQRLGLFIWRYQDACKMYGLISCMLRVGGGLVYLYEDIRTLARCREISGVRVQGVKMYGYIRCKVRMS

SEQ ID NO: 113008 - protein, 73 aa, Oryza sativa
  unsure (1)..(73): unsure at all Xaa locations
  Clone ID: PAT_MRT4530_16838C.1.pep
IDSXAXLXAVRLRPRLRFVRRHRXPPASGXWWAXTFAVEEEXXVAXAVXGGAANXTXCSRSTXLPGRYWAATP

SEQ ID NO: 113009 - protein, 566 aa, Oryza sativa
  Clone ID: PAT_MRT4530_16839C.1.pep
MNELCDLKVHINGHHTLLLHQSVMCAFSGRLRTMVTQEKKKRKTSRAESLSVKLADFPGGGEGFELVARFCYNNGRVPLCPSNLPLLHCAAVFLEMTEEVCTCNLLTQAEAFVDGLYYWTWADVLAAVKSCEPFAAAADASGLLERLISALFSKITANPETPVAAGAVGTPNRSSSSCSSSPDTLGFGRSSSTKTPESMKPCFAREWWFDDMTSLCPQTIEKAMRVLGCYGIENKNLILTRFLLHYLRAATRRPALCREGGGGLAGLADTAVHGVALVGGTAFSCRGLFWVLRIVSAVGLSKECRHKLERLMGLMLDQATLDDLLVSGDDGGVYDVNLVMRLVRVFVGSEEEADLPSQRMRKVGRLVDKYLGEISPDHGLRVSKFLAVAESLPDSARECYDGVYRALDIYLESHPTLTIEERTTLCRCLNYEKLTLEACKDLAKNRRIPPGIAVQALASQQSKLQIRPAAAAAKGTGGGRPDPSQTPRKIIVSGSRARSVDLDAMDEKELLKLNLQKMQNRVVELERACKEMRGQMSKMAKGGRPSSSFGAAACHQTGGRGLPRLC

SEQ ID NO: 113010 - protein, 245 aa, Oryza sativa
  unsure (1)..(245): unsure at all Xaa locations
  Clone ID: PAT_MRT4530_1683C.1.pep
MQRRRGLAALAVLLALAARGADASVHEYSGGGFAPRANSFFFHGGSEGLYASDPTSNSSASFIRFDSVTFRRTQESAGRHEAMQQKTGLVEAIIVEIQDRSKIGGSYLHSDAICCTPELDKEKSCKVGEVIIQPNPDNPDWPKRVQTFFSGRDEEASMVTQVVSINKTGMYYLYFMFCDPQLKGLKITGRTVWRNPQGYLPGKMAPMMTFYGFMSLAYLVLGLLXVLQIGRSWKDILSCLPYNSC

SEQ ID NO: 113011 - protein, 42 aa, Oryza sativa
  Clone ID: PAT_MRT4530_16840C.1.pep
IIQKGIPLDPLHLGSAAQMNGLLRRSLTCQAIRCICLPVLEM

SEQ ID NO: 113012 - protein, 538 aa, Oryza sativa
  Clone ID: PAT_MRT4530_16841C.1.pep
MNELCDLKVHINGHHTLLLHQSVMCAFSGRLRTMVTQEKKKRKTSRAESLSVKLADFPGGGEGFELVARFCYNNGRVPLCPSNLPLLHCAAVFLEMTEEVCTCNLLTQAEAFVDGLYYWTWADVLAAVKSCEPFAAAADASGLLERLISALFSKITANPETPVAAGAVGTPNRSSSSCSSSPDTLGFGRSSSTKTPESMKPCFAREWWFDDMTSLCPQTIQKAMRVLGCYGIENKTLILTRFLLHYLRAATRRPALCREAAGGLAGLADTAVHGVALVGGTAFSCRGLFWVLRIVSPVGLSKECRHKLERLMGLMLDQATLDDLLVSGDDGGVYDVNLVMRLVRVFVGSEEEADLPSQRMRKVGRLVDKYLGEISPDHGLRVSKFLAVAESLPDSARECYDGVYRALDIYLEGQYQSSLFSYLNEIGRPSFGRPGKKKISPTLTIEERTTLCRCLNYEKLTLEACKDLAKNRRIPPGIAVQALASQQSKLQIRPAAAVAKGTGGCRPDPSQTPRKIIVSGSRARSVDLDAMDEKSCSS

SEQ ID NO: 113013 - protein, 66 aa, Oryza sativa
  unsure (1)..(66): unsure at all Xaa locations
  Clone ID: PAT_MRT4530_16842C.1.pep
MANSIAMALLFVKSFVVLSLAAVLLALDGGGGAFXMGLPXXXPTVNFSIGVQGMVXCKTCRDXGYL

SEQ ID NO: 113014 - protein, 69 aa, Oryza sativa
  Clone ID: PAT_MRT4530_16843C.1.pep
RPPSSCAHGPSVSASSQSSSTRGEHFSTDTGSPDAYARCRLKTRTSERLEELLLRKMEWRVRARLEALL

SEQ ID NO: 113015 - protein, 53 aa, Oryza sativa
  Clone ID: PAT_MRT4530_16844C.1.pep
HQLIVKHYYSIHTLLLIMNAGIITSLINKIPKSKHIKFDTSMLNFHIGCCFLH

SEQ ID NO: 113016 - protein, 118 aa, Oryza sativa
  Clone ID: PAT_MRT4530_16845C.1.pep
MAYGDGNIKVNRYAQQTDAGQETKCLLLSSKALVNVKPNLQIIADDVKCTHGAAISGEHDPNAIYFLQARGIDAKTAADALNFAFGAHVINQIPFKPIEKKTLAHFKALLASSRQNDE

SEQ ID NO: 113017 - protein, 368 aa, Oryza sativa
  Clone ID: PAT_MRT4530_16846C.1.pep
MPSSPKVFSSATTSRRATLRRILSTPAFSAACLLFGLAGFLAAALSFSWSPGSAPRARCPDSSRPLSVSVAWDRRPGDASAGAVAAAGAAVDLPASHATGSRGRHKVMAFVGIFTGFGSVGRRRALRRTWLPADRQGLLRLEEATGLAFRFVIGKSNDKSKMAALEREVQEYDDFVLLDLEEEYSKLPYKTLAYFKAAYALYDSDFYVKADDDIYLRPDRLSLLLAKERSHTQTYIGCMKKGPVFTDPKLKWYEPQSFLLGSEYFLHAYGPIYALSADVVASLVALRNNSFRMFSNEDVTIGSWMLAMNVNHENTHALCSPECTESSIAVWDIPKCSGLCHPEVKMLELHRRKECTGGPSAVSESDDR

SEQ ID NO: 113018 - protein, 78 aa, Oryza sativa
  unsure (1)..(78): unsure at all Xaa locations
  Clone ID: PAT_MRT4530_16847C.1.pep
PRCSTPPPPVPPSPASPRAAPHPYRHDTPSPPALPSPLSPXPSHPPRRDMSPPPAPPSSSSPPRLPVSNSPSRRRALD

SEQ ID NO: 113019 - protein, 542 aa, Oryza sativa
  Clone ID: PAT_MRT4530_16848C.1.pep
MMGCFTVLRSKKKKPLALTKKSVDARESTSSRLPEPEAHVPSLQSAPPSFRNKAKIHQSEKKASYSRARVLSAPSSLIVVDQDGLPYAEFDDQDDSRGKGGSIKGHRFSNPLPLPLPSPEGKSLRNFGSFKAINASGPLDASGPLPLPPKKCDGLKNFSYEELSSACQWFSGDQCVSESLTSTSYKASFRDDFTDPKTIEAIVSRLLSSTQSLKEFKTQVNTLASLQHPNLCKLIGFHAREESNERMLVYERLHHGSLDKLLFGRSDGRFMDWSARLKVALGAARGLAFLHDEGPFQAMYNDFSTSNIQIDKDFTAKLSGYGCVGFNTEEEISNASVAAANLSVETLEKGVLTPKSNVWCFGVVLLELITGRKNLDVRSSKEERNIVKWSRPFLTDDSRLSLIMDSRIKGRFPTKAARIVADIILRCLNKDPSERPTMRAVVESLASVQDIKVPCRYPLQEPSAAPRKVMLKSTSLNGIIHHHPVVTFSPSPPSRNQHLLSPRSSTSALLPPRTSCALDDPRVSSIKKSPSPILRRSGVEGF

SEQ ID NO: 113020 - protein, 128 aa, Oryza sativa
  Clone ID: PAT_MRT4530_16849C.1.pep
MGMGKINLPPDQYFQKYLSSLVNCILVQAIESGCPNPLHSPPSHEGDAVSVNPPGGGASRRGRHVWCRRRWSGADGRADPVADLDVTMDSSDQGWAKPRQNPMAAVASVTSRGGSSGVSGFLERWQRW

SEQ ID NO: 113021 - protein, 687 aa, Oryza sativa
  Clone ID: PAT_MRT4530_1684C.1.pep
MAEQAKAHNLSPSVSGDDGEPNPRRRARTPPPPPRQSPRREEALERVEGSATSTSTGDGEGRRDGERHLLVYGDGSTPQGALQAAGALLRHPPIVPDPESPAQRWLDDVANLVMTARQRLGAGGRSSATKTSGAATTGSVSSRRRARRAAAVARHSAATPSSAPPTQEDLRGGPDARIGIERRRNGRRAAHAKEGASSSGVSHQHGRGDQPSVPPVGGVGCRAFVASLRNVRWPPRFRPTIAEKYDGSVNPAEFLQVYTTGIEAAGGDDRVMANFFPMALKGQARGWLTNLPPASVHSWEDLCQQFTMNFQGTYPRPGGVCGTTACSKRSPPKSPRLPRSFFSSRTEWLARRRPGLGTPPVPVWQLRPPPGPPLGQGGGTGGGRRGRPIPTTRVMSSPSMAFRWPPERGGLRATKRRKPTLPDLGYLEERRRRAALRAARYQQSLRRYHQRHVRARSLCVDDLVLRRVQTRAGLSKLSPMWEGAPDPQDGPEATAGRPHLSPSDPEANPVPTRPGRVQGEEAPEPNGGLRPLTTGVGPLPACQTTPGAPDPQDGPEATVGRPPLSSSDPEVVGTEDECTPRGRLDKECPRDVAPSEEDRPHRKAHQVTVVTSYPLGQILYNREGTGRVVKWAIELSEFDLRFEPSHAIKSQALADFVAEWTPAPELVSAPEASSGPSQLPHTTLWVM

SEQ ID NO: 113022 - protein, 49 aa, Oryza sativa
  Clone ID: PAT_MRT4530_16850C.1.pep
ILELIVHQNSAISFLSPARWQKKVNCATHPPLFPCPPMRLDNICLLLEG

SEQ ID NO: 113023 - protein, 40 aa, Oryza sativa
  Clone ID: PAT_MRT4530_16851C.1.pep
RAASNQSCSHRPMPEPQQHRIQATSATYTTAHGTTGSLTH

SEQ ID NO: 113024 - protein, 58 aa, Oryza sativa
  Clone ID: PAT_MRT4530_16852C.1.pep
MDAVAEAAPKTMRAEQYDKYEGGPEGLKHEEVPIPAQKEGELLIKMDAASVNPIYWKN

SEQ ID NO: 113025 - protein, 53 aa, Oryza sativa
  Clone ID: PAT_MRT4530_16853C.1.pep
MANGGAPLARAMWIQKGAVKVLFEFTSDGYYPHCRCSVERAMEIYMNNLKELK

SEQ ID NO: 113026 - protein, 138 aa, Oryza sativa
  Clone ID: PAT_MRT4530_16854C.1.pep
KGPPKKPLTGTNFFPGGFFSLGAKPTFLGRMLPLLKRPGINWVVEVPPSRFWDRKNSPPVCKDFEFFFPPNFSAWKNQRGGGGPALFSPPFPTQFKLTVWGLGENRSPPPLCFWNLFSPLLGVLKPPPFFFFSRLGGP

SEQ ID NO: 113027 - protein, 444 aa, Oryza sativa
  Clone ID: PAT_MRT4530_16855C.1.pep
MVLEGQETPAAAAVHGHRLSTVVPSSVTGEANYDLADADLAYKLHYLRGAYYYPAGDAVRGITIKSLKDPMFPWLDAYFPVAGPKPTAPSPRTRNRRNDADAAAARRPYIKCNDCGVRIVEARCDRALDDWLRDESPDRLRHLCYDKVLGPELFFSPLLYIQVTSFKCGGMALGFSWAHLIGDVASATACFNTWAQILSGKKPAGTVLEPANKPLDRAPAAAAAAPPRSVKPVGPIEDHWLVPAGRAMAWYSFRVTEPALKKLQSAAGRHAAGTFELVSALLWQAVAKIRAAASKEVTTVTVVRTDMAARSGKSLANEQRVGYVEAASSPAKTDVAELAAMLAGDKVVDETGAVAAFPGDVVVYGGANLTFVDMEQVAPYELELKGQRPVHVEYGLDGVGEEGAVLVQPDAGGRGRVVTVVIPRDEVDSLRAALGSTLLLLQDA

SEQ ID NO: 113028 - protein, 721 aa, Oryza sativa
  Clone ID: PAT_MRT4530_16856C.1.pep
MWQGLSANALGADTLHTLNRPMCGNELTVSLVVQRSLSRAQQFINKWELQCMLLASFSLQIFLLFSSGFRKRHSSRVLSVLLWLAYLSADPVAVYVLGRLSLRASGSSDPRNQQQLVLFWAPFLLLHLGGQETMTAFSMEDNTLWKRHLLSLATQMATAIYVVSKQLRGDSRLVAPMVLVFVFGTAKYAERIWALRRAGSVAPGTSSSTANLVSRASSNAVWDTQGYYSQLCYVIERKLERNFEFILAVANEGFRLSLGFFMDMTPSISLLPEDISEIKNSVEVFKSSEDIVHMAYKLAEINLSLIYDYLYTKFGTRHFHIVPVCNVFHLIIKIALISVALALFMRARAGQKAHDVVDVIISYILLVGAIVLEICSVLMSFISSCWAYKTIITLPLACPLCQKFPGVIAALLSLVRHLHPDSRGEWSGKLAQYNMIEGCIQEKQAGAGLLRRARRYIGIDDSKAIKHIGVSPEVKKLVLDKLLEIASTSRVLEWDLGVGKFRGQWAQWVVEAKEDHLRSAAQQVLQVSNIQGLEFVSSVLLWHIITDICLLVDEDEDGGAELRGPIRDLSEYTMYLIADCGVMAGSEGHFVLRKGRHEVLSWLREKGESGCDRRKVIEEIRNEDSSFFADNYYPVLDRARRVSSDLLVLEEPGDRWELIAAVWMEMLCHISYNCGAGFHAKQLTTGGEFVTHVKMLLFMLGVPFLRDVKEPLFYRAGNLYS

SEQ ID NO: 113029 - protein, 192 aa, Oryza sativa
  unsure (1)..(192): unsure at all Xaa locations
  Clone ID: PAT_MRT4530_16857C.1.pep
GTRRRTPCTAARSPRRTPTSPCTRRSSRHRDPLPPAPPPPPPPPTTTTATAAASPSPAPAETAGSRLTTLRSPRPPAAPVEPRPDPSPPPPIRPPAPVGSAPRPPPPPPPPSWRRAWCLCXARAPSPPPPPPPPLLPPPPTPWRRSEAAMWAXRRARRHRAAARARTPPPPAPSCSAPPPAAPPRPSSAGSA

SEQ ID NO: 113030 - protein, 377 aa, Oryza sativa
  Clone ID: PAT_MRT4530_16858C.1.pep
MSPPEQPVAADSGASSAETPPSLLEQVTETPPPSPSSSSAAAAAAEAQVGGDHGGESCDVWGGRWVYYEANAPLYKESACEFLTEQVTCVRIGRRDDDYQKWRWQPDGCDLPRFDAKLLLEKLRNKRLMFVASALNRNQWESMVCLVQSEAPWEKKSLVKNDSLNVFRLEEYNATIEFYWSPFLVESNSDDPNMHSIVDRIIKPTSIAKHAANWEGVDYLIFNTYIWWMNTPEMKILHGGSFSKKPVKYDEMERVAAYRKVLKTWSRWVEKHVDPKRSTVFFMSVSPVHMQSEGWGKPDAIKCFSETQPAINYTKKLEVGTDWDLFSTAHHVTKAMKRVPVHFINITALSEIRKDAHTSVNTLRQGKLLTKEQKANP

SEQ ID NO: 113031 - protein, 52 aa, Oryza sativa
  Clone ID: PAT_MRT4530_16859C.1.pep
IYMTLSFHSPPMMMYDFIFNIRTIILLPFSTRNTNSGNAPGSTIVVQGRYHI

SEQ ID NO: 113032 - protein, 87 aa, Oryza sativa
  unsure (1)..(87): unsure at all Xaa locations
  Clone ID: PAT_MRT4530_1685C.1.pep
SSPHQVIACYSWRLPPSRRLVEELPGDLSEKIVEEARCRFXVSGLEFTAFGVKEELPRVIEAWVVLSVGRLPPCPLLDEGGVRWLRG

SEQ ID NO: 113033 - protein, 121 aa, Oryza sativa
  Clone ID: PAT_MRT4530_16860C.1.pep
PPQTLGKCKNNKRYMVYVCNSTLSSSLHVGFLGEPSGKKPAKEKTNQSISAKKRKKKKEGVATTFLDIGSVTSAVSSMAAATEGRTVIVGDGDKGMQRRWSWRCQRRRRLRSRRRQRRCEA

SEQ ID NO: 113034 - protein, 56 aa, Oryza sativa
  unsure (1)..(56): unsure at all Xaa locations
  Clone ID: PAT_MRT4530_16861C.1.pep
LYLKISXKKXXPVSVLVXDTXGRXLEHNXYSXYIKMXEAGSFXSXYSSYTTPXGSR

SEQ ID NO: 113035 - protein, 62 aa, Oryza sativa
  unsure (1)..(62): unsure at all Xaa locations
  Clone ID: PAT_MRT4530_16862C.1.pep
XXXKKKIPXPNHFWGRPWKKMHGPLKSARNGPYVSRLKLVYFYSGKNLDAPQKKKKKKKTPA

SEQ ID NO: 113036 - protein, 218 aa, Oryza sativa
  unsure (1)..(218): unsure at all Xaa locations
  Clone ID: PAT_MRT4530_16863C.1.pep
MVFSRRTECLVYXXXXXXXXXXXXXXXMSRVQGEEKHSCPHEIGKRSPGINQHEIGKQTARWSTPTLVLIRGRRSSYATCIPWLFYVLPLRRKNVSRNFHAAPNRVSTRSRRLVSRARARPGHGASWISSRYVRGPCAGLRGYAPMRYASLHGPRAAGFESEACTRVADEQAARDLNIELPRKYHVNATSDEDRVKLAIRCSGHLGVTAQGVSGFRPR

SEQ ID NO: 113037 - protein, 106 aa, Oryza sativa
  Clone ID: PAT_MRT4530_16864C.1.pep
AFVQKQPLNDPNGIGPGAPHAFKFGRFCFKPPFFLRVKKKKSQNSPLQGFFPSFFPPRVFPPLFPFFFKKEFFWGPPIFFLGFGRFSPPPNFKILIFTFLVQRIFK

SEQ ID NO: 113038 - protein, 234 aa, Oryza sativa
  unsure (1)..(234): unsure at all Xaa locations
  Clone ID: PAT_MRT4530_16865C.1.pep
MASSAAARSRAAASAAWARLLSLRPSPPVSSTHHLTLRIASPRRHFFFSANASSGSSRLKQIQSERVIHDLFAELQRERQRDRQEEDEDEGEDEDYLGVKPLIEKLERRRAKEEAAPDDSFWEPTDSDSDEEDERYTPDAIKRRVDEFERKCNRHSELLRSFAEAETLDDAHKWMTKIDRFEERHLKLXLEYRVIGDMMNRLKDATGKDRFLLLQSLXRAGRIMECRGAYDPSN

SEQ ID NO: 113039 - protein, 52 aa, Oryza sativa
  Clone ID: PAT_MRT4530_16866C.1.pep
EEDEEEGQTEIRGMALEDKSSIEKLYKHIMSILPTSEIASKEEQCDYDNAWN

SEQ ID NO: 113040 - protein, 147 aa, Oryza sativa
  Clone ID: PAT_MRT4530_16867C.1.pep
MNHHQQIRSTTAAEQQEASAGGGGGEEYEDLMPVMAGRLGAEGLLSELRAGFRLLADPARGAITAESLRRSAASVLGLGGGGGEMTVEEAAAMVREGDQDGDGALSEAEFCVLMVRLSPGIMGDAEGWLEEAIADELLRSLPPPPPA

SEQ ID NO: 113041 - protein, 208 aa, Oryza sativa
  Clone ID: PAT_MRT4530_16868C.1.pep
MSTPHLSGIAALIKGTHPDWSSAAIKSAIMTTAYVVDNQKKAILDERYNIAGHFAVGAGHVNPSEAIDPGLIYDIDDAQYISYLCGLGYTYVQVEIIANQKDACKGSKITEAELNYPSVAVRASAGKLVVNRTVTNVGEANSSYTVEIDMPREVMTSVSPTKLEFTKMKEKKTFSLSLSWDISKTNHAEGSFKWVSEKHVVRSPIAIF

SEQ ID NO: 113042 - protein, 527 aa, Oryza sativa
  Clone ID: PAT_MRT4530_16869C.1.pep
MASSAAARSRAAASAAWARLLSLRPSPPVSSTHHLTLRIASPRRHFAFSANASSGSSRLKQIQSERVIHDLFAELQRERQRDRQEEDEDEGEDEDYLGVKPLIEKLERRRAKEEAAPDDSFWEPTDSDSDEEDERYTPDAIKRRVDEFERKCNRHSELLRSFAEAGKAHSPLPSFLPSFANAHFKHLPLLPETLDDAHKWMTKIDRFEERHLKLPLEYRVIGDMMNRLKDATGKDRFLLLQKLNRAVRIMECREAYDPSNPSNFGVIQHQQVGSPEDLVLNAGFDREKQMIQGAGDDDDDEEFNEDKEKDDLLIEKLNSIEKKIEEKLAELDHTFGKKGRVLEEEIKDLVEERNSLTEHKRRPMYRKGFDVKVIDVNRTCKVTKGGQIAKFTALLATGNYHGVVGFAKARGPTAKIAIQRAYEKCFQDLHYMERYEDHTIAHAIQAKYEKTKIYLWPGPMRSGMSAAGRTVETVLYLAGFSNVKSKIIGSRNPLNVIKALFIALNAIETPKDVEQKFGRTVVESYLL

SEQ ID NO: 113043 - protein, 712 aa, Oryza sativa
  Clone ID: PAT_MRT4530_1686C.1.pep
MTARQRLGAGGRSSATKTSGAATTGSVSSRRRARRAAAVARHSAATPSSAPPTQEDLRGGPDARISIERRRNGRRAAHATEGASSSGVSHQHGRGDQPSVPPVGGVGCRAFVASLRNVRWPPRFRPTIAEKYDGSVNPAEFLQVYTIGIEAAGGDDRVMANFFPMALKGQARGWLMNLPPASVHSWEDLCQQFTMNFQGTYPRPGGVCGTTACSKRLPLKSPRLPRSFFSLRTEWLVRRRHGPGTPPVPEWQLRPPPDPLLRQGGGTGGGRRGRPIPTTRVMSSPSRAFRWPPERGGLRATERRPALLDLDYLEERRRRAALRAARYQQSLRRYHQRHVRARSLCVDDLVLRRVQTRAGLSKLSPMWEGPYRVIGVPRPGSVRLATGDGTELPNPWNIEHLRRFYPYLYKKGARRPRKKKEKAIQDWRGPGGSLRRARVTSLVVAVVRTTVTALLVGVEGEREPRGRTLEAVDDVVGGVPDLRACAVLGSGRELFQRCPRGEVRVREAPKPNGGPRPPTAGVGPPPACPTVLGAPDPQDSLGATTGRPRLSPSDPEVIGTEAEGAPRCLSDEERPGDAAPSEEDRPRRKVQRPVYFVSEALRDAKTRYPQAQKMLYAILMAPRKAPSPYLQAKRTGSSRFACYSSNVAVLKRPLIIGSRVTIADVRDLRSLGFCPTVETGPTCHQALRSGVTPDRFPRGGRSPWHNTGGYCR

SEQ ID NO: 113044 - protein, 129 aa, Oryza sativa
  unsure (1)..(129): unsure at all Xaa locations
  Clone ID: PAT_MRT4530_16870C.1.pep
SPSCCCFVTTATETSRRSSWRFFTASVRADLRPVFAFLTDDLAVPDTTXRRVVVKCPQTLACSVRDQLRSALLYLCRLGFHDGRALCLQDPILDGARLLGLTWGAGWRQRAGEQRHACFVTVTPGNIHH

SEQ ID NO: 113045 - protein, 108 aa, Oryza sativa
  Clone ID: PAT_MRT4530_16871C.1.pep
GAMHSYMSLLTMPDERHILLLLMSILSCKDMHAPSSCLHPLVHKHLHYHFAFGSMFCNRPRNTYTWAFCCLLLHLLPSNPTSYWNLPPSISMWPWLIRPRIMEKELVP

SEQ ID NO: 113046 - protein, 142 aa, Oryza sativa
  Clone ID: PAT_MRT4530_16872C.1.pep
MEADTMMVAAVEEATVVVAEAEAARRWLLSNGGNGAASSLSSRYSGGGIGGQQLLVDEPVKVGDPDTGKGYQAHSGRDPRRVTPHLFLSTTLAYYSHHPFPSPPRRDCLLGSSSLPHRRASSSPATLPRLLASHVDGAASSQ

SEQ ID NO: 113047 - protein, 125 aa, Oryza sativa
  unsure (1)..(125): unsure at all Xaa locations
  Clone ID: PAT_MRT4530_16873C.1.pep
LQQVEPAIVAAAGTGTIPXVGVGIRRALPPFPKLRPLQVAPPPPPHVGCRVRRVLRCRLRGNRRDHAADGDPCRDRAPGWGSGGLGGGSGGGRIGFVPMFAGHAAAAMPGLELGLSQDSHICIWI

SEQ ID NO: 113048 - protein, 1916 aa, Oryza sativa
  unsure (1)..(1916): unsure at all Xaa locations
  Clone ID: PAT_MRT4530_16874C.1.pep
MCFAILCFTLAFLPKSCVFPIPLFFQSYDSKGPKLFFSIIYPSCEPKASLEFSPSQLSTLCMNARFPYSPAEVAKVQLVQFGMLIAEENRPRSLLRIELAKNMEKGKTXPGGLSDLPLGHIDQNINCXTCMAAKPDRHQPIVHLQGVDTIHHIRYTEPVQDIARLLHHKGPINLATVALIKHIHAPQLINLQHIHHSSLHVYKTKKDFQAADVLDLPVALDIQDTVRKRGVIVPLQRNIVLDGKNMVALFKEPVKLIDDKDQHHDPVARKQILSAEKVLNVLKRISDKDCLLFGLNPIFARPDWNILXVHPVIPCPVRPSIMMDTSSRSEDDLTHQLAMIIRHNENLRRQERNGAPAHIITEFAQLLQFHIATYFDNELPGQPRATQRSGRPIKSICSRLKAKEGRIRGNLMGKRVDFSARTVITPDPNINIDELGVPWSIALNLTYPETVTPYNIERLKELVEYGPHPPPGKTGAKYIIREDGQRLDLRYVKKSSDQHLELGYXVKAPNDGIFSLNRQPSLHKMSIMGHRIKIMPYSTFRLNLSVTSPYNADFDGDEMNMHVPQSFETRAEVLELMMVPKCIVSPQSNRPVMGIVQDTLLGCRKITKRDTLIEKDVFMNILMWWEDFDGKVPAPAILKPRPIWTGKQVFNLIIPKPINLIRFSAWHSEAETGFITPGDTMVRIEKGELLSGTLCKKTLGTSTGSLIHVIWEEVGPDAARKFLGHTQWLVNYWLLQNGFSIGIGDTIADAATMVKINETISKAKDDVKELIMQNQDKQLEAEPGRTMMESFENRVNQVLNKARDDAGSSAQKSLSESNNLKAMVTAGSKGSFINISQMTACVGQQNVEGKRIPFGFIDRTLPHFTKDDYGPESRGFVENSYLRGLTPQEFFFHAMGGREGLIDTAVKTSETGYIQRRLVKAMEDIMVKYDGTVRNSLGDVIQFLYGEDGMDAVWIESQKLDSLKMKKGEFDNVFRYELDDENWRPNYMLPEHVDDLKTIREFRNVFEAEVQKLEADRFQLGSEIATTGDNTWPMPVNLKRLIWNAQKTFKIDLRRPSDMHPMEIVEAIDKLQERLKVVPGDDAMSIEAQKNATLFFNILLRSTFASKRVLKEYRLTKEAFEWVIGEIESRFLQSLVAPGEMIGCVAAQSIGEPATQMTLNTFHYAGVSAKNVTLGVPRLREIINVAKKIKTPSLSVYLKPEVNKKKELAKNVQCALEYTTLRSVTHATEIWYDPDPLGTIIEEDVEFVRSYYEMPDEDIDPDKISPWLLRIELNREMMVDKKLSMADIAEKINHEFDDDLSCIFNDDNADKLILRVRITNDEAPKGEIQDESAEDDVFLKKIESNMWTVTEMALRGIPDINKVFIKYGKVNKFEDNVGFKADNEWMLDTEGVNLLAVMCHEDVDATRTTSNHLIEVIEVLGIEAVRRALLDELRVVISFDGSYVNYRHLAILCDTMTYRGHLMAITRHGINRNDTGPLMRCSFEETVDILLDAAVYAESDYLRGVTENIMLGRLAPIGTGGCALYLNDQMLQQAIELQLPSYVEGLDFGMTPARSPISGTPYHEGMMSPSYLLSPNIRASPITDAQFSPYVGGMAFSPVPSPGYTPSSGGGYSPSSPVYSPGPGYSPTSPSYSPASPSYSPTSPSYTPGSPTYSPTSPSYSPTSPSYSPTSPSYSPTSPSYSPTSPSYSPTSPSYSPTSPSYSPTSPVYSPTSPAYSPTSPAYSPTSPSYSPTSPSYSPTSPSYSPTSPSYSPTSPSYSPTSPSYSPTSPSYSPTSPAYSPTSPGYSPTSPSYSPTSPNYSPTSPSYNPSSAKYSPSHAYSPSSPRLSPYSQTSPNYSPTSPTYSPTSPSYSQPSPSYSPTSPYTTSGGPSPDYSPTSPNYSPSGSYSPTAPGYSPSSTGQQFSPQAADKDKEKAK

SEQ ID NO: 113049 - protein, 1871 aa, Oryza sativa
  Clone ID: PAT_MRT4530_16875C.1.pep
MDAARFPYSPAEVAKVEAVQFGVLSPDEIMGLIIFRVIRFNRLSASLNARTQKLHVECVRNTIFGMRQMSVVHIEHAETMEKGKPKPGGLSDPRMGTIDRKIKCETCMAGMAECPGHFGHLELAKPMFHIGFIKTVLSIMRCVCFNCSKILADEDDIKFKQALKIRNPKNKLKRIYDACKNRKICAGGDNLDVQEQQGTDDPVKKRGGCGAQQPNITVDGMKMVAEYKAPKKKNDDQEQLPEPVDRKQILSAERVLNVLKHISDEDCLLLGLNPKFARPDWMILQVLPIPPPPVRPSVMMDTSSRSEDDLTHQLAMIIRHNENLRRQERNGAPAHIITEFAQLLQFHIATYFDNELPGQPRATQRSGRPIKSICSRLKAKEGRIRGNLMGKRVDFSARTVITPDPNINIDELGVPWSIALNLTYPETVTPYNIERLKELVEYGPHPPPGKTGAKYIIREDGQRLDLRYVKKSSDQHLELGYKVERHLNDGDFVLFNRQPSLHKMSIMGHRIKIMPYSTFRLNLSVTSPYNADFDGDEMNMHVPQSFETRAEVLELMMVPKCIVSPQSNRPVMGIVQDTLLGCRKITKRDTLIEKDVFMNILMWWEDFDGKVPAPAILKPRPIWTGKQVFNLIIPKQINLIRFSGWHSEAETRFITPGDTMVRIEKGELLSGTLCKKTLGTSTGSLIHVIWEEVGPDAARKFLGHTQWLVNYWLLQNGFSIGIGDTIADAATMENINETISKAKNDVKKLIKQFRDNQLEAEAGRTTMESFENRVNEVLNKARDVAGSSAEKSLSESNNLKAMATAGSKGTFINISQMTACVGQQNVEGKRIPFGFTNRTLPHFTKNDYGPESRGFVENSYLRGLTPQEFFFHAMGGREGLIDTAVKTSETGYIQRRLVKAMEDIMVKYDGTVRNSLGDVIQFLYGEDGMDAIWIESQKLDSLKMKKAEFDNVFRYELDDENWKPNYLSTQHAEDLKTISEIRNVFEAEVQKLEADRFQLGTEIATTGDNTWPMPVNLKRLIWNAQKTFKIDLRRPSDMHPMEIVDAIDKLQERLKVVPGDDDISIEAQKNATLFFNILLRSTFASKRVLKEYRLTKEAFEWVIGEIESRFLQSLVAPGEMIGCVAAQSIGEPATQMTLNTFHYAGVSAKNVTLGVPRLREIINVAKNIKTPSLSVHLKPEVNKKKELAKNVQCALEYTTLRSVTHATEIWYDPDPLGTIIEEDAEFVQSYYEMPDEDIDPDKISPWLLRIELNREMMVDKKLSMADIAEKINHEFDDDLSCIFNDDNADKLILRVRITNDEAQKGEIQDEYGEDDVFLKKIESNMLTEMALRGIPGINKVFIKEGNVNKFEDNDGFKTEKGWMLDTEGVNLLAVMCHEDVDATRTTSNHLIEVIEVLGIEAVRRALLDELRVVISFDGSYVNYRHLAVLCDTMTYRGHLMAITRHGINRNDTGPLMRCSFEETVDILLDAAVYAESDPLRGVSENIMLGQLAPIGTGGCDLYLNDQMLKQAIELQLPSYVEGLDFGMMTSACSPISGTPYHQGMMSPSYLLSPDIRASPTAADAQFSPYVGGMAFSPVSSPGNYTPSSGGGYSPSPPVCTPGPGSFTSSSPYNPVSPFYSPASPLSCPLTSPSYVPTSLPHSPTSPIYSATSPIYSPSSPIYSPTSLSYSPTSPVYSPTSPVYNPTSSAYSPTSPSYNPTSPSYSYSPTSPSYSPTSPSYSYSPTSPSYSPTSPSYNYSPTSPSYSPTSPSYSPTSPSYSPTSPSYSPTSPSYSPTSSAYSPTSPAYSPTSPGYSPTSPSYSPSSPSYNPSSVKYTPSHAYSPSSPNYYSSTSPTYSPTSPSYSQPSPSYSPTSRVEEEAHEEAEEEEPKR

SEQ ID NO: 113050 - protein, 224 aa, Oryza sativa
  unsure (1)..(224): unsure at all Xaa locations
  Clone ID: PAT_MRT4530_16876C.1.pep
VVACGNGMPLPEFCGYLKAKERSSRGNLMGKRVDFSARTVITPDSNIIXELVVPWSIALNLTYPETVTPYNFQGFLMITYPPPPPPPGKTGAKYIIWGDAQRLDLCYVKKRTDQYLELGYNVERHLDDGDFVLFNRQPSLHKMYIMGHRIKIMPYSTFHLNLSATSPYNADFDGDEMNMHVPQSFDERCIQTKVSLVPLSALSPPSSTPIPGLVEEEVLGDAEC

SEQ ID NO: 113051 - protein, 45 aa, Oryza sativa
  Clone ID: PAT_MRT4530_16877C.1.pep
GQLQELGYTTETSKWMQFIYCIGCESVQISINGGKSFNLQLNIDK

SEQ ID NO: 113052 - protein, 247 aa, Oryza sativa
  Clone ID: PAT_MRT4530_16878C.1.pep
MALQLAAHSRKSTVSVLIMPLLMLLLAAMAASAASSYQPDDQMSDFGMCFFASSCYDTSVLLPKGRSRQIPFPIYSFVTRREHSTYPRTSRRTRCLKPFKVPEYCSHNTPRKHGKARSMDHGANSCVSIGKAALSMCVDATAHTGVSNGKEPLVTILLTSAAANTTTFRNQPIDDKYKFSVSETEKKYEDWFKMMENDVLCDQFTPYLEFFISAIEPAAIVINVWVSKSPTADRSIYRLIVVISTSC

SEQ ID NO: 113053 - protein, 116 aa, Oryza sativa
  unsure (1)..(116): unsure at all Xaa locations
  Clone ID: PAT_MRT4530_16879C.1.pep
MAGAKTIALVVAVAAAVXETXSXAXIXGYXTSSXXPCLSCVMGRXSXXSSSCXXGVXTSTAXXSSSAKXXXACXXINXXGSXXXNLXMGXAASXPSXCGISVXFPISTSVXXSKXX

SEQ ID NO: 113054 - protein, 64 aa, Oryza sativa
  unsure (1)..(64): unsure at all Xaa locations
  Clone ID: PAT_MRT4530_1687C.1.pep
LDPSTLDEEEIEEDVDQXAAELSDEGDKTPSASPKQTPPTLVSLQPPPPPPSPHVQQMSSDRTP

SEQ ID NO: 113055 - protein, 132 aa, Oryza sativa
  Clone ID: PAT_MRT4530_16880C.1.pep
NQTFIKSSHHRISKLDKKNTPINYSGELPPLLLLTGKVSSLAAIEQATSEPGGTRLPQAATRRRKRRGKNKASNGKDLSTHGKRRGCYCHRTRRREGRGEASPRRGKVDAASSRSPCHLGEALLKGGAAEGR

SEQ ID NO: 113056 - protein, 124 aa, Oryza sativa
  Clone ID: PAT_MRT4530_16881C.1.pep
MAAATTTNKLQTMRWSYLDEDDDYGDGGDLSTLLPPRVVIRPDENRIRRVPLQRGWESGEAPPRTTTTPASQGPTGCSSSQTWPRISPWHHHSSTYPRRLSPARRCMERSVDGSRLLGRVEADG

SEQ ID NO: 113057 - protein, 157 aa, Oryza sativa
  Clone ID: PAT_MRT4530_16882C.1.pep
RRRRRQLPQQWHGAEEDEEEEEKKKERELLFQSRSSSRNHGPANRADRHVSVSPTPMHASAPRSLRSQRHTSHFQLNPLQMQRATPLELKSEPIYLSIHPSTNRFIDSRGLSHNPRGACGQAREKRERSEAPCHSENETSEMHKRQVHQKKDHPWMD

SEQ ID NO: 113058 - protein, 197 aa, Oryza sativa
  Clone ID: PAT_MRT4530_16883C.1.pep
WERGEKKGRKGLLIIKLSDLYILHLIGHLLDATSHSSGGGAAARTRDLRYRPAAGGEREGGRGEATPRLRAVLPADEHGDAAAHDVEARPLLLHQPRAPARERRRRRGRPAASAAAHAAPADHLVPGAGRPLEERVAARAAAAGDAPAAIVPALLRELPLVVHVELHGFGSPREGGDAVETEREGEPRADSSARGSL

SEQ ID NO: 113059 - protein, 80 aa, Oryza sativa
  Clone ID: PAT_MRT4530_16884C.1.pep
QTAYIDGGDDTDYSWRAKGFHEQAKDCGIPAITTAGIYPGVSNGLTSHFYQTYQFTLIFFKLHCPDIIMCSFTISISTHG

SEQ ID NO: 113060 - protein, 58 aa, Oryza sativa
  Clone ID: PAT_MRT4530_16885C.1.pep
GGEKGIEGEKPPQGGIYPGGVEFNQDNIFIITTYYFTNRLFAPNIWYKNMLQEPKILT

SEQ ID NO: 113061 - protein, 68 aa, Oryza sativa
  Clone ID: PAT_MRT4530_16886C.1.pep
CFGPKINIHDSPRNCSSWAEERCLDGSFLELQSRVDPNYQKEISPGVVKGYSALLVASWRPSPARKNR

SEQ ID NO: 113062 - protein, 71 aa, Oryza sativa
  Clone ID: PAT_MRT4530_16887C.1.pep
MALGRISVRGLQSSAHSHRSLTSAHLLASSPLGTQPPTLKPRHRLPPRPHRLILLAIPFLAVGFFLPRSQL

SEQ ID NO: 113063 - protein, 217 aa, Oryza sativa
  Clone ID: PAT_MRT4530_16888C.1.pep
HLTKFKCGGFVLGLAINHCMFDGVGAIQFVNSCEGCAALRRSLSRTTSSRRSTAAITAARRRRTAPSRSCTGRSGSRPSPLPASRRSSRSTAAAAGARPRRSRRWAWGTRGRASSSSPWAGARGSLRLLRQGDAGPSSTSVGAALRVRARWGPVGTAAAALPLSLVAAAAWPVSDCGTSSPASPRRPPQSPPAGRPSERRKVRERERKGEERERGDD

SEQ ID NO: 113064 - protein, 97 aa, Oryza sativa
  Clone ID: PAT_MRT4530_16889C.1.pep
PPALDTYIVSLFINYTYLTYVFILLFHITYMTQILTNLSMDDDHPLRSYIWFHSVHKPVKIMNHILISAAIDQTPHSDYLRLLKCNTGSTSGIQKKE

SEQ ID NO: 113065 - protein, 601 aa, Oryza sativa
  Clone ID: PAT_MRT4530_1688C.1.pep
MVLLGMADTEPTESYSDFKIGKVDTTLFTKIIGDDFFVCQIYVDDIIFGSTNEVFCKEFGDMMSREFEMSMIGELSFFLGLQIKQLKDGMFVSQTKYIKDLLKRFGLEDAKPIKTPMATNGHLDLNEGVMPPRTRHGRRPPTPDPVSEESSGDEYTQSDEEVEENVRGQFLRPRDTPDPRFHTAFQKSVYEQVYAGKAFAEHKWISWRDINETPEFEGLQDLFKTVGIDRIVTLKQDYNEDLIRQFYATVWVAGDYSEMKWMSNTLQCSISKRQFRWLLNIRLDFGDDLHEEHTHNPLSIDYLSQFYEDGVRYTHGKVAGLRTIPSVVNRIGRQFDIVSLMMQEIAISKGTFTQGIYYTPYIMRLIQDKLGAAGPNLKKHKQYKPCLQLEAPRAPRAVPSSHPGASSSSIPPPPPGYDPNIFFHSQYAYFGMQPNEYFNLVLGAINTLSENIQRLSTGHEALHEDVRGLRTDVGDLNASVGRLHTCHARKFTSNFRTYLCIKSSSRNQPRKENSSGFNGLAMASAPLPQAAQLGYKPNVFSFWILYLQLRFDDYCKNEHMTYSTSHTANMQVHKDTKGWHNIGSFAKAAFSKTFKRSKTVE

SEQ ID NO: 113066 - protein, 45 aa, Oryza sativa
  Clone ID: PAT_MRT4530_16890C.1.pep
YAIVNYVSTLKKRISNVTCYLAVFNDTSTVQQSLMHYKMISAQGK

SEQ ID NO: 113067 - protein, 240 aa, Oryza sativa
  Clone ID: PAT_MRT4530_16891C.1.pep
MQATFKCPMITEMPESPPLHQSKRTIIIPTATATQVQGDTSKDERGFKAKPKKEKSTAISELVASVPKLRATLLLLLPAGVAHTTACEASTESSRAANLPKPKASTTTARDQNKPYGHRIREQSNHARGNWTESIGQTALASSKQLTHQRELGLTESQQVPTAVGSEGRAPAVFGFGGAQLPAAAASGGFGGGGGVETATRRERERNGGRRRGRVGQKEEREARRGKQPRGKERALESKG

SEQ ID NO: 113068 - protein, 266 aa, Oryza sativa
  Clone ID: PAT_MRT4530_16892C.1.pep
MELQFQKPTQGQSQQQQCHYQVPTVTVAKNKAKTKCSSSKFVGVRQRPSGRWVAEIKDTTQKIRMWLGTFETAEEAARAYDEAACLLRGSNTRTNFATQAAPDSPLASRIRTILTHKKLKKSMPQPTITFSTAVYHHARSTVPAAATSTSTSGVSPSRSNSSSLNFATNLSNFAMSGGEELQLASSQQQYDQSWALNTSLLPIGDGCDMSGSNACPVASDQDKMKAEKQGSHGMNGIQEQETFDMGNDLCDSLWDLPPICQLSCKY

SEQ ID NO: 113069 - protein, 299 aa, Oryza sativa
  Clone ID: PAT_MRT4530_16893C.1.pep
MGSLALAYHDAREFRMETKRKAEHEVNLLRPPALLHWDGGDGEQPPPLDERRRIVQRWIEYEKRKGPRRFEYLPGEDGANDARPNVRIALYYYNCNHPGAEFDCVRSLSAHFASFRGEIWSHVNFLARRRGCIDAPVLRFFAELFYYGPLVETPVVVSCIVLREEPLFVVRRIEGLQEPVHHTTKRELSITEEPGRTETVQEAPLVQYRSSCAFCSDRHYEVLHPSEEEFVCGKEGQEVEPSGWFYWMMDIGGRLPDRILVRPRCFLDDVSDFCSFVFYVFFIWLARLASAIKIWSEKE

SEQ ID NO: 113070 - protein, 53 aa, Oryza sativa
  Clone ID: PAT_MRT4530_16894C.1.pep
IISLRMLHISKEPWNTVIGKLFFSAVATPESVKNILCQVYIYLILSSWKIIKA

SEQ ID NO: 113071 - protein, 134 aa, Oryza sativa
  Clone ID: PAT_MRT4530_16895C.1.pep
MRPSPSPLGTREFRTATALRRDGPLLLRSALAEDARGRCRCSVSRRPARCSARCSSPRRRGSSSTAGLLGFSARETVLAPVPLRVEGRVIGCRHEWRGGAPTGGARAAGGVATGARHDHVTAGADDRAYFPSCP

SEQ ID NO: 113072 - protein, 249 aa, Oryza sativa
  Clone ID: PAT_MRT4530_16896C.1.pep
MDYSAMPSPSPSSSAAAAAAAASGCCLDRLWRACGGCGAAAASAAGWTVCALLTCVFAVVGSLVGVFIGAFMGMSTESGMLRGAGVGVVSGAVFSIEAVESCIEIWRSSESGKYSIIFVLDIISSLFSGRIVWEKVSPALQRAVQSQMSLLSTPFIDTNDLFETGNTGGMSRDLINRIPKTTFSAATNPDQETDNCCAVCLQDFGASQFVRVLPHCQHTFHARCIDNWLFRHASCPLCRAGVHIDHIHM

SEQ ID NO: 113073 - protein, 289 aa, Oryza sativa
  unsure (1)..(289): unsure at all Xaa locations
  Clone ID: PAT_MRT4530_16897C.1.pep
GVGAPVEGAPAGHADGAEGGXNGGAVDGRRWCWSSRRQSGDHVADGHVAGDGVGAPAEGAPADHADGAPGGKXATTSPAAASPVAASFSHRAGLLPCXRSHRRPPPPHSLGAQRQRRSYLDGIGGRRVSRRYPSRWYTGPVTVILDSTSGSELRYASIADYPLLHDNGPPPPASTPYLHSRAKDHASSSSSSTQADAVSTQRTECTLSTAIRTRASSTTPCLELTTGAHRYGGDKGKRKEDREIEEEGGRDSYWPPLQDEATKRQPVSGAKSSRFAGDGNGPHRVAWRT

SEQ ID NO: 113074 - protein, 71 aa, Oryza sativa
  Clone ID: PAT_MRT4530_16898C.1.pep
MAPYGDCVKLSMLWSQGVQLPGGYSEVRVLSDLSMTLNGINGFVKEGTVVGIYNAEPHSIHAIWKFDPINK

SEQ ID NO: 113075 - protein, 61 aa, Oryza sativa
  Clone ID: PAT_MRT4530_16899C.1.pep
PLRKVCGEILLAYVFLTQLYSYSQCLYSALTCLFICRIGKPTGPVRFFTASYPRVRPRDRL

SEQ ID NO: 113076 - protein, 710 aa, Oryza sativa
  Clone ID: PAT_MRT4530_1689C.1.pep
MAEPAKAHDLSPSMSGDDGEPNPRRRARTPPPPPRQSPRREKALERAEGSATSTSTGGGEGRRDGEHRLLVYGDGSTPQGALQAAGALLRHPPVAHDPESPAQRWLDDVAKLVMTARQRLDADGRSSATKASGAATTGSASSRRRARRAAAAVRHSAATPSSTPPTQEDLCGEPDARISIERRRNGRRAPHATEGASSSGVSPHHGRGDQPSVPPVGGVGCRAFVASLRNVRWPPRFRPTIAEKYDGSVNPAEFLQVYTTGIEAAGGDDWVMANFFPMALKGQAQGWLMNLPPASVHSWEDLCQQFTMNFQGTYPRPGEEADLHAVQRRDDESLRSGGVRHNRMLEKIASKEPQTTAELFQLADRVARKEEAWTWNPSGSGVAASAAPGSAAQTGRRDRRRKKRSLVFNPALGGSGRLKSPNGAQNRAVPRGVIKSAYNKKEARRPRKKKEKKKLFKDWRVPGGSLRCTRVASLVATVGFPLLMRAICDRRDSARREREQGGEAPEPNGGPRPPTAGAGSPPACPTVPGAPDPQDGPEATAGRPRLSPSDPEVVGTEAECAPRGLSDGERPGDVAPDEEDRPRRKVQRPVYFVSEALRDAKTRYPHAQKMLYAILMASRKLRHYFQAHRVTVVTSYPLGRILYNREGTGRVVKWAIELSEFDLRFEPSHAIKSQALADFVVEWTPAPELVSVPEASSSPSLLPHTALWVM

SEQ ID NO: 113077 - protein, 124 aa, Oryza sativa
  unsure (1)..(124): unsure at all Xaa locations
  Clone ID: PAT_MRT4530_168C.1.pep
GGPLGKVFLPVLPGGGLFPXGLGVYPKAFRGPKGCAFKSARPPMLGLLGFFVPAFVPGKGPPQNVAAPLADPGSTKVWGVAPHFVPGKCMWGPGTYRGLLGVGRIWGPRVCCFWVGQNGVGAPR

SEQ ID NO: 113078 - protein, 65 aa, Oryza sativa
  Clone ID: PAT_MRT4530_16900C.1.pep
CKMIIHLMIGCDGSFPGADSSSVWPSMERYFRLHFVCVFSGQKFIMYYTRMPVGSAMVINNLLKV

SEQ ID NO: 113079 - protein, 44 aa, Oryza sativa
  Clone ID: PAT_MRT4530_16901C.1.pep
TKSHFQPCGCGIITHLPYSIPSLTSALNHWYTHHEQFQYTLKPV

SEQ ID NO: 113080 - protein, 1094 aa, Oryza sativa
  Clone ID: PAT_MRT4530_16902C.1.pep
MAGSLDGSTKAPDATITITKDDGKTTKKVANPALPLWRAQEQQVLSYLLSSLSREVLTQVATFTKATEVWEAIENLFASQSRARIINIRMALSSTKKGTRTIAEYVGKMKSLADDMSSARKPLDDEELVSYIFAGLDFDYNSVVSSIAGRADSITMSEAYALLVGFESRLELLQGSSSALANSVSRGGRGGGRGQGGNPGRGGFGRGRGDGKPRPTCQLCGKIGHTVIKCWKCFDHSFTGEEKNANVAASSSYSVDTNWYVDSSATDHITGEMEKLAVKDKYTSNEQVHTASGTGMDINYVGHSTIRTPKRDLFLKNILHVPSAYKSLISAHCFTRDNRAFIELHPYFFLVKDQVTRTPLLRGKCECGLYPLPTDKLSSASHKQAYGVVKPSLSRWHSRLGHPSLPIVDRVISKNNLPVTRDSSQESVCDACQRGKNHQLPYSKSFSVSSKPLQLIFSDVWGPAPSSVGNKVYYVSFLDDFTHASMPLKFWDEAFTTAVYLINRTPLKVINLPPDYSLVRTFGCACWPNLRPYNARKLAFCSQQCVFLGYSTLHKGFKCLDISAGRVYISRDVVFDESSFPFAKLHSNAGACLRSEVLLLPPHLLPPSSLLDPGGNIVHDQPMIDDPNHTNHTNQDTEHAAGQNTENNGENSDENDAGTAADDHVFVQSDDHGSMQGSGGHHTGADPDASMQAPSGGAESEDEQDTGSVGASPIVQPAVHSPVHAQDSSAHQSGSSVLSNEEISSTTQAPAPGRVTRSRHGTRKPKKYADGTISHQGMKRQDYHIISAPRAWYSLLSKKLQELGFTPSKADTSLFFFNKKGVTIFLLVYVDDIIVASSSTSAVTTLLKGLEKEFALKDLGDLHYFLGIEVKKLGGGLLLSQERPDISFSVNKVYQFLQNPTDIHWAAVKRILRYVQGTLGLGLRIDRSFSSIVSAFSDADWAGCLDDRRSIGGFAVFLGTNLVSWSARKQATVSRSSTEAEYKALANAIAEIMWVRKLLEELGIPHPRSSQLWCDNIGTTYLSVNPVFYARTMHIEVDYHFVREQVAQKQLEIRFVSSKDQVADGFTKPLPVRQLQLFCNNLNLGNLRLRGSVR

SEQ ID NO: 113081 - protein, 235 aa, Oryza sativa
  Clone ID: PAT_MRT4530_16903C.1.pep
MSGTSSDEPTLENLAHKLKGMENWYEELMRNSKSYKESTDKHLKTLSESLAAGEEGAGATAHRHQRYDDEDEEQSVADDEEEDESVGNKRQCRVRDKDDPLSKFEPSVYLDWKLAVEQKFSCYDFPDNKKVKAASSEFTSFASLWWNDICGRGLRPRTWDDMKRTMRSRFVPSYYARDMLNKLQLLRQGPNSVETYYQEMMFALSRCDLQETEDARISRFYGGLNREIRDILEYK

SEQ ID NO: 113082 - protein, 530 aa, Oryza sativa
  Clone ID: PAT_MRT4530_16904C.1.pep
MPPAPPFSSHGDFVAALHRCATLAHLKQLHAHAVVTGRAAAQTTTFHLLRFASLRLSCLPYARRLFDATPSPNVFLYSAMLSAYAAASSHSQEHARDSLALFLRMLRRGRPAPNQFVYPLVLRAACAIGVQLVRSIHCHACKDGFYGHDFIRTSLLDGYSRYGMMGDARKLFDGLTDRNVVSWTALVSGYARAGKVGDAIVLFERMPQRDVPAWNAIIAGCTQNGLFVEAVGIFRRMVDEGFRPNGTTVSCLLSACGHLGMLKIGKVIHGYAWRSCVGFGSSVVNGLIDMYGKCGNLMEAKWIFDAFSDRGLTTWNSLINCLALHGCSESAIAVFNSMRNEGVQPDEVTFVGLLNACTHGGFVDEGLRYFELMCDEHGIEPEIEHYGCVVDLLCRAGRFQDAMNFINDMKVQPDEVIWGSLLNACRIHRHLELAEHAIRNLLDLNPSNANYVVMLANLYSEGGFWEEVRKVRKLMKEDVTGKKLPGCSWIEVDRKTRRFYSGDDGHPESEDIYDTLDKLATTMEMQATFA

SEQ ID NO: 113083 - protein, 48 aa, Oryza sativa
  Clone ID: PAT_MRT4530_16905C.1.pep
CPADKKSWMLLKLKTRGTQFIHFSKWGCSGYTVIDLFNCLITGVVIKG

SEQ ID NO: 113084 - protein, 430 aa, Oryza sativa
  unsure (1)..(430): unsure at all Xaa locations
  Clone ID: PAT_MRT4530_16906C.1.pep
MENWYEELMRNSKLYKESTDKHLKTLSESLVKVVDQIEQMTRSHKQLTENIQNMNIGHENIVRRIGLLEAAGEEGVGATAHRHQRYDDEDEEKSVADVEEEDESVGNRRRRRVRDKDDPLSKVKFTMPSFDDWELAVERKFSCYDFPDNKKVKAASSEFTSFASLWWNDICGRGLRPRTWDDMKRTMRSRFVPSYYTRDMLNKLQLLRQGPNSVETYYQEMMIALSRCDLQETEDARISRFYGGAMALDIARDCPNRRALFVNADGEYTSASDCDDEYALAATDHAGGQDNDDIEEVHLHPESLDQYPSLIVKLALSAKEKCEEQKQRHNLFQSKVLVKGHTVKMIIDCGSCNNLASEEMVKKXLGLTTHPHPHPYHIQWNMRMFFTMRYLQGWPLDERVHTMKITGFSRGRLQFKKGSMMRTSICRIRS

SEQ ID NO: 113085 - protein, 179 aa, Oryza sativa
  Clone ID: PAT_MRT4530_16907C.1.pep
MAAMAAAAKLTAAASSLLLRRSPLLRPHGLRLSRRFAPQRFVRHIASSTNEEAAAKAAAATADTGGPTIFDKIIAKEIPSNVVYEDEKVLAFRDINPQAPVHVLVIPKIRDGLTGLDKAEPRHVEILGYLLYAAKIVAEKEGIAEGYRVVINNGPKGCQSVYHLHLHVLGGRQMKWPAG

SEQ ID NO: 113086 - protein, 75 aa, Oryza sativa
  Clone ID: PAT_MRT4530_16908C.1.pep
LLEAAGEEGVGATAHRHQRYDDEDEEKSVADVEEEDESVGNRRRRRVRDKDDRSNDNSKSKSSSASGDSTDFKRT

SEQ ID NO: 113087 - protein, 138 aa, Oryza sativa
  unsure (1)..(138): unsure at all Xaa locations
  Clone ID: PAT_MRT4530_16909C.1.pep
FFFFFFWMESGPCMSHWTFSLLIASQCPTSLITSRSLCIQHSTSHRHPSHHTVHHTPAHAHPQAHAPFSTLVQHTAHHQLHALXWVTHPTHSIVVIRSTPHSIPTPXGGQSPILPQHIFPFSTSIXYPNIGGSKSRVH

SEQ ID NO: 113088 - protein, 1717 aa, Oryza sativa
  Clone ID: PAT_MRT4530_1690C.1.pep
MSNEVNHVGKAPMFNGTNYSTWKIKMSTHLKAMSFHIWSIVDVGFAITGTPLTEIDHRNLQLNAQAMNALFNSLSQEEFDRVSNLETAYEIWNKLAEIHEGTSEYKDAKLHFLKIQYETFSMLPHESVNDMYGRLNVIVNDLKGLGANYTDLEVAQKMLRALPEKYETFVTMLINSDMSRMTPASLLGKINTNDMYKLKKKEIEEASPSKKCIALQAEVEDQSKSKVNEVNEDLEEEMVLLARRFNDLLGRRKERGRGSNSNRRKNRRPNKTLSNLRCFECGEKGHFASKCPSKDDDGDKSSKKKSGGYKLMKKLKKEGKKIEAFIGEWDSNEESSASSGSEEEGGDDASSKKKKMAVVAIKEAPSLFAPLCLMAKGSSKVTSLSDSESDDDCDDVSYDELVSMFEELHTYSEKEIVKFKALKKDHASLEVLYEELKTTHERLTISHEKLKEAHDNLLSTTQHGAHIDVDISCDLLDDSATCHIAHVASSSISTSCDNLMDMPSPCSSSSSCVSICDASLVVENNELKEQVSKLNKSLERCFKGKNTLDKILSEQRCILNKEGLGFIPKKGKKPSHHATRFVKRNGKYCSKCREVGHLVSDCPGSKPPKTCMFDSHYMLKKAHDGSIVARYVGSPILGGKKNAIWVPKALVSNLQGPKLVWVNYRTGGSHWVLDSGCTQHMTGDRAMFTTFEVGGNEQEKVTFGDNSKVKIILAILGVFFLHDKSIVAELFKKFAKRAQNEFSCTLVKIRSDNGSEFKNTNIEDYCDDLGIKHELSATYSPQQNGVVERKNRTLIEMARTMLDEYGVSDSFWAEAINTACHAINRLYLHRLLKKTSYELIVGRKPNVAYFRVFGCKCYIYHKGVRLTKFESRCDKGFLLGYASNSKAYRVYNKNKGDEGLMRAMKNMYIGDVKPIEVEDKPSTSTQDEPSTSASSSQAQVEVEDEKAQDPPMPPRIHTALSKDHPIDQVLGDISKGVQTRSRVASICEHYSFVSCLEPKHVDETLCDPDWMNAMHEELNNFARNKVWTLIERPRDHNVIGTKWIFRNKQDENGLVVRNKTRLVAQGFTQVEGLDFGEIFAPMARLEAIRILFAFASCFDIKLFQMDVKSAFLNGEIAELVFVEQPPGFEDPKNPNHVYKLSKALYGLKQAPRAWYERLKDFLLSKDFKIGKVDTTLFTKIIGDDFFVCQIYVDDIIFSSTNEVFCKEFGDMMSREFEMSMIGELSFFLGLQIKQLKDGTFVSQTKYIKDLLKRFGLEDAKPIKTPMATNGHLDLDEGGKLVDLKLYRFMIGSLLYLTASRPDIMFSICMCARFQAAPKECHLVAVKRIYPKGAKFQLVGYSDSDYTGCKVDRKSTSGSCQMLAMPPRTRHGRRAPTPDPVSENEESSGDEYVQSDEDNMENVEGDEMEVSDDGDDNESGNGEDDEASDDGSPLDSSIQFVLNLRNAQQYTIFRHHDQFRRPNDCNDPRFHTRFQKSVYVQVYANKAFAKHKWISWRHIGETPEFENLQEMFRTVGIDRIVTMKQPFDEDLIRQFYATVWVSGDCDAMKWMLGTLRCSINRREFKELLHIRFNNGDDLHDEHTHNPFPIDHFSQFYEEGGRHTYGKVAGLRALPSVINHIVRATILPRCGNNDDIRRVAWHVIDAIMDGRRFDVINLMMKEIAISKGTIGQGIYYALYIMRLPPPRRLVEELPGDLSEKIVEEARCRLCYHWQALDGD

SEQ ID NO: 113089 - protein, 204 aa, Oryza sativa
  Clone ID: PAT_MRT4530_16910C.1.pep
GHGIGHIACDCPNRRALFVNADAATDHAGGQDNDDIEEVHLHPESLDQYPSLIVKLALSAKEKCKEQNQRHNLFQSKVLVKGHTVKMIIDSESCNNLASEEMVKKLGLTTHPHPHPYHIQWFNTCGRPWQYDREVVFDGRTNTYKFMFDGKRVVLHFMTPAAALKDDLARLECEKKAKSENQIIAKHPASTSKIEPSTTKNLVL

SEQ ID NO: 113090 - protein, 104 aa, Oryza sativa
  Clone ID: PAT_MRT4530_16911C.1.pep
GGSLLDKVACCLRFLFRQASRMAPPLPPLSSSSPASPLPTHPSWCSKGLTGPAAFLLVYEVTTTSGLFCRALVHCPWSRQGANRRPDHKRVGGKKRKKNTIVDL

SEQ ID NO: 113091 - protein, 815 aa, Oryza sativa
  unsure (1)..(815): unsure at all Xaa locations
  Clone ID: PAT_MRT4530_16912C.1.pep
MSGTSSDEPTLENLAHKLKGMENWYEELMRNSKSYKESTDKHLKTLSENLVKVVDQIEQMNQSHKQLTENIQNMNIGHENIVRCIGLLETAGEEGAGATAHRHQRYDDEDEEQSVADDEEEDESVGNRRRHRVRDKDDPLSKVKFTMLSFDGKFEPSVYLDWELAVEQKFSCYDFTDNKKVKAAISELTSFASLWWNDICGRGLRPRTWDYMKRIMRSRFVSSYYACDMLNKLQLLRQGSSSVETYYQEMMIALSRCDMQETEDARISRFYGGLNREIWDILEYKEYNTMNRLFHFACKAEREVQGLNKHRSSFAGATSTRQLTPRQSTTAFRPPTSTPSHAQETSKNASVQTPAKSATSVASTRRTREITCHRCHDIGHIARDCPNRRALFMNDDGEYTSASDCDDEYALAATDHAGGQDNDVIKEVHLHPESLDQYPSLIVKLALSAKEKCEEQNQHHNLFQSKVLVKGHTIKMIIDNGSCNNLASEEMVKKLGLTXHPHPHPYHIQWXYHDQIECDVVHMQACSVILGRPWQYDREVVFDGRTKTYKFMFNGKRVVLHSMTPAAALKDDLARLECEKKAKSENQIITKNLVSPSTTEPSATKNEIKLTGALLASKYNICALYEPDSCCYALFCKDPILTLATASSSLYSLPPAITNLLHGYEGVFHDEIHPRMTPERESEHDHEDEIESRTTPIQEGEDDEDINSSDTLITSHVQMIISSPSPVRPPETTLTSNGSSAFMPTPIWVILDFMENLSANFQTHPVSCPNSSRVNGNRQNKTALLLKLNLGLGPCNRLGPSRKCLPSPPRISTYP

SEQ ID NO: 113092 - protein, 169 aa, Oryza sativa
  Clone ID: PAT_MRT4530_16913C.1.pep
MEGPSTARDIVCGVAIARRPGLVLVGSHAANVALDQSESYPLTRRSGHENEEQFVADDEEEDKSVGNRRRCRVRAKDDLLSKVKFTMPSFDAAIDHAGGQDNDNIEEVHLHPESLDQYPSLIVKLALSAKEKCEEQNQHHNLFQSKVLVKGHTVKVIIDSGSCNNLASE

SEQ ID NO: 113093 - protein, 767 aa, Oryza sativa
  Clone ID: PAT_MRT4530_16914C.1.pep
MSGTSSDEPTLENLAHKLKGMENWYEELMRNSKSYKESTDKHLKTLSESLVKVVDQIEQMNRSHKQLTENIQNINIGHENIVRRIGLLEAVGEEGVGATAHRHQRYDDEDEEQSVADDEEEDESVGNRRRCRIRDKDDPLSKVKFTMPSFDGKFEPSVYLDWELAVEQKFSCYDFPDNKKVKAASSEFTSFASLWWNDICGRGLRPRTWDDMKRTMRSRFVPSYYARDMLNKLQLLRQGSNSVETYYQEMMIALSRCNLQETEDARISRFYGGLNREIRDILEYKEYNTMNRLFHFACKAEREVQGRNKHRSSLAGATSTRQSTPRQSTTVVRPPTSTPSHAQETSKNASVQTPAKSATSVDSTGRTRDITCHRCHGIGHIARDCPNRRALFVNADGEYTSASDCDDEYALAATDHAGGQDDEDIEEVHLHPESLDQYPSLIVKLALSAKEKCEEQNQRHNLFQSKVLVKGHTVKMIIDSGSCNNLASEEMVKKLGLTTHPHPHPYHIQWFHTCGKMKVTRLVKIPFSIGSYHDQIECDVVHMQACSVILGRPWQYDREVVFDGRTNTYKFMFDGKRVVLHSMTPAAALKDDLARLECEKKAKSENQIIAKHPASTSKIEPSTTKNEIKLKGALLASKYNICALDEPDSCCYALFCKDPILTLATAPSTLYSLPPAITNLLQEYEDVFHDEIPPRMANGRESAHNQEDGIESRTTPIQEGEDDEDITSSDMLITSHAPMIIPSPSPARPPETALTSNGPSAFMPTPI

SEQ ID NO: 113094 - protein, 221 aa, Oryza sativa
  Clone ID: PAT_MRT4530_16915C.1.pep
MSEVFEGYERQYCEVSASLFRKCTTASALDGEKKKQKLSEIQSGVEEAESLIRKMDLEARSLQPSVKAGLLAKLREYKSDLNNLKSELKRISAPNARQATREELLESGLADTLAASTDQRGRLMMTTERLNQSNDKIKESRRTILETEELGVSILQDLHQQRQSLLHAHTTLHGVDDNVGKSKKILAAMSKRMDRNKWIIGGIIAALVLAILLILYFKLAY

SEQ ID NO: 113095 - protein, 334 aa, Oryza sativa
  unsure (1)..(334): unsure at all Xaa locations
  Clone ID: PAT_MRT4530_16916C.1.pep
GAGATAHRHQRYDDENEEQFVADDEEEDKSVGNRRRCRVRAKDDLLSKVKFTMPSFDGKFDQEMMIALSRCDLQETEDARISRFYGGLNREIRDIIEYKEYNTMNRLFHFACKAKREVQGCNKHRSSFTGATSTRQSTPRQSTTAIHPPTSTPSHVQETSKNASVRTLAKSATSVASTGCTRDITCHRXHGIGYIARDCPNRRALFVNGDGEYTSASDCDDEYALAAIDHAGGQDNDNIEEVHLHPESLDQYPSLIVKLALSAKEKCEEQNQHHNLFQSKVLVKGHTVKVIIDSGSCNNLASEXMVKKLGLTTHPHPHPYHIQWFNTYGKMKVT

SEQ ID NO: 113096 - protein, 725 aa, Oryza sativa
  Clone ID: PAT_MRT4530_16917C.1.pep
MSGTSSDEPTLENLAHKLKGMENWYEELMRNSKSYKESTDKHLKTLSESLVKVVDQIEKMNQSHKQLTENIQNMNIGHENIVRRIGLLEAAGEEGAGATAHRHQRYDDEDEEQSVADDEEEDESVGNKRQCRVRDKDDPLSKFEPSVYLDWKLAVEQKFSCYDFPDNKKVKAASSEFTSFASLWWNDICGRGLRPRTWDDMKRTMRSRFVPSYYARDMLNKLQLLRQGPNSVETYYQEMMFALSRCDLQETEDARISRFYGGLNREIRDILEYKEYNTMNRLFHFACKAEREVQGRNKHRSSFAGATSTRQSTPRQSTTAVRPASSTPPTSTPSHAQETSKNASVQTPAKSETSVVSTGRTRDTTCHRSHGIGHIARDCPNRRALFVNADGEYTSASDCDDEYALATTNHAGGQDNDDIEKVHLHPESLDQYPSLIVKLALSAKEKCEEQNQRHNLFQSKVLVKGHTVKMIIDSGSCNNLASEEMVKKLGLTTHPHPHPYHIQWFNTCGKMKEYEDVFHDEIPPRMANGRESAHNQEDGIESRTTPIQEGEDDEDITSSDTLITSHAPMIIPSPSPVQPPEIALTSNGPSTFMPTPIWCSLVCIAGMINRASRLWERPCAHAYRINARRGSGVGWIYTGWGEPTGSATAGFRTQRPLTISPPDPMVADRSRAHCSRYHLPLEEVERRGGENRKWKIGVAERIRRGMGERIQRYFTEERVDAGLVG

SEQ ID NO: 113097 - protein, 699 aa, Oryza sativa
  unsure (1)..(699): unsure at all Xaa locations
  Clone ID: PAT_MRT4530_16918C.1.pep
MPLFDRLYRLESGQQEQHTFYPLSRSLRPNPSRSSDDGGDVVYGGRGDDNVYGGGGGGDGAGYDGCGGVFGCGSDGVYGGSGGIFGGGSDGVYGGSGGIFGGSGDGVYGVSGDDSFFPWRGRKRTARDGAQIKVSTLLFSIELKVYGFTTIDSDGRRRYTKGCVLKWDVEYGSLSLDLLMLSLSSXRAVMRTLELSMNLNWLTCLKCTXSEMHAELMVLVVESVLCDASANNIEPTSMPLCVLPLTQTGQGASASKVAVSGEPATQEADETLPNVFDMEEEYVGVDDEGIYIQPIHTIPPTDHAETSGQPSAENAEPCAENAEPGGPSRTTQPHGKVEVTDDDLAEFNVLHNPEMPVIKEEAVFPDMITFRKAIRHFAVVTGFELSNLQTDPTRFIAHCKHEGCKWRIHASRLSDGKTIQIKKLPFAHECPTTKLMEGKMATQDWIADRLKDWLKKNPDKGAKAAKEKLELNAATINLKVVKIARSDDDMAEITLVESDNNTRRHTVHLINQTCSCRKWQVSGKPCNHALAWICSNRGVEIKDFVSEYFSVGMFRAAYAGRVPTMPDRSQWPVVNLGFKVCPPRLKRGAGRPRVTRIRGALEPGARRVRCRRCHGFGHFAKTCKEAEAPEDTDEVPTASPKKRKKTQDESSSRPAKKKKTPKKKKTPKKKKTPQKKKDARAASEGPAKVVRSLSQYLQS

SEQ ID NO: 113098 - protein, 959 aa, Oryza sativa
  Clone ID: PAT_MRT4530_16919C.1.pep
MAAVFQNFLWLSVHARWCHSTGESDHRHKACGVRLKLCNEQHTFYPLSRSLRPNPSRSSDDGGDVIYGGRGDDNVYGGGGGGDGAGYDGCGGVFDGGGDGVYGGSGGVFGGGGDGVYGVSGDDSFFPWRGWKRTARDGAQIKVSTLLFSIELKVHGFTTIDSDGRRRYTKGCVLKWDVEYGSFSLDLLMLSLSSEVRWGEQQTATVWFLTRAVMRTLELSMNLNWLTCLKCTKSEMHAELMVLVVESVLCDASANNMEPTSMPLCVLRLTQTGQGASASKVAVSGEPATQEADETLPNVFDMEKYVGVDDEGIYIQPIHTIPPTDHAETSGQPSAENAKPCVENAEPGGPSGTAQPHGEVEVTDDDPAEFNVLHNLEMPVIKEEAVFPDMITFRKAIRHFAVVTGFELSNLQTDPTRFIAHCKHEGCKWRIHASRLSNGKTIQIKKLPFAHECPTTKLMEGKMATQDWIADRLKDWLKKNPNKGAKAAKEKLEERYEIKLKYSKAWAGRRLAENQIHGTYEDSFQLLFDWKAEIEKRSPGTIVTIDLQKLGKNMCFKRMFIAFKACVDGFVNGCRPYIGVDSTRLTGKYTGQLASATSVDGHNWLFYVAFAIFDSETDDNWLWFMKQLHGAIGAPEGLVISTDACKGLEKAVGAVFEKAEHRECMRHLYGNFMKKFRGPIFTLHLYPAARCFTEDGFRDHMQQIYNLFPEAIDYLDKHHSRIWYRSGFKETCKCDYLTNNASESFNNQIKSLKGLHLHELVDSPRELFMEKMYLRRQVGEKLTDGILPSVIKQLNAATTNLKVVKVARSDDDMAEITLVESDNNTRRHTVHLINQTCFKVCPPRLKRGAGRPRVTRIRGALEPGARRVRCRRCHGFGHFAKTCKEAEAPEDTDEVPTAFPKKRKKTQDESSSRPAKKKKTPKKKKTPKKKKTPQKKKDARAASEGPAKVVRSLSQYLQS

SEQ ID NO: 113099 - protein, 55 aa, Oryza sativa
  Clone ID: PAT_MRT4530_1691C.1.pep
MAKGVACGETCSPAALDAVLYWHYGEGRGLAKPVRQQPLTPCLIGTMAKGVACGE

SEQ ID NO: 113100 - protein, 119 aa, Oryza sativa
  Clone ID: PAT_MRT4530_16920C.1.pep
MEARAMLCTNSIRYCAQRPYTLHMLSRMTVYPGAATEAAPLLARLAPSLLFLIHSFAQTCNSGGSNNICQIISAAGQTSTPLLPNSSEPWLSCSAMTGNTTTHCGHSNSPRTQLSGGRL

SEQ ID NO: 113101 - protein, 885 aa, Oryza sativa
  unsure (1)..(885): unsure at all Xaa locations
  Clone ID: PAT_MRT4530_16921C.1.pep
MPCSTPDQRLLTTPNPSRSSDDGGDVIYGGRGNDNVYGGGGGGGDGAGYDGCGGIFGGGDDGVYGGSSGVFGGGGDGVYGVSGDDSFFPWRGRKRTARDGAQIKLKVHGFTTIDSDGRRRYTKGCVLKWDVEYGSFSLDLLMLSLSSEVRWGEQQTATVWFLXTRAVMRTLELSMNLNWLTCLKCTXSEMHAELMVLVVESVLCDASANNIEPTSMPLCVLPLTQTGQGASASKVAVSSEPATQEADETLPNVFDMEEEYVGVDDEGIYIQPIHTIPPTDHAETSGQPSAENAEPCAENAEPGGPSGTAQPHGEVEVTDDDPAEFNVLHNPEMPMIKEEAVFPDMITFRKAIRHFAVVTGFELSNLQTDPTRLIAHCKHEGCKWRIHASRLSDGKTIQIKKLPFAHECPTTKLMEGKMATQDWIADRLKDWLKKNPDKPYIGVDSTRLTGKYTGQLASATSVDGHNWLFYVAFAIFDSETDDNWLWFMKQLHGAIGAPERLVISTDACKGLEKAVGAAFEKAEHRECMRHLYGNFMKKFRGPIFTLHLYPAARCFTEDGFRDHMQQIYNFCPEAIDYLDKHHSRIWYRSGFKETCNCDYLTNNASESFNNQIKSLKGLHLHELVDSLRELFMEKMYLRRQVGEKLTDGILPSVIKQLNAATTNLKVVKVARSDDDMAEITLVESDNNTRRHTVHLINQTCSCRKWQVSGKPCNHALAWICSNRGVEIKDFVLEYFSVGMFRAAYAGRVPTMPDRSQWPVVNLGFKVCPPRLKRGAGRPRVTRIRGALEPGARRVRCRRCHGFGHFAKTCKEAEAPEDTDEVPTASPKKRKKTQDESSSRPAKKKKTPKKKKTPKKKKTPQKKKDARAASEGPAKVVRSLSQYLQS

SEQ ID NO: 113102 - protein, 58 aa, Oryza sativa
  unsure (1)..(58): unsure at all Xaa locations
  Clone ID: PAT_MRT4530_16922C.1.pep
LPIGAGGMDDDDLGYPPXMAGLDXMAGLGGLXGMGXLGGLGGMXGLGGLGGXXGXGGX

SEQ ID NO: 113103 - protein, 55 aa, Oryza sativa
  Clone ID: PAT_MRT4530_16923C.1.pep
PCDLCGRNIEALREDIPRTSPCVSHAVFVEGGIALAILTAISDGEDPRTSFLIGE

SEQ ID NO: 113104 - protein, 72 aa, Oryza sativa
  Clone ID: PAT_MRT4530_16924C.1.pep
SNSTTGAQNPPSPPPPPRPPPPPRPSRPNAPSSSPPPPPSPCSCGNAAPRTPRTRRDRAAWPRTPPRTPPQP

SEQ ID NO: 113105 - protein, 92 aa, Oryza sativa
  Clone ID: PAT_MRT4530_16925C.1.pep
MNAPPMCLPAASVLPCYVPLQPSPSFVPMLARRRTSPLPASVRRPACCRPKLPPNRSRRCLEHTPSRAPSPPLPPPTGSPSHRPRRRLHNAA

SEQ ID NO: 113106 - protein, 65 aa, Oryza sativa
  Clone ID: PAT_MRT4530_16926C.1.pep
IVFFSFPPPLPGPLDLPINSRPAPTSLPTFPKISLIKTLPKQQQNLSLNKIILLFKFHTNFQPNT

SEQ ID NO: 113107 - protein, 58 aa, Oryza sativa
  unsure (1)..(58): unsure at all Xaa locations
  Clone ID: PAT_MRT4530_16927C.1.pep
EQGYYGQGLSEEGFFGEQQQQPGITRVRLTRARQYPGQLPLICRVXPQQCSIFPPGQY

SEQ ID NO: 113108 - protein, 44 aa, Oryza sativa
  unsure (1)..(44): unsure at all Xaa locations
  Clone ID: PAT_MRT4530_16928C.1.pep
RPHXPLTPQIPNSSASFFQQDQRLRGGVKLRGGCGLIVRSVFSR

SEQ ID NO: 113109 - protein, 283 aa, Oryza sativa
  unsure (1)..(283): unsure at all Xaa locations
  Clone ID: PAT_MRT4530_16929C.1.pep
MAAARPNLDGAPSRRITGGPTRGAEASQTWCGGGESGAAAAGSGLPTGGSGASTPELAGASRSQAMVDSDWATDHGGRDPERKLSPSLCANNDYVFGRGNPPGGIVEYRAKPTQPLAGYHGSLIISLNPQPSPSSNLNQQGSKSARRRGGGGGGGGDGDEHRAGGGGADGDVREAAVAGGAAAAPAAAGXDRGVVLVARHRAVPGRRRRREEGYLLSFRAEDGVWRKEILMGERCQPLDFSGVIYYDAEGRRLEQPPPPRSPLRSPLPSSIKLAANAGGGGGY

SEQ ID NO: 113110 - protein, 672 aa, Oryza sativa
  Clone ID: PAT_MRT4530_1692C.1.pep
MSSSSSSSHHHLVAPPWSGTGSFACYHGEEGKRPHPDESAKIITSIKRLYDEAARRLPIDEITELVGCIFEGGHCLGLADPVGNIILNAIAHHASGRAAAAPHLALPREEGKSLWGILAARSYAGLVAFMLGATSTSPPTIDLPLAVRLVLHDRRRRCQRPRLLPDGGKIKAALRVAALKAAHPALDELARLMTAQFPAGSELLTAGDVMDIKNLLGHQWPQVNIDFLRRPYGLGGGQDGTVTLRTTIGEDGRVALITIAADASRIDSPQLGYISDLTFDCETMEAKLSRRLAGVTRAADDGDEAAGAALNYDLSPCEHILSLKMCLLDAIHGFYIRALAVLPAGDGWTTTRRRGRFIRSLLAAGHCYGPLDPASNIILNTVWYDAAAPPPPDDEADLPGDIFDTDAMLRVECRSLDGLVAAVRAAAAAAGKPISEHEAIEHLWSRQCDLTEILQNSSREKKRNPYAAAGEASDHPQSAMIGSFLVSLSGENLDCLRQWLKPARDFGSSGCVISDVDWEKLNTMIHGHQPIRGLKRKRSSSENPLNTQALSEISTERALFWSRSWYLQPFRQINFMLLFFFAGNFLLLNLFLYVSFLLKNCSTKSTIVVASNDPWSDAVVAEDNYRSAATAVADDPWSTAVTADNSWNAAVVAADNNSWSTVVASEDWWSAP

SEQ ID NO: 113111 - protein, 659 aa, Oryza sativa
  Clone ID: PAT_MRT4530_16930C.1.pep
MSVLGAEGAAMGFLPAAEHGFARSAAPSPLREEEEVLDDDPKLPPLRMPTSFAAFPGSSSGSDSDSFLSMSSTPSGLLCPFGVWSPRAPPSEASSSEMEFGTAREYDTTDLFFGENWLYDDHLFHTNSDGDEGNGEDKFIVGADSTAQWSETRELDDCGGRHQVHTKSKADAEACAEVYTCSSAPCSCCYGGRKNDDGLTRDSCSAVYGRYLIMDDQTEVLDECGADAFLFTRDGDAMLKSEQPIDSKGGDIELLDMSTVEKELQMLSPYLAEADALEKAELEHDFSGNGELDINVVTNEKTADDKELLKNSYSIHSLPEIGDPLDVYEMEDFGRTDTSVQNSTANKIAEDARTDIDLALSRFHEEYEVFELRIFHRKNRTGFEENKEFPIVMNSVVGGRYRITEYLGSAAFSKVVRAQDLWTGMDVCLKIIKNDKDFFDQSLDEIKLLKFVNKYDPDDEHHILRLYDFFYYQEHLFIVTELLRANLYEFQKYNQESGDEVYFSLRRIQAIARQCLEALVYLHHLNIVHCDLKPENILMKSYSRCEIKVIDLGSSCFLTDNLSLYVQSRSYRAPEVILGLPYDQKIDIWSLGCILAELYTGEVLFPNESVQIILARMIGTIGPIDMEMLALGQDTQKYFTEDYDLFHKNENLISSEALL

SEQ ID NO: 113112 - protein, 116 aa, Oryza sativa
  unsure (1)..(116): unsure at all Xaa locations
  Clone ID: PAT_MRT4530_16931C.1.pep
XGFFXXKXGVKXXGXGGGVLVXXXXGLGGXXGEIXXKKXRGXGGXXLXXGGGTXGXPSVGGKKITLKXGGXQLMGWGEKSKVFKLLQRPIRNQFLEIPNFRSCQLLSNCLSWNXRQ

SEQ ID NO: 113113 - protein, 101 aa, Oryza sativa
  unsure (1)..(101): unsure at all Xaa locations
  Clone ID: PAT_MRT4530_16932C.1.pep
MKLSMKRPTSNHTSRMVFPFPGAPELLSLLETXTPRGHEGXSSWSGYCQCEVIEKLCRDASHVLGRGSCVGQSRSTGKVYIHCSESVKEKPLSNLIHQLHK

SEQ ID NO: 113114 - protein, 458 aa, Oryza sativa
  Clone ID: PAT_MRT4530_16933C.1.pep
MGERARQWLLVAGAGAAVGALSTAAVMRILSRSKRREGYVRSLLESNGVASGGAGSSVGTRVVATSDLLDDEVVSEQLTRNIQFFGMESQKKVTGSFVVVIGLGGVGSHAASMLLRSGVGRLLLVDFDQVSLSSLNRHAVATRDDVGTPKALCLKKHFSMIYPECQIEAKVQLYDPSCEDEILSGQPDFVLDCIDNIDTKVALLAACVRRGLRVLSAMGAGARADPTRIRVADLRESSNDPLSRAVRYRLKKDHGIEGGIPVVFSLEKPKAKLLPFQASKEEETPSDYQIVPGFRVRIIPVLGTIPAIFGQVMASYVITQLAKLDFQTEPIVNMDLDHYRILHHRLLEHEELIYGSAEQVLVDAEEVMYIVKELWRGRSARDQNLKDTGRKMWRSVNELMLVRWDKSKPAGVSNLILLKFNEADAHESTTLDQIKEEEPEFYNMVSRVLKQAEAEFAL

SEQ ID NO: 113115 - protein, 126 aa, Oryza sativa
  Clone ID: PAT_MRT4530_16934C.1.pep
YGSATTAPTAAFTSAATSKCTAAILSTNAGISSASSNVSCTTSESFSSCSNRSSIIFTASASTSDATRCSTATFPDGAIVRPPMGAPMPGLHDSTVPPFAHGGSRALFEGGFNSSQKHSKSCAANP

SEQ ID NO: 113116 - protein, 1025 aa, Oryza sativa
  unsure (1)..(1025): unsure at all Xaa locations
  Clone ID: PAT_MRT4530_16935C.1.pep
MDLSPLFVTGFIIGWAVRLSHGLRSWICCVAHIIVDTSRAESISSSLLWQQHKPALMMAIWLQKLIPSSSSIFGGSDPFIYNLICNMQPLMESNKPLAETIGKVTVHCQYHKSGCQWHGNLSDCITHGTTCAYGNSPVVCNRCSTQIVHRQVQEHAQLCPGLQPQAQAQHTDSSMMQSSATGTQAAVQGPSAVASAVPMTPVTAAPTTVPSTTTARAGTDSAIAVASAGSTTVSTVAVAPSLPVAPTAASQGQALAPQTPTAEQYQQQLQYQQYYQQHYPGYNPYMQQYQQYASSSTAQXQPQHMVPFQPQNQPHLTQLQAPAAQSQSQQHXIAPHVQPHIPQHHQVMAQQQQPQLQHLPQQQHPNAQQQSYPQMQAYHQPLPMSHAQPQNPSVHAVTGHQSFSQPQPAHQMQQGAPLQRSLHVSQQQMPSAQHHALAHTPQGQQPTMMAQGIQQTPQHQHVGHHALRPEIYASIPPQAAPQGFPLNAPAPSQTGQQFMQQHPTHTSAGRSMNYVAPQEQFQNQSGGPVKGLQAGVMNQQPPMRMASDNVGATSELHGAGQSFGQGSSSLKKPTSESEKSENATNGTGNTEVSGKNGSAESALVNPISLDGSDGSDKGKGKGKVDFSAWESNSHDPDARGGKGTRSGISNDLVKGGSLQQAPQHPYGPDSMLPQHMRQPGHMPYMQGLPNQMRPPKHSFPENSRPPMQQPFEMAPRVPGPNQNQMQISQSIRPDGAIVRPPMGAPMPGLHDSTVPPFAPEYVGTKKNNSVGNGPHGGSRALFEGGFNSSQKHSKSCAANPGRNNVSHKDFEDNMKQFPVPTHLDGEEFGHRGIDGIPTLRNAGPFLQGMTGGPGGLHKDQLGSSNFPGSGHHDFDNSEFPRTRFHPGDAFVPRNLHGGGWGGGQLHGIEPSDYGYRGHMHADDPNIPIDYSRHGFPKESAHFGSGGHLRDGDVSWCRICNISCGTVENLNIHVETREHHQHAMDIVLKMKQDVAKGRKNSFRNSGGPKSFKKKVPGKGSFRGNRR

SEQ ID NO: 113117 - protein, 476 aa, Oryza sativa
  Clone ID: PAT_MRT4530_16936C.1.pep
MDFSGDVKPAIHRPSVAAARGGGNGGAIPLLRGWQAFRRSGAPARLLCFEGGAWADVAGEVVGLLRRAFMEGKAVCEAACGGRVFLFDFMRMVRIDEATAEEAALGWIDDRGACFFPAPEGGRKRKRERDEAGSEVKGEDRRRRQPAAEEEDGDEASSGVEERSGESRPEADEPDRKKARGTLWGKAVRLDEADKFYKVVEKLFVSRMAPVAAARGVAITAVHKVAQGPRARAFHLQGQLLAAARGVGDGSNAKFAWYGAPAADVAAAVEHGFGRTNGQFLGGRAHGDGVHLSPPQYPHASAMLTKPDENGEAHIVLCRVLMGRPEAVPASSPQFHPSSDEYDSAVDNLENPRWYVVWSTDMNTRILPEYVVSFRWPNLPQMEGSSGLGSKLKKPSPAATRDMFPMLLTEIQRFVPSPKLQTLQRTYNCFKLTQNNPFALMIMPRGQMKKDQFIRFLRSHIGDNVLTTVAKKLRGY

SEQ ID NO: 113118 - protein, 49 aa, Oryza sativa
  unsure (1)..(49): unsure at all Xaa locations
  Clone ID: PAT_MRT4530_16937C.1.pep
XLLPYLNXTTTVARXLLGKDPXNMKDEXETVXWXPGHSTXLSPLCXXCR

SEQ ID NO: 113119 - protein, 209 aa, Oryza sativa
  unsure (1)..(209): unsure at all Xaa locations
  Clone ID: PAT_MRT4530_16938C.1.pep
MPARQPCLGSYSSEDLVPGGVAGFPPRLVLRLLPLLLPRNKSTFPPSTYGRLLAMPPSSPCRSLSVLMLQHNPALGDIPSGFLLGRPASFSRARTAGELFPRARTAGELXPPREDGWQDPPRARTAGELLPRARPADEILPARALPARSSTRADGRRLGGVASRCPGALPPPLRARAGPLPARGVANRRARPPCAVVAALLIEGERRKI

SEQ ID NO: 113120 - protein, 51 aa, Oryza sativa
  unsure (1)..(51): unsure at all Xaa locations
  Clone ID: PAT_MRT4530_16939C.1.pep
WATAAAAAATPTGXGGAERWGPHGQVIYLSNRATIIIVRSISSLVLCGTTI

SEQ ID NO: 113121 - protein, 291 aa, Oryza sativa
  unsure (1)..(291): unsure at all Xaa locations
  Clone ID: PAT_MRT4530_1693C.1.pep
RSLHACRSTLEDPPPVARLTTIXVLLALAASHGLLVHQMDVKTAFLNGELEEKIYMDQPDGYVLEGQEGMVCRLLKSLYGLKQAPKQWHEKFDKTLTSVGFVVNETDKCVYYRYGGGEGVILCLYVDDILIFGTSLNVIEEVKDFLSKSFEMKDLGVADVIINIKLLRGDDGGITLVQSHYVDKVLSRFDYSDCKPAPTPYDPSVLLRKNRRIARDLLIYSQXIGSLMYLTSATRLDISFAMSKLSXFVSNPGDDHWHALERVMRYLKGTVSYGIHYGDPLESTCRHASFS

SEQ ID NO: 113122 - protein, 143 aa, Oryza sativa
  Clone ID: PAT_MRT4530_16940C.1.pep
MPPSSPCRSLSVLMLQHNPALGDIPSGFLLGRPASFSRARTAGELFPCARTAGELLLRADGRRAPPPREDGWQDPPRARTAGELLPRARPADEILLARCPGALPPPLRARAGPLPARGVANRRARPPCAVVAALLIEGERRKI

SEQ ID NO: 113123 - protein, 78 aa, Oryza sativa
  Clone ID: PAT_MRT4530_16941C.1.pep
TQCRANKVLTGVESATRLDENDARRQRHGQLAAADKPAVAFKSPPGRSSARVRAKEREWSATCQQNRAKTESILPRDL

SEQ ID NO: 113124 - protein, 299 aa, Oryza sativa
  Clone ID: PAT_MRT4530_16942C.1.pep
MAVESPFRADVLRGKAALVTGGGSGIGFEIAAQLARHGAHVAIMGRRREVLDKAVAALRSHGLRAVGFEGDVRKQEDAARVVAATVQHFGKLDILVNGAAGNFLASPEDLTPKGFRTVVDIDTVGTYTMCYEALKYLKKGGPGKGPSTGGVIINISATLHYTAAWYQIHVSAAKAGVDSITRSLALEWGTDYDIRVNGIAPGPIEGTPGMRKLAPEEMAKGSREIMPLFKLGEKWDIAMAALYLASDAGKYVNGTTVVVDGGLWLSRPRHIPKEEVKELSKVVEKKVRASGVGVPSSKL

SEQ ID NO: 113125 - protein, 155 aa, Oryza sativa
  Clone ID: PAT_MRT4530_16943C.1.pep
GCSILSVLHSLMPPPSSFPIVSVPPLILAVAGVRWVRRLFVAALYNFALYRADPLRCSPLSAHQSGSLLILFCSPRYSVSLPLPCLARPPARSYVSRASPSVRLYACMTNQGPRCPPPCVTRCASRPAPRLRPLLFTHFPTSSLSAPPCSSSRLL

SEQ ID NO: 113126 - protein, 132 aa, Oryza sativa
  Clone ID: PAT_MRT4530_16944C.1.pep
PRQGGSPFHGRPRRPSPLLTPEPTKLRAPSPSSPSPATEKTKVANAMEPRNATAHSDALERAPSATAASPSSRRPPWTKSGRAVAPSSSPRPPLRNPSRIPANAATSSSPLSPMFRPIQAAGLASMSTQEPS

SEQ ID NO: 113127 - protein, 82 aa, Oryza sativa
  Clone ID: PAT_MRT4530_16945C.1.pep
ATGPLGAPLHESSYARQPYRVLTHGMCFGLPVRIIVKHPGSAHGKLTKPPSSCSRALAPGNDVTVCFEHTGAWDPHVISIFL

SEQ ID NO: 113128 - protein, 172 aa, Oryza sativa
  unsure (1)..(172): unsure at all Xaa locations
  Clone ID: PAT_MRT4530_16946C.1.pep
SVLCCASLDCSLWLIYICISVWLWLMCCLCLVYVCGAILWCALSMLCYCDVLVXCSCVMLCYCYTXCAVLCYVMLALVWCCAESMCISSGXVVVMLYLSIWLSIXVVCLVYLLLCSYLXXVSSVCXLVCVIVCVXDYYVLVCWFVVCYVMLGYRLLCIYDAIFIGYISMGYI

SEQ ID NO: 113129 - protein, 214 aa, Oryza sativa
  Clone ID: PAT_MRT4530_16947C.1.pep
MNLRLHPKPEPPWLMLPAAGDSPQHLAVADFYSFSDGRRRSITLPSPAIQSRMWIGSAKGWLVTTDDKCGLHLLNPISGTQHSLPSITTTGYFDALPRTDGDEARFLFKVASFVETYWPEGHTRFVGWCSDIEISAEEIRSSRLLKAVPLWDPSSGEYFIMMMHCPRNRVVLARGRDAKWMPLQTRHMYEDVIVYRGQFYMVTLGLSQCELWGP

SEQ ID NO: 113130 - protein, 77 aa, Oryza sativa
  Clone ID: PAT_MRT4530_16948C.1.pep
LLFINENFYIIYIFFFLRERGVRSCYVPLHPLPLLPEHPDMVVFDVGDQPLHHRSPLRRTQPPHVHHLQLRRRCSSS

SEQ ID NO: 113131 - protein, 220 aa, Oryza sativa
  Clone ID: PAT_MRT4530_16949C.1.pep
MADVVQEDQINKMNARNIAMVFAPNMTQMSDPLTALMYAVQVMNFLKMLIQKTLKGRQESNLEDTSLPHKDPSDESGHHKPCLTLESLLEEESRRPSFVEEEPILNSPAHGTGYNPIEVNPVQGKTAASIAQTSEVQTIIEGSSSCSRPSLTDPPATADPVCAEAANSLQRKGSRSLNSRRTRKGKGQSGTSATSSAEKSKGTSIVSRINSKIERIEAWR

SEQ ID NO: 113132 - protein, 927 aa, Oryza sativa
  Clone ID: PAT_MRT4530_1694C.1.pep
MAVVAIKEAPSLFAPLCLMAKGSSKVTSLSDSESDDDCDDVSYDELVSMFEELYAYSEKEIVKFKALKKDHASLEVLYEELKTSHERLTISHEKLKEAQDNLISTTQHGALIDVGISCDLLGDSATCHIAHVASSSISTSCDDLVDMSSSSSTSCVSICDASLVVENNELKEQVAKLNKSLERCFKDKNTLDKILSEQRCILNKEGLGFIPKKGKKPSHCATRFVKSNGRLMMVALLLDMWVPLYSVVNYRTGGSHWVFDSGCTQHMTGDRAMFTTFEVGGNKQEKVTFGDNSKGKVYNKNKGIVEETADVQFDETNGSQEGHENLDDVGDEGLMRAMKNMSIGDVKPIEVEDKPSTSTQDKSSTSATPSQAQVEVEEEKAQDPPIPPRIHTALSKDHPIDQVLGDISKDEALCDLDWMNAMHEELNNFARNKVWTLVERPRDHNVIGTKWVFRNKQDENGEFDMSMIGELSFFLGLQIKQLQDGTFVSQTKYIKDLLKRFGLEDAKPIKTHMATNGHLDLDEGVMPPRTRHGRRAPTPDPVSEPEESSGEDYAQRDEEVEANVEGASEEESGDDDSGSGEYEDEESDDMHIDPSIQFVVNMRNPSQYTILRHHDQFLRPRDTPDPRFHTAFQKSVYEQVYAGKAFAEHKWISWRDINETLEFEGLQDLFRTVGIDRIMTLKQDYNEDLIRQFYATVRQFRRLLNIRLDFGDDLHEEHTHNPLSIDYLSQFYEDGARYTYGKVAGLRTIPSVVNKIVRATILPRLGNNDDIRGVAWHVIDAIIQGRQFDIVTLMLQEIAISKGTFTQGIYYAPYIMRLIQDKLGAARQNLKKHKQYKPRLQLGAPCAPRVAPSSHPGASSSSAPPPPHGYDPNAFFHPQYAYFGMQPNEYFNPSSLWAGSRLAHPLTKGACGGFVVERWSWARLNGE

SEQ ID NO: 113133 - protein, 153 aa, Oryza sativa
  Clone ID: PAT_MRT4530_16950C.1.pep
MQPVRRGRRQGHPGAQHPRPRRRPAERPPVGAPPPLHPAPPPQQQPEHRHYGRPVRALLGVRARRGDRRLRRPPHGRRRLRDRRRVAGGGGGDAERELRHRPSPLLRPSSRPRRRPRHQGGAPSEEACCCFAGRREGRGVVVRRRDAVWPPVL

SEQ ID NO: 113134 - protein, 735 aa, Oryza sativa
  Clone ID: PAT_MRT4530_16951C.1.pep
MAPPPLKYRHCSNVDGLVSVEALRIIVETKACFVAVALALAYFLTASRHRLWSSSHLIKGFLFAVTQPVTRFLVSMFAMLLSMPFRNDLYLLWGILLLAGYEGVYTISGYGVSARLSDLAVHEFTRCSNIVVLGLYVRYYSHASQFRYPLWALWALMVAKFLERIVLFKNGNRKYGDGNTSRVADYMKHEHELSNTDAEAGGFSMEDYKYLIVGDSKLETTIVDGMTYEPKLTPPIRQTQEADDTVVVVTVDKVWTCKGELLKTDNRGDKLKDICLSFALCKLLRRKFAGVNASENERSKAQKLVFDGLIPDPERTFRVVRAELGFARDMSFTKYPILFSYGFPVVSVVLFAATLGVSLWIISSAIHHYRIPRKSTPNLVNGKNVDLIITFVIVFMVTAMDICEFFMHLFSDWTKVMVVSEYVRKRYVRCCLLDRILWLVCHGKLAETIGSSLGQFDLLNGAKKGYIPERIVRLYHMVRSFILLTDDKDYRIKKGKSLRPVPESVEKALCETLLSNRKQLTQGLRLLTRSKLQAESEELLTYCQLAEIETIVVWHVATCKLEQQSPHEPVESYQVATALSKYCAYLVFYNPKLLPVGNTSVRHTCKTLVRHDSSCDRSCGGDDCMIRKGEALAAALLKGRELNKSSKEPGMWTELAEFWSELLISLAPFGSVGAHEKGLGDGGEFITHLWALLYHAGIDAKYSWSSASTASGESGGRADVYPFQNGMDTVSHAVN

SEQ ID NO: 113135 - protein, 619 aa, Oryza sativa
  Clone ID: PAT_MRT4530_16952C.1.pep
MSGGGCSVRAIWILTPHDAVAFSRRFAVVEKRWRVAWEAEGGARAEMMPLPADYEVAAAFAERRRREGTARGSGIRTSMSSAGSDSWVDDPITRHIISLHIDKEEGEGFMLWPVVLQKRGSYYILVLPLVDPQSFKAYESLLKRSDCGSSAKEKGNLSSILLNLPCITGALMVAHVIGDIITGDTAEPEVIVSTGPSVGGLLDSLTGSIGISARPKPIAAPVAAPTASISSPVGAPQSESLKGGMRPFDKDLLRNFILGAMPFGTPQDLNYANVTSVRTTGFSADPLPTDQKQPAWKPYLYKGRQRTLFSSLETLNAALYDRDDVQDFLSVSGQVTCRAELEGLPDVSLPLSGLKAARVEVSSFHHCVQASEPTNDKQTLIFQPPLGNFVLMHYQASCNMDPPVKGFYQLSMVSENEGAFLFKLRLMEGYKSPFLMEFCMVTMPFPRRRVASYDGNPSVGTVSMTEHSIEWRIVSSGRGLSGRSIEATFSGTVRFHPITIQRVNSSFRSVPSTAFVEDSDSEQDNTKNGANLDDYLMEKMNKDLQAVNLEEPLSWQAYNYAKVSFKIVGGTLSGLTIDPKSVTIYPSVKAPVEYSMQASSGDYILWNTLGKCPSAALPK

SEQ ID NO: 113136 - protein, 163 aa, Oryza sativa
  Clone ID: PAT_MRT4530_16953C.1.pep
RDELAAVAEPLLVGANAPKRREPTGRRKLAKILLSKRKRRTVYTLPDFSQNQTAFSLESETLYCVYVAIGQKRSTVAQLVQILSEANALEYSILVAATASDPAPLQFLAPYSGCAMGEYFRDNGMHALIIYDDLSKQATLLRLAPLVLRRINAGELPPKQLAQ

SEQ ID NO: 113137 - protein, 396 aa, Oryza sativa
  Clone ID: PAT_MRT4530_16954C.1.pep
MAKQSRSLEYNIHFLSWELISSHCNGIHSGSNGATAGTQVPALKQWDGLVSVEALGILVETRACFLALALALAFFLTASGHRLWSSSHLIKGFFFAVTQPVTRFLVSMFAMLLSMPSGNDLYLLWGILLLAGYEGVYTISGYGVSARLSDLAVHEFTRCSNIVVLGLYVLYYSNASQFRYPLWALWALMVAKFLERIVRFKIANKRYGDGNISRVAHYMKHEHKLSESSNDQQSSSESSTDTEAAGEHELSGSTSTDIEAGEQGFHMKNYNYLIVGDSKLDGEKNTTRGIYEPELKPVTHTVTVAKVWEYPGNLLGPDKKGRYKLKDVCLSFALCKLLRRKFAGVEATKIELRKARKLVFDGLITSDIDEERTFRVIRAELGFARDISFTKYPILL

SEQ ID NO: 113138 - protein, 95 aa, Oryza sativa
  unsure (1)..(95): unsure at all Xaa locations
  Clone ID: PAT_MRT4530_16955C.1.pep
RFLRKGXTGPFRAFVASLPNVRWPXKFRPNLTEKYDGGDDPVMANYFPMTLKGHARGWLMTQAPDSIHSWEDLCHSSLRTSRAHIPVPGKRRTYT

SEQ ID NO: 113139 - protein, 398 aa, Oryza sativa
  Clone ID: PAT_MRT4530_16956C.1.pep
MQLQKLAAILLLISIGHSALLAAVGAPPPPPGSSNCSTACGGVDIPYPFGIGPAGCALPGFELTCRDTNNGGKKPFLGHGGHFELAGVSLSDGQARVWNNISSYCNDTSQTIMDVVSFADPYRLSQAGNTFAVVGCQAVAVVGVGDSADNIVRFLSGCVATNCGRRGDRLADGACSGAGCCQTTITKGFNAYQVEFQNYSTVFNSSKDIYNVSRCSYAALMESSSFSFRRSYATSSEFFDANGGRVPVVVEWAVRNASNCVEARKNRESAEDAESVIQSLITLPPVLKAFSDGTVDAGMANTSRAMCESTGYFSEFAFHQHQHMLRSVVGGGAARVMLGVALKGGASAHLIHPLLLWPVGRSAGGGYAAILGVRMALQGGETEHPSGDLEGAHLALPW

SEQ ID NO: 113140 - protein, 267 aa, Oryza sativa
  Clone ID: PAT_MRT4530_16957C.1.pep
MPGVSREVIEHRLAVRPDARPVRQKVRRQAPERQAFIKEEVARLLEADFIREEIHPEWLANPVVVPKANGKLRMCIDYTDLNKACPKDPFPLPRIDQIVDSTAGEDAPPSKLRDVQCVTGCMAALSRFISRLGERALPLFKLLKRSGPFEPLLLYLAATPHVVSAALVVEHEEGEREGPPACDGPSSPEGLAPKASSPQEGPEAPKGGAEALAGGPELDDPEAVWDPPRTSEQVRPELPALDSTNRPPRKVQRPVYFVSEALRDVKT

SEQ ID NO: 113141 - protein, 181 aa, Oryza sativa
  Clone ID: PAT_MRT4530_16958C.1.pep
MGEGASSSGVPRSSSRGGPPPTLTPGGTGCRAFVASLRNVRWPPKFRPNLMEKYDGSINPSEFLQIYTTIIVAAGGDDRVMEDLCQQFVTNFQGTYPRLGEEVDLHAVRRKDDESLRSYMQRFCQVRNTISCIPAHAVVYAFRNGVWHNHMLEKIASKEPKTTAELFELADKVARKEEAWA

SEQ ID NO: 113142 - protein, 1660 aa, Oryza sativa
  Clone ID: PAT_MRT4530_16959C.1.pep
MVEVLEVEEEAVAFIPTPSGSGDSGESRGPRHHRRDSPTPSRREPSRWEDPTRSGGSALSPPPGGGRPRCVGERRRLVYGDGGSPRGALQAAGALLRHPPVNPVPETPVQRWLDDVANLVTTAQRQLATGGRSAATYTSRTPVTLSSSARRRARRSATISRRSTAPTSSGASGSRRRYDGLYGKQDARINIKRRWNECRAARMGEGASSSGVPRSCSRGGPPPTLTLGGTGCRAFVASLRNVRWPPKFCPNLTEKYDGSINPSEFLQIYTTIIVAAGGDDRVMANYFPMALKGQARGWLMTQPPDSIHSWEDLCQQFITNFQGTYPRPGEEADLHAVRRKDDESLRSYIQRFCWVRNTILCIPAHAVVYAFRNGVRHNRMLEKIASKEPKTTAELFELADKVARKEEAWAWNSPGAGAAAAATPESAPRSKRRDSRGKRKPARSDDEGHVLAVDGPVRAPRKGKATGDKPSSTAPSGEGRSADKWCSVHNTYRHSLADCRSVKNLAERFRKADEEKRQGRREGKAPMTSTGDRRSEAKNKAPADDGVTAPGMKLQPSLPIIDVTTGHMWLLGHVELLVTFGDSTNFRTERIDFDVADLNLPYNAVLGRPALVKFMAATHYAYLQMKMPGPAGPITVFGDVKVALACAEQRADNLAVATEPQAPGAFASRVSKKHLTSADEESALVSFLWANSDVFAWKPSDMPGVPREVIEHRLAVRPDARPVRQKVRRQAPERHAFIREEVARLLEADFIREVINPEWLANPVVVPKANGKLRMCIDYTDLNKACPKDPFPLPRIDKIVDSTTGCDLLCFLDAYSGYHQIRMAREDEEKTAFITPVGTFCYTTMPFGLKNAGPTFQRMTCITLSNQIGHNVEAYVDDLVVKTRHQDTLQQDLAETFDSLRSTRVKLNPDKCVFGVPAGKLLGFLVSSRGIETNPEKIRAIESLGMCTLGPEKPLLLYLAATPHVVCATLVVEREESEREAPLARDGPSSSEGLVPKAPSPREGLEAPEGGGEALASGPEPEVTRDPPGAPEQGRPGSPAPDNTNRPRRKVQRPVYFVSEALRDAKTQYPQAQKMLYAVLMASRKLCHYFQAHRVSVVTSYPLGQILHNRECTGRVVKWAIELAEFDLHFEPRHMIKSQVLADFIAEWTPVDEPVPSSVPFPPGEEEDPNADIRGGHWIMHFDGSLNLQGAGAGVTLTSPSGDVLKYVVRLDFRATNNMAEYEGLLAGLRTAAGMGIRRLLVLGDSQLVVNQISKEYQCTDPQMDVYVREVVWMTDIWAYLDGNTLPEDRAEAEKLARISKRYVLVEGTLYRRAANGILLKCVSREQGIELIADTHQDILGPFKAARGGYQHLYVAIDKFTKWPEAYPVVKIDKHSALKFIRGITSRFGVPNRIITDNGTQFTSELFGDYCDDMGIKLCFASSAHPKSNGQVKRANAEILKGLKTKTYNVLKKHGDSWLEELPTVLWANRTTPSHATGETPFFLVYGAEAVLSSELSLGSPRIALYNEATQDDLRHDNLDYLEERRRRAALRAARYQQSLRRYHQRHVRARSLQIGDLVLRRVQSRLELSKLSPMWEGPYKVIGVPRPGSVQLTTEDSTELPNPWNIEHLRRFYPWHREFLLSRSSGQPPHNPSVCAGLAGGYHCVSFFLLQAMNFSTFL

SEQ ID NO: 113143 - protein, 1140 aa, Oryza sativa
  unsure (1)..(1140): unsure at all Xaa locations
  Clone ID: PAT_MRT4530_1695C.1.pep
MSNEVNHVGKAPMFNGTNYSTWKIKMSTHLKAMRFHIWSIVDVGFAITGTPLTEIDHRNLQLNVQAINDLFNSLSQEEFDRVSNLETAYEIWNKLAEIHEGTSEYKDAKLHFLKIQYETFSMLPHESVNDMYGRLNVIVNDLKGLGANYTDLEVAQKMLRALPEKYETLVTMLINSDMSRMTPASLLGKINTNDMYKLKKKEMEEASPSKKCIALQAEVEDKGKGKVNEANENLEEEIALLARRFNDLLGRRKERGRGCNSNRRRNRRPNKTLSNLRCFECGEKGHFASKCPSKDDDGDKSSKKKSGGYKLMKKLKKEGKKIEAFIGEWDSNEESSASSGSEEEDGDDASSKKMTVVAIKEAPSLFAPLCLMAKGSSKVTSLSDSESDDDCDDVSYDELVSMFEELHAYSEKEIVKFKALKKDHASLEVLYEELKTYHARLTISHEKLKEAHDNLLSTTQHGALIDVGISCDLLDDSATCYIAHVASSSISTSCDDLVDMSSSSSSSCVSICDASLVVENNELKEQVAKLNKSLERCFKGKNTLDKILSEQRCILNKEGLGFIPKKGKKPSHRATRFVKSNGXAHDGSIVARYVGSLILGGELPHRWEPXVLDSGCTQHMTGDRAMFTTFEVGGNEQEKVTFGDNSKGKSIVAELFKKFAKRAKNEFSCTLVKIRSDNGSEFKNTNIEDYCDDLGIKHELSATYSSQQNGVVERKNRTLIEMARTMLDEYGVSDSFWAEAINTACHATNILYLHPLLKKTSYELIVGRKPNVAYFRVFGCKCYIYQKGVRLTKFKSQCDEGFLLGYASNSKTYRVYNKNKGIVEETAVVQFDETNGSQEGHENLDDVGDEGLMRAMKNMSIGDVKPIEVEDKPSTSTQDEPSTSATPSQAQVEVEEEKAQDPPMPPRIHTALSKDHPIDQVLGDISKGVQTRSRVVSICEHYSFVSCLEPKHVDEALCDPEWMKAMHEELNNFARNKVWTLVERPRDHNVIGTKWVFRNKQDENGLVVRNKARLVAQGFTQVEGLDFGETFAPVARLEAVLILLAFASCFDIKLFQMDVKSTFLNGEIAELVFVEQPPDFEDPKNPNHVYKLSKALYGLKQAPRDWYVSVIWDREYHDQRLEADAIAHVAWHLRGRRARG

SEQ ID NO: 113144 - protein, 1350 aa, Oryza sativa
  Clone ID: PAT_MRT4530_16960C.1.pep
MVEVLEMEEEVVAFTPTPSGSEDSGESRGPRHRRHGSPTPPRREPSRRENAARSGGSAPSPLQGGVRPRRAGVRRCLDYGDGDSPQGALQAVGALLRHPPVNPELETPVQRWLDDVTNLVTAAQRQLAIGGRSAAAGTSRTSVTLSSSARRRAHRSATISRRSMVPTSSGASGSRRRHKGLYGTQDARINIERRRDERRAARMGEGASSSGAPHSSSRGGPPPTLTPGGTGCRAFVASLWNVRWPLKFRPNLTEKYDGNINPSEFLQIYTTVIVAAGGDDRVMANYFPMALKGQACGWLMTQPPDSIHSWEDLSQQFITNFQGTYPRPGEEADLHAVRQKDDESLRSYIQRFCQVRNTIPCIPAHAVVYAFRNSVRHNRMLEKITSKEPKTTTELFELADKVARKEEAWAWNSPGTGAAAAATPESAPRSKRLSIISPAAFDALKAPGMKLQPSLPIIGVTPGHTWPLGHVEFPVTFGDSANFRTERIDFNVADLNPPYNAVMGRPALLKFMAATHYAYLQMKMPGPAGPITIFGDVKVALTYAEQRADNLAVATGPQAPEASASHASKKRITSADEEGAFVSFLRANSVVFAWKPSDMPGVPREVIEHRLAVWPDVRPVRQKVRCQAPERQAFIREEVARLLEADFIREVIHPEWLANPVVVPKANGKLRMCIDYTDLSKACPKDPFPLPRIDQIVDSTAGCDLLCFLDAYSGYHQIRMAREDEEKTAFITPVGAFCYTTMPFGLKNAGPTFQRMTRITLSNQIGRNVEAYVDDLVIKTCHQNTLLQDLAETFDSLRSTHVKLNPDKCVFGVPAGKLLSFLVSSQGIEANSEKIRAIERMRPPSKLRDVQCVTGCMAALSRFILRLGERALPLFKLLKRSEPFVAPGLEEPLLLYLAATPHVVSAALVVERREGEQEGPPTCDGPLTLEEIATELSCIREGPEAPKGGVQTLIDGLRLDDPEAVRGPLGTSEQVRPESPAPDSTIRPHRKVQRPIYFVSEALRDAKTRYPQAQKMLYAVLMASRKLRHYFQAHRVSVVTSYPLGQILRNREGTGRVVKWAIELAEFDLHFEPWHAIKSQILADFIAEWTPVDESIPSNTLFFPGEEEDPNADIRGGHWVMHFDGSLNLQGVGAGVTLTSPNGDVLKYVVRLDFRATNNMAKYEGLLAGLRAAAGMGIRRLLVLGDSQLVVNQVSKEYQCTDPQMEAYVREVRRMERHFNGVELQHVPRRNNTVANELSRVASARTPLPPGTFEERLAQPSARPSPLKDPNDAPFDPTSGDPRQVTWMTDIRAYLDGNTLPEDRAEAEKLARISKRYILVEGALYRRAANGILLKCIPRERGIELIADAH

SEQ ID NO: 113145 - protein, 124 aa, Oryza sativa
  Clone ID: PAT_MRT4530_16961C.1.pep
LGITVFEEMPPQSVEGVACRWPPNTTAQRFSEPLIRYDNAVSAGVQTRRVRKTGTARCTRRARSGRPRTGMARALPPARRRSPSRQQHRQERSGGRATPAPAPPDRARGVSRTARCGWNHDLVT

SEQ ID NO: 113146 - protein, 1635 aa, Oryza sativa
  Clone ID: PAT_MRT4530_16962C.1.pep
MVEVLKVEEEAVAFTPTLSGSGDSGESRGPRHRRHGSPTPPRREPSRREDPTRSGDSALSPPPGGGRPRRAGARCRLDYGDGGLPQGTLQVAGALLRHPPVNPELETPVQRWLDDVANLVTTTQWQLATSGRSAAAGTSRTSVTLSSSARRRARRSATISRRSTVPTSSGASESRRCHDGLYGTQDARINIERRRDERRATRMGEGASSSGAPRSSSRGGPPPTLTPGGTGCRAFVASLRNVRWPPKFRPNLTEKYDGSINPSEFLQIYTTVIVAAGSDDRVMANYFPMALKGQARGWLMTQPPGSIHSWEDLCQQFITNFQGTYPRPGEEVDLHAVRRKDDESLRSYIQHFCQVRNTIPCIPAHAVVYAFRNSVRHNRMLEKIASKELKTTAELFELADKVAQKKEAWAWNSPSTADGPTRAPRKENATVDRPSPTIPSGEGRSADKWCSVHNTYRHSLADCRSVKNLAERFRKADEEKRQGRREGKAPATSTGDQRGEAKDKAPADDGGDGEDLDFQIPQGTVATLDRGGGACAHTSRRSFKAMKWELLAIVPTHEVVRKMKMPGPAGPITVLGDVKVALACAEQRADNLAVATEPQAPEASASHASKKRLPSADEPSDMPGVLREVIEHRLAVRPDARPVRQKVRRQAPERQAFIREEVARLLEADFIREVIHPEWLANPVVVPKANGKLRMCIDYTDLNKACPKDPFPLPHIDQIVDSTAGCDLLCFLDAYSGYHQIRMARKDEEKTAFITPVGTFCYTTMPFGLKNAGPTFQRMTRITLSNQIGHNVEAYVDDLVVKTHHQDTLLQDLAETFDSLRSTRVKLNPDKCVFGVPAGKLLGFLVSSRGIEANPEKICAIERMRPPSKLRDVQCVTGCMAALSRFISRLGERALPLFKLLKRSGPFEPLLLYLAATPHVVSAALVVEREEGEREAPSACDGPSSPEGLAPKASSPREDPEAPKGGAEALAGGPEPYDPEAVWDPPGTSEQARSESSAPDNTNWPRRKVQRPVYFVSEALRDAKTRYPQAQKMLYDVLMASRKLRHYFQAHRVSVVTTYPLGQILHNREEEEDPNADIRDGHWVMHFDGSLNLQGASAGVTLTSPNGDVLKYVVRLDFRATNNMAEYEGLLAGLRAAAGMGIHRLLVLGDSQLIVNQVSKEYQCNDPQMEAPTPPGTFEERLAQPSARPSPLRDPNDTPSDPTPGDLCPSGPEGVNPDPPRQVVWMTDIRAYLEGNTHPEDRAEAEKLARISKRYVLVEGTLYRRTANEILLKCISREQGIELIADAHQGEFRAHSTLRTLVGKAFRQGFYWPTALQDAQEWVQRCKACRFHAKWTHQPAQALQIIPLSWPFAVWGLDILGPFKAARGGYQHLYVAIDKFTKWPEAYPVVKIDKHSALKFIRGITSRFGVPNRIITDNGTQFPSELFGDYCDDMGIKLCFASPAHPKSNSQVERANAEILKGLKTKTYNVLKKHGDSWLEELPAVLWANRTTPSRATGETPFFLVYGAEAVLPFELSLGSPRVALYNEANQDALRREDLDYLEERRRRAALRAARYQQSLRRYHQRHVRARSLQASDLVLRRVQSRLGLRKLSPMWEGPYKVIEVPWLGSVRLTMEDGTELPNPWNIEHLCRFYP

SEQ ID NO: 113147 - protein, 1144 aa, Oryza sativa
  Clone ID: PAT_MRT4530_16963C.1.pep
MGSSGEVGAMGKKVIYKLQFWLGRKTSGCDNYGDGGSPQGALQAEGALLRHPPVNPEPETPVQRWLDYVANLVTAAQRQLATGGRSTAAGTSRTSVTLSSSARRRARRSATISRRSTVPTSSGATGSRRRHDGLYGTQDARINIERRRDERRVARMGEGASSSGASRSSSRGGPPPTLTPGGTCCRAFVASLRNVRWPPKFRPNLTEKYDGSINPSEFLQIYTTVIEAAGGDDRVMANYFPMSLKGQARGWLMTQPPDSIHSWADLCQQFITNLQGTYPRPGEEADLHVNGVRHNRMLEKIASKEPKTTTELFELADKVARKEEAWAWNSSGTGAAAVATPESAPRSKRRDRRGKRKSVRSDDEGHVLAADGPTRAPRKGKATGDKPSPTVPSGEGRSVDKWCSVHNTYRHSLADCRSPRDRSPPLLLYLAATPYVVSAALVVEHEEGEWEGPPACDGPSSPEGLAPKASCPREGPEAPKRGSEALAGGPGFDDSGAVRDPPGTSEQILHNREGTGRVVRWAIELAEFDLRFEPRHAIKSQILADFIAEWTPVDEPIPSNVPFSPGEEEDPNADIRGGHWVMHFDGSLNLQGAGVGVTLTSPNGDVLKYVVRLDIRATNNMAEYEGLLAGLRAAAEMGIRRLLVLGDSQLVVNQVSKEYQCTDPQMEAYVREHVPRRDNTVADELSRVASARAPLPPGTFEERLAQPSARPSPLRDPNDAPYDPISGDPRPSRPEGVNPDPPRQVVWMTGIRAYLDGNTLPEDRAEAEKLACISKQYVLVEGALYRRAANGILLKCIPREQGIELITDAHQGECGAHSASRTLVGKAFWQGFYWPTALQDAQEWVQRCEACQFHAKQTHQPAQALQVIPLSWPFTVWGLDILGPFKAARGGYQHLYVAIDKFTEWPEAYPVVKIDKHSALKFIRGITSRFGVPNRIITDNGNQFTNELFGGYYDDMGIKLCFASPAHPKSNGQVERANAEILKGLKTKTYNVLKKHGDSWLEELPAVLWANRTTPSRATGETPFFLVYGAEAVLPFELSLGSPRVALYNEANQDDLHRDDLDYLEERRRRRYHQRHVRARLLQVGDLILRRVQSRLGLSKLLPMWEGPYKVIGVPRPGSVRLTTEDGTELPNPWNIEHLRRFYP

SEQ ID NO: 113148 - protein, 63 aa, Oryza sativa
  Clone ID: PAT_MRT4530_16964C.1.pep
PYVFMYILVHFCFVCCFQVLGSPFMLYGRPRPLKAVSLPLVAPHLFCCVALSIHWPFMSFRDM

SEQ ID NO: 113149 - protein, 1557 aa, Oryza sativa
  Clone ID: PAT_MRT4530_16965C.1.pep
MDLQLLPAANLRGGIIPLVQVVRDSLLPVAEGGCDASGYAAVSIMETAVRPKARFKQQAHFYGIPQRSTVPTSSGASGSRRRHDSLYGTQDARINIEQRWDERRAARMGEGASSSGAPHSSSRGGPPPTLTPGGTGCRAFVASLRNVRWPPKFRPNLTEKYDGSINPSKFLQIYTTVIVAAGGDDRVMANYFPMALKAHAVVYAFRNGVRHNCMLEKIASKEPKTTAELFEQADKVAWKEEAWAWNSPGTGAAAAATPESAPRSKRRDRRGKRKSVRSDDEGHVLAADGPTRAPRKGKAAGDKPSPTVPSGDGRSADKWCSVHNTYRHSLADCRLPDEEKRQGRREGKAPTTLTGEHREEAKNKGPADDGGDSEDLDFQIPQGTVATLDGGACAHTSRRSFKAMRRELLAAVPTHEAVRKARWSELALVVYPTIHNVKMKSVLVDGGASLSIISPAAFDALKAPGMKLQPSLPIIGVTPGHTWPLGHIELPVTFGDSANFRTERIDFDVADLNLPYNAVLGRPALVEFMAATHYAYLQMKMPGPAGPITIFGDVKVALAYAEQRADNLAVATEPQAHEASASHTSKKHLTSVDEVPVKEIPLDMHGVPREVIEHLLAVRPDVRPVRQKVRRQAPERQAFIREEVARLLEADFIREVIYPEWLANPVVVPKANGKLWMCIDYTDLNKAWPKDPFPLPRIDQIVDTAAGCELLCFLDAYSGYHQICMAREDEEKIAFITPVGTFCYTTMPFGLKNACPTFQRMTRITLSNQIGRNVEAYVDDLVVKTRHQDTLLQDLAETFDSLRSTRVKLNPDKCVFAPGPEEPLLLYLAATPHVVSAALVVEHEEGEREGPPTCDGPSSPESLATKASCLREGPEAPKGGVQTLTGGPRLDDPEAVRDPLGTSEQAQKMLYAVLMASRKLRHYFQAHRVSVVTSYPLGQILHNREGTGRVVKWAIELAEFDLHFEPRHAIKSQILADFIAEWTPVDESIPSNAPFSPGEEEDPNADIRGGHWMMHFDGSLNLQGAGVGVTLTSPNGDVLKYVVRLDFRATNNMAEHEGLLAGLRAATRMGIRLLLCTDPQMEAYVREVRRMERHFDGLELRHVPRRDNTVADELSRVASARAPLPPGTFEERLAQPSARPSPLRDPNDAPSDPTSGDPRPSGPEGVNPDPPRQVVWMTDIRAYLDGNTLPEDCAKAEKLARISKRYVLVEGALYRRVANEILLKCIPREQGIELIADAHQGECGAHSASRTLVGKAFRQGFYWPTALQDAQELVQRCKACLFHAKQTHQPAQALQVIPLSWPFAVWGLDILGPLKAARGGYQHLYVAINKFTKWPEAYPVVKIDKHSALKFIRGITSRFGVPNRIITNNGTQFTSELFGDYCDDMAIKLCFASPAHPKSNGQVERANAEILKGLKTKTYNVLKKHGDSWFEELPAVLWANRTTPSRATGETPFFLVYGAEAVLPSELSLGSPRVALYNEANQDDLRRDDLDYLEERRRRAALHAARYQQSLRRYHQRHVRAPSLQVSVLVLRRVQSRLGLSKLSPMWEGPYKVIGVP

SEQ ID NO: 113150 - protein, 87 aa, Oryza sativa
  unsure (1)..(87): unsure at all Xaa locations
  Clone ID: PAT_MRT4530_16966C.1.pep
VPQRPLLHXLRHGGGRHLPYHCHCAILVSSSPPSPPPQTPPLTSRLSSRPSPPLVESLGEGRKAEEIQESAGGDMTEDTQSPLSRAL

SEQ ID NO: 113151 - protein, 614 aa, Oryza sativa
  Clone ID: PAT_MRT4530_16967C.1.pep
MPLVVEGVIMIQVRCTVWYTSDQSLIYSNSRTRGYGNSGRDNGSPTPPHREPSRKEDPTRSDGSALSPPPGGGRPRRVGACRRLDYGDDGSPQGALQAAGALLRHPPVNPEPETPVQRWLDDVANLVTTAQRQLATGGRQLATGGRSTAAGTSRTSVTLSSSARRRARRSATISRRSTVPTSSGASGSRRRHDGLYGTQDTRINIERRRDERRAARMGEGTSSSGAPRSSSRGGPPPTLTPGGTGCRAFVASLRNVRWPPKFRPNLTEKYDGSINASEFLQIYTTVIVAAGGDDRVMANYFPMALKAYVREVRRMERHFDGLELRHVPRRDNTIADELSRVASARAPLPPGTFEERLAQPSARPSPLRDPNDTPSDPTPGDPRPSGPEGVNPDPPHQVVWMTDIRAYVEGNTHPEDRAEAEKLTRISKRYVLVEGTLYRRAANGILLKCISREQGIELIADAHQGECGAHSASRTLVGKAFRQGFYWPTALQDAQEWVQWCKACQFHAKQTHQPAQALQVIPLSWPFAVWGLDILGPFKAARGGYQHSYVAIDKFTKWPEAFPVVKIDKHSALKSIRGITSRFGVPNCIITDNGTQFTSELFGDYCDDMGPRLL

SEQ ID NO: 113152 - protein, 60 aa, Oryza sativa
  Clone ID: PAT_MRT4530_16968C.1.pep
HASAHASAAILADVDVDERAQTSLPRCLPTRRRRLHAWTYQIRRTLHAIQRLLMIKIIII

SEQ ID NO: 113153 - protein, 45 aa, Oryza sativa
  Clone ID: PAT_MRT4530_16969C.1.pep
YAEFELCTPRCFKNHARVKRRCLERSSIQPNTTVFTHSVIPVCTS

SEQ ID NO: 113154 - protein, 75 aa, Oryza sativa
  Clone ID: PAT_MRT4530_1696C.1.pep
GNQRGLQFPTEVHNRFREYNSSNFFNNLENPTLKFFNSTRVDTPYQARDHRGQEFGFATKCTLFCGRTHCRIKSL

SEQ ID NO: 113155 - protein, 265 aa, Oryza sativa
  Clone ID: PAT_MRT4530_16970C.1.pep
MGDLGGAWHEAAAAEEEEAQAPGGGVGPEPDHLVVMVHGIVGSAADWKFGAEQFEKLLSDKVIVHRSNRNMYKLTLDGVDVMGERLAQEVPFLFGFTAIETFASYIIHLIFGKTGKHLFLMDNDDGKPPLLLRMVDDWGGVHKIYPHIVYEELSKAETMNQCTDVADVDSCMLEERLLRGLKLVSWEKVDVSFHNSKVRSAAHSVIQRRCRCHKPYDRPFRPIVKQLRYLEASLSEERQLLTADLPSLVSKFIAKSRFRLCDKWH

SEQ ID NO: 113156 - protein, 130 aa, Oryza sativa
  Clone ID: PAT_MRT4530_16971C.1.pep
KTGKHLFLMDNDDGKPPLLLRMWTDSGSKIYPHIVYEELSKAETMNQCTDVADVDSCMLEERLLRGLKLVSWEKVDVSFHNSKVRSAAHSVIQRRCRCHKPYDRPFRPIVKQLRYLEASLSEERQLLTAD

SEQ ID NO: 113157 - protein, 270 aa, Oryza sativa
  unsure (1)..(270): unsure at all Xaa locations
  Clone ID: PAT_MRT4530_16972C.1.pep
QKAIVQAMSLLVDVKTRLVNLRNDAWQPLFEEVISHFXCKKKKIPVPNMDEPIPRFGRSRMQGNLITQEHYXRLDTFFAALDAIITEMNHRFNEVXSSELLVSFSSIDPRTXFSKFDIDKIARLTEIYDQDFSNADPSNIRDQLETFILHVPRIDDFVGCHYFGSLAIKIVETEKNVTFPLVXRLIELALLLSVATASVERAFSAMNIIRHXLCNRMSDEWLNDLMLCYVENEIFRGLRVDTIKKTFQALKTWNMDLPMPPNVLSSHNIF

SEQ ID NO: 113158 - protein, 609 aa, Oryza sativa
  Clone ID: PAT_MRT4530_16973C.1.pep
MATQAIAPMHAAVVHRHHVLPPRRCVRRRGVFVRASAAAAAAAAETDTLSAAFWDYNLLFRSQRDECLDSIPLRVTEGAIPPDFPAGTYYLAGPGIFSDDHGSTVHPLDGHGYLRSFRFRPGDRTIHYSARFVETAAKREESRDGASWRFTHRGPFSVLQGGKKVGNVKVMKNVANTSVLRWGGRLLCLWEGGQPYEVDPRTLETVGPFDLLGLAAADDNKATNASAARRPWLQEAGLDAAARLLRPVLSGVFDMPGKRLLAHYKIDPRRGRLLMVACNAEDMLLPRSHFTFYEFDAHFDLVQKREFVVPDHLMIHDWAFTDTHYILLGNRIKLDIPGSLLALTGTHPMIAALAVDPRRQSTPVYLLPRSPETEAGGRDWSVPIEAPSQMWSVHVGNAFEEANRRGGLDVRLHMSSCSYQWFHFHRMFGYNWHHKKLDPSFMNAAKGKEWLPRLVQVAIELDRTGECRRCSVRRLSDQHARPADFPAINPSYANQRNRFVYAGAASGSRRFLPYFPFDSVVKVDVSDGSARWWSTDGRKFVGEPVFVPTGGGEDGGYVLLVEYAVSKHRCHLVVLDAKKIGTENALVAKLEVPKNLTFPMGFHGFWGDE

SEQ ID NO: 113159 - protein, 67 aa, Oryza sativa
  Clone ID: PAT_MRT4530_16974C.1.pep
LGFLYLWVIHLFFFCNNSFFFGAREQTLYLPSWDEENLPGTQQRWENIEDKGTTYKEKANDARTQRN

SEQ ID NO: 113160 - protein, 67 aa, Oryza sativa
  Clone ID: PAT_MRT4530_16975C.1.pep
MLFATATTLSSIETDETKGDIAQVEEEPAFPLEASQDVDGDGGDNVTEDCVVFAEADAKLTIVPALC

SEQ ID NO: 113161 - protein, 112 aa, Oryza sativa
  Clone ID: PAT_MRT4530_16976C.1.pep
PLSASPLLRVLSCRHQRLGLRRLLRTPPIERPLAFRSSLLVRIGLLAPSTLGVSFAAPSSAVSVGVLCSRSALVPVRGPNMCSYLCGPRGLLFPFSKYAACCSGSGPCCSGV

SEQ ID NO: 113162 - protein, 36 aa, Oryza sativa
  Clone ID: PAT_MRT4530_16977C.1.pep
QLLSTSFARNRVPLRCRQRDALRGCRVRQPHWIWWH

SEQ ID NO: 113163 - protein, 224 aa, Oryza sativa
  unsure (1)..(224): unsure at all Xaa locations
  Clone ID: PAT_MRT4530_16978C.1.pep
MFRLRSSARLLRELREASRSXGRRREWLSGGAAAFAARTTSLLHPLPGLDVPQRLPDRLGVQPTRVTTLPNGVRVTFDDLPVPSACEWVVVDSGSCYETAETVXVSHLLERLFFKDTARRYHRDTVQDXEATAGNIEACASMXQTVYSYQTLKAYLPXPFEALIDCVRRPLFLQDQVERLVAFAKXEVQELQNNLQRFLQEXLNLVGFTGALANSLVAAEESVH

SEQ ID NO: 113164 - protein, 63 aa, Oryza sativa
  Clone ID: PAT_MRT4530_16979C.1.pep
FAHLCKYTPHTIYNLILFLSSLAYRLSKTLPDQRLSCIHQPVSGRPRPPRKSSQSSNLQKLDI

SEQ ID NO: 113165 - protein, 55 aa, Oryza sativa
  unsure (1)..(55): unsure at all Xaa locations
  Clone ID: PAT_MRT4530_1697C.1.pep
GTRXIIWXIFILGPXMXXHIIHIXNLDNSXXGAHHYRQIQNXFQXXXXYPWPPGX

SEQ ID NO: 113166 - protein, 74 aa, Oryza sativa
  Clone ID: PAT_MRT4530_16980C.1.pep
GVCVGGNRARDVRGVYFKSTGVIKTNNISFSPISIHSISFIAPYTKFTTIIKLPITSPYTKRRTLLIVTLHDYS

SEQ ID NO: 113167 - protein, 458 aa, Oryza sativa
  unsure (1)..(458): unsure at all Xaa locations
  Clone ID: PAT_MRT4530_16981C.1.pep
ATQIMVQEGKLDLLLKTLEXNERKRAEAEERARADLQDLKVTVKAQLPQVEKXVQDLNTMLRNPSAKVDQLESSILCQAKIENMVGEIKEEHYRASPSQTPFANPXFDNIRFLFHIRVSNSEKSYENEYDRASFQPYSIRXSSLARSVPPMTCPXFNRDNPQMWHANCEVYFNVYGIPPGQWVKVATLNFVGDAVFWLQTYXSVRNQLIGVTWYDLCEXCTRFTRDMHEALIRQWIHVRQTXIDNVERFDSLMHQLLAYEQYVPTVYFVTKFEESLKDEIRRGILVQRPQDMDTDYSLALLHEEALEGVKPVSYTKSEHNSYVRTVNRTTGQTPVNVTPEDKRNQDFNRSKDDRLSSLKAYMRTKGFCFTCGERWGNDHYXCSTSVQLYVVQELLDILQEESTTNQNNGIYEEEEEISLVAISEQALNGTESSNSIRLKRVVLNTRLLSLINSSLAHA

SEQ ID NO: 113168 - protein, 160 aa, Oryza sativa
  Clone ID: PAT_MRT4530_16982C.1.pep
MSGGIARGRLAEERKAWRKNHPHGFVAKPETMADGSANLMIWHCTIPGKQGTDWEGGYYPLTLHFSEDYPSKPPKCKFPQGFFHPNVYPSGTVCLSILNEDSGWRPAITVKQILVGIQDLLDQPNPADPAQTDGYHIFIQDKPEYKRRVRVQAKQYPALL

SEQ ID NO: 113169 - protein, 244 aa, Oryza sativa
  Clone ID: PAT_MRT4530_16983C.1.pep
MFRYEKGGDVEAGTSGGARELYPGMTEPPEMRWALIRKIYVILSMQLLLTAAVAAVVVKVRAISHFFVSSHAGLGLYIFLIILPFIVLCPLYYYHQKHPVNLILLGLFTVAISFAVGMTCAFTSGKVILESAILTTVVVFSLTAYTFWAAKRGRDFSFLGPFLFASLIVLLVFAFIQILFPLGRISQMIYGGIASLIFSGYIVYDTDNIIKRYTYDQYVWAAVSLYLDVINLFLSLMTLFRAAD

SEQ ID NO: 113170 - protein, 203 aa, Oryza sativa
  Clone ID: PAT_MRT4530_16984C.1.pep
AAMEQTERTQIDVRIAVALLHCHACLQPLKPPVFKCDEAHIVCSGCRCGHHGQLCGGAAVYSHCAELDAVVATAKVPCAHAPYGCSSYVVYAGVADHQRACPCAPCSCPEPGCRFRSSPAALPGHLAAGHSWPVAEIAYGKPRKLAVPPPAHVLVGEADRAVFLVSSCAVGAGAAVCVVCVRANGGGDNAAAVARYKCKLWVE

SEQ ID NO: 113171 - protein, 82 aa, Oryza sativa
  Clone ID: PAT_MRT4530_16985C.1.pep
MAWTGWFYSCKRGGWGHDEAAQINWSRVGEMMGGWQLPVRWRCHRAMCGVDCRFAGCSGALTSMMNSIHHVGCGVLPACPSI

SEQ ID NO: 113172 - protein, 48 aa, Oryza sativa
  Clone ID: PAT_MRT4530_16986C.1.pep
LVSSNSNIDDIIHSTNAPPAPPNSTPGRAKGNQPPEGDTKQKTVIRRH

SEQ ID NO: 113173 - protein, 547 aa, Oryza sativa
  Clone ID: PAT_MRT4530_16987C.1.pep
MPVTRRRAAAAVTAVLVEEERAAAIDISSDSDAGSESGSEEDDEESTSDEDYYIDISDSDGEEGGGAGSEEESESESEAEREREPEQSGVDRGEASCRKIADLLRAGRNLDGIKLVDCKAYLKKNGLSQTGDLATCIERIVLHWRFKDRDPEKIYPRSSFCINCKGATSVGNKPLSVCIRNYPGDVCRGDTVLFKQKVYEKSGKRHSKCIGKRIVAGSVIKESYGKEKQQHTFTIQVFWSKGVGKLPPLYLLLVKGRNLYRMMTFRQPWLNEADRSKALDEKHSRGDAARRVRALSRPDAAGNSKKTTQKGKHQSQAGRPDSGSSIKKGKKRVMQSSNPDLPTKRSRNEESQSSSAKQFAGGQNTKTSRARLDRSDRSTNRARMRERKADSQQNLAGGSHAQFGERNAGSGYDMQASHGYLVGVQQSPFEIVRPQRPPPFREVGNASQPHADGRSTACPHPRMGFQHPNAALAGSHPPAYYLGNTPNQFPSFASLNVRQTVHHHPLDQLGASFAPFNVPQTVYRPRPEGGYVMPQFRYSGGSNGFPR

SEQ ID NO: 113174 - protein, 33 aa, Oryza sativa
  Clone ID: PAT_MRT4530_16988C.1.pep
MTVLSTIHYDPKDGFPPLSRHGLLRTSTFPPLG

SEQ ID NO: 113175 - protein, 55 aa, Oryza sativa
  unsure (1)..(55): unsure at all Xaa locations
  Clone ID: PAT_MRT4530_16989C.1.pep
MQTAAXSVVGLSAVLPAAXKGRXLQIXAPXRVALPLPSAAAAVAMEAAEVXYXSX

SEQ ID NO: 113176 - protein, 134 aa, Oryza sativa
  Clone ID: PAT_MRT4530_1698C.1.pep
WCSPTGGVVPGESTLPILCLGFLAVGLNPPTHGLYFCADVSGFRIIMGVWISLPPRMRKWNHRTHCCSRNRGWGSCTAHGLSGGSRALGGRKIGLHGESQMLAAWRKPERVAINGWLPRLAKLMVGNNGCRKPR

SEQ ID NO: 113177 - protein, 74 aa, Oryza sativa
  Clone ID: PAT_MRT4530_16990C.1.pep
SHIQRHILGRSSAQVFADSQALNPRPGVLTLLHYSQSTPPTTSAAKLQNGPQNDLPPAASNAWQNLSRMKGGER

SEQ ID NO: 113178 - protein, 65 aa, Oryza sativa
  Clone ID: PAT_MRT4530_16991C.1.pep
PCSTGESPQPHPRSLEAEEADGAEGREGAGGDGRGEGDGRAMEAINGVEGGGEGRVGRRRGRQGH

SEQ ID NO: 113179 - protein, 73 aa, Oryza sativa
  Clone ID: PAT_MRT4530_16992C.1.pep
MEQGRREAEDRAGTLPSQRPLGRRMQGEEYMPCKCPFHKDNHVNFPPPRHRLREPPKTEWRPRTTVARHMFAS

SEQ ID NO: 113180 - protein, 199 aa, Oryza sativa
  Clone ID: PAT_MRT4530_16993C.1.pep
MEEAEEMQVERMQEEVEGGGADTDKLSYEIFSILESKFLFGYTDPHQLWLPKAPAAQASAATAVPSGKAAQRGKVCVLCVDGGGGGLRALLSGRALAHLEAALRRASGDPDARVADYFDLVAGRGGSTSLFCRPKKRPLAAPTAALDAAMKTAFGEELTLRDTIKPVLISCYDLKSSAPLVFSRADALESESYDFRLFE

SEQ ID NO: 113181 - protein, 267 aa, Oryza sativa
  Clone ID: PAT_MRT4530_16994C.1.pep
MEEAEEMQVERMQEEVEGGGADTDKPRYEIFSILESKFLFGYTDPHQLWLPKAPAAQASAATAVPSGKAAQRGKVCVLCVDGGGGGLRALLSCRALAHLEAALRRASGDPDARVADYFDLVAGTGAGGVFAAMLFSTHSRGAPLFHADDTWRLVADHAPRLFRKAVGGSTSLFCRPKKRPLAAPTAALDAAMKTAFGEELTLRDTIKPVLISCYDLKSSAPLVFSRADALESESYDFRLCEVGRAAWSEAGRFEPAEVASVDGATSC

SEQ ID NO: 113182 - protein, 106 aa, Oryza sativa
  unsure (1)..(106): unsure at all Xaa locations
  Clone ID: PAT_MRT4530_16995C.1.pep
SFLATGRHLGEICMSEDAKHVKTNLRLLTNLAXXXADTQQDRRTALDINIRXXXPPTAGVLITGASARALPGIQKYRVRKLETLKPHQGGREGVRPPPGEDEAEAG

SEQ ID NO: 113183 - protein, 51 aa, Oryza sativa
  Clone ID: PAT_MRT4530_16996C.1.pep
MFYGWHVCLSCCLGRFSDYERLEHLSSCSARCVRYLRQYVYTRRAVKSFQI

SEQ ID NO: 113184 - protein, 508 aa, Oryza sativa
  Clone ID: PAT_MRT4530_16997C.1.pep
MDLKRVLEVEEEVVDGDEDELASPEAKRRRTFINNSSMQEAIGAQYMQRHLPKLEPFLRRVVQEEVQNVLIRHIDSAHRLPLQLKTSSKRYKLQFQGNLPLTLFTGNRVEGENKQPLRIVLTDAVSNQTITSGPLSSMKVELLVLDGDFNADERLEYTEKEFSESIVFEREGKRPLLSGEVIIVLEKGVASIRDISFTDNSSWIRSRKFRLGARISRASSIEERVQEAVSNPFLVKDHRGEVYKKHHPPALADDVWRLEKIGKDGVFHKKLADFGIHTVQDFLRNLVMDQYGLRSLLGSGMSNKMWEATVEHARECVLDDKLYSYCSGHGIILLFNCIHEVVGVIVGSHCFTLNALTPTQKALVVKLQQDAYKFPNRIVEFKVQSQCTSQSSPTTIQSQSVQMPASENAQILNLPQGAHCFPSGELPSSSQDCLLNPLQYQPLNEALEDVLQTAGGSHHQHQGGSGELPWIASSFGAGGFVDARDPFDVQFSGSQPCGLLLSSSGARL

SEQ ID NO: 113185 - protein, 54 aa, Oryza sativa
  Clone ID: PAT_MRT4530_16998C.1.pep
LIFFFSYKRVYNSTTPKIRLPLLVCYPSEGGFHPWCAQHHNQPDIHSITISHQL

SEQ ID NO: 113186 - protein, 94 aa, Oryza sativa
  Clone ID: PAT_MRT4530_16999C.1.pep
MQAGRQARTSQRETDASLLSHDAAVARDGATGEARAVWAGQRKILLLGRKMKKKTKTKTKTKKKKKGMACVGVGGEGEQSACDAAAATAAVCYF

SEQ ID NO: 113187 - protein, 1312 aa, Oryza sativa
  unsure (1)..(1312): unsure at all Xaa locations
  Clone ID: PAT_MRT4530_1699C.1.pep
MSNEVNHVGKAPMFNGTNYSTWKIKMSTHLKAMSFHIWSIVDVGFAITGTPLTEIDHRNLQLNAQAMNALFNCLSQEEFDRVSNLETAYEIWNKLAEIHEGTSEYKDAKLHFLKIQYETFSMLNVIVNDLKGLGANYTVLEVAQKMLRALPEKYETLVTMLINSDMSRMTPASLLGKINTNDMYKLKKKEMEEASPSKKCIALQAEVEDKGKGKVNEANENLEEEIALLARMFNDLLGRRKERGRGSNSNRRRNRRPNKTLSNLRCFECDSNEESSASSGSEEEDGDDASSKKKKMAVVAIKEAPSLFAPLCLMAKGSSKVTSLSDSESDDDCDDVSYDELVSMFEELHAYSEKEIVKFKALKKDHASLKVLYEELKTSHERLTISHEKLKEAHDNLLSTTQHGALIDVGISCDLLDDSATCHIAHVASSSISTSCDDLVDMSSSSSSSCVSICDASLVVENNELKEKAHDGGIVARYMGSPILDGIKNAIWVPKALVSNLQGSKQVWVNYHTGRSHWVLHSGCTQHMTGDRAMFTIFEIGENEQEKVTFGDNSKGKVNYHTGGSHWVLHSGCTQHMTGDRAMFTTFEIGENEQEKVTFGDNSKGKSIVAELFKKFAKRAQNEFSCTLVKIRSDNGSEFKNTNIEDYCDDLGIKHKLSATYSPQQNGIVERKNRTLIEMARTMLDEYGVSDSFWAEAINTACHATNRLYLHRLLKKTSYELIVGRKPNVAYFRVFGCKCYIYRKGVGLTKFESRCDEGFLLGYASNNKAYRVYNKNKGIVEETTDVQFDDTNGSQEGHENLDDVGDEGLMRAMKNMSIGDVKPIEVEDKPSTSTQDEPSTSATPSQAQVEVEEEKAQDPPMPPRIHTALSKDHPIDQVLGDISKGVQTRSRVASICEHYSFVSCLEPKHVDEALCDPDWMNAMHEELNNFARNKVWTFVERPRDHNVIGTKWVFRNKQDENGLVVRNKARLVAQGFTQVEGLDFGETFAPVARLEAIRILLAFASCFDIKLFQMDVKSAFLNGEIAELVFVEQLPGFEDPKNPNHVYKLSKALYGLKQAPRAWYERLRDFLLSKVFKIGKVDTTLFTKIIGDDFFVCQIYVDDIIFGFTNEVFCKKFGDMMSRKFEMSMIGELSFFLGLQIKQLKDGTFVSQTKYIKDLLKRFSLEDAKPIKTPMTTNGHLDLHEGGKPVDLKLYRSMIGSLLYLTASRPDIMFSVCMCARFQAAPKECHLVAVKRILRYLKHSSTIGLWYPKGAKFKFVGYSNSDYAGCKVDRKSTSGSCQMLGRSLVSWSSKKQNSVXPLYRRGGICFGR

SEQ ID NO: 113188 - protein, 66 aa, Oryza sativa
  Clone ID: PAT_MRT4530_169C.1.pep
LVIILRLKKLTAGLLLPHISYHARQYGTNFSHVLCTCVLLIFTTMSYYTCMASVEKDIYRGGSNST

SEQ ID NO: 113189 - protein, 129 aa, Oryza sativa
  Clone ID: PAT_MRT4530_16C.1.pep
MEEEDESDGGSHVQMGKMMENLTAITCTRHCLLHAWRSVVPEVAKVVYQGDHDCHSNRFAKIRRRHRHCSVSACDGFVHFLVSYSVIYETYTVTFSISSNRRLLLVVASSMVHQFPDGSPQLGPVQSAM

SEQ ID NO: 113190 - protein, 580 aa, Oryza sativa
  Clone ID: PAT_MRT4530_17000C.1.pep
MAMEAADEERAPLLQPQPQPSRGDADSEYTGDGSVDVNNQPALKRSTGNWRACFMILGVEFSENLAYYGISKNLVTYLTKILHESKVNAARNSSAWSGACYLTPLFGAFLADTYWGKYRTVLTFLPIYILGLLTLMASTSLPSSMTSSDAGHQLHSVAVYLGLYLVAFGNGGVKPCTSAFGADQFDGGDAAELRRKGSFFNWYTFMINSGSLLASTVLVWLQDNVGWGISFVIVVVVMAFFLAVFFAGSRVYRYRPVRGSPLTGVCQVVVAAVRKWHLELPDDSSLLYEAQVADHRIKHTDQFRFLDKAAIVVTPSSLSGEKGNVAAAAAPVSRWRQCTVTQVEEVKMLVRMCPIWACLVLFFSVSSQMSSTLVEQGTAMDNRVGPFTIPPASLATFHSIGVLLWIPVYDVALVPLARRATGKPKGITQLQRIGVGLAVAALIMAYSALVEERRLAAARAGAARTSILWQVPAQLMHGMAVVFTSIGKSEFFYDQAPRSMRSMCTALGQLAIAAGNYLSAFLLAVVASATTRGGDPGWIPDDLNKGHLDYFFWLMAALLLLDLLLFVFCAMRYKGSTAAS

SEQ ID NO: 113191 - protein, 83 aa, Oryza sativa
  Clone ID: PAT_MRT4530_17001C.1.pep
HASALDKVDHRNLLPGQGWYWSKDEKLLVCNYLPAGRLSATLHGSRGTGRRTMDWDARMRSALSAARGISHLHAASHAFSPQP

SEQ ID NO: 113192 - protein, 111 aa, Oryza sativa
  Clone ID: PAT_MRT4530_17002C.1.pep
MTLHAFYSIKLHYRKGVGHLGEKDPAGERALTPASPGVHKAANVERQLRKNERWHGVSQALGQSDGMPATRGDGAPLRLDVAGSGALVASVALRFAATPPPHAMGARELPN

SEQ ID NO: 113193 - protein, 86 aa, Oryza sativa
  unsure (1)..(86): unsure at all Xaa locations
  Clone ID: PAT_MRT4530_17003C.1.pep
GSYVFPGSPGCGPVGKVGPPPMCNFPNIENMCDNVWEKLAPFPXTGMDPEKKAGIGPFHVQGFFGRPCGWVYASPPLVEPIPFLDP

SEQ ID NO: 113194 - protein, 100 aa, Oryza sativa
  Clone ID: PAT_MRT4530_17004C.1.pep
MFGVCLLGPLLQRQHFFPPFQWVQHPLSFSTLMMLALLCFGLMYAFPAAAHSSVCVSVLFCFKPRKSIKIVKQKKKKDKKKKKKKKKKKKKKTKKKKKTK

SEQ ID NO: 113195 - protein, 67 aa, Oryza sativa
  unsure (1)..(67): unsure at all Xaa locations
  Clone ID: PAT_MRT4530_17005C.1.pep
NWGNRPXGFSPSSTGPFVKXRPXPKLKXXXLXTGPPLXKGXGNXGXPGAPPPSKXSEPXRXSRTXVL

SEQ ID NO: 113196 - protein, 235 aa, Oryza sativa
  Clone ID: PAT_MRT4530_17006C.1.pep
MNRKYLGKRTGEERRSQPPSNLTMIWDRCITTVDEASVDHITTDKSAPNLILHHIEPPRRVRARLRDSIRPIRSHLRSQRIFRSLRSPVRERDRTCVLGSRDRLTLLAATAAFFFGGTLQRTRLARAADHQHHTKCGVFFFSAANRPKSESRSRACTTSTPFLTAPPNPNLLTLLRVDTVVLLDLPLTGNTRRTHHVGIVKSTGTVLEGRLGLSTLNSRFAEEKNLTLNSRVSLV

SEQ ID NO: 113197 - protein, 260 aa, Oryza sativa
  Clone ID: PAT_MRT4530_17007C.1.pep
MGRGKIEIKRIENATNRQVTFSKRRGGLLKKANELAVLCDARVGVVIFSSTGKMFEYCSPTCSLRELIEHYQTVTNTHFEEINHDQQIFVEMTRMRNEMEKLDGGIRRFTGDDLSNLTLADINDLEQQLEFSVTKVRARKHQLLNQQLDNLRRKEHILEDQNSFLCRMINENHHQAAVGGGDVKAMVEMAPVLSMLTAAPAYYGEESSSTALQLTPPLHAVDAAAAAGFRLQPTQPNLQDPGCSSSSFHAAAAGHGLQLW

SEQ ID NO: 113198 - protein, 164 aa, Oryza sativa
  Clone ID: PAT_MRT4530_17008C.1.pep
MSRANASRPPPPPPPASGSGGRLAVLVSHLSQSSRTAGEKEAALAAGPSDGPTIFDKILRKEIPSQVVYEDEKTLAFRDISPQAPVHIIIIPKVKDGLSRLSKAEERHVEVMGHLLYAAKTIAKQENLHEGFRIVINDGPNGCQSVYHLHIHLLGGRQMNWPPG

SEQ ID NO: 113199 - protein, 64 aa, Oryza sativa
  unsure (1)..(64): unsure at all Xaa locations
  Clone ID: PAT_MRT4530_17009C.1.pep
PLSMTSLLPRRLFHAPSIKDCXGXXXARXNXIPXXXXXAKXXGKXXXXXNVNGDWNXXXLIPQS

SEQ ID NO: 113200 - protein, 450 aa, Oryza sativa
  Clone ID: PAT_MRT4530_1700C.1.pep
MLINFLGSVWLQLTSSAEFAEKGVCGLNLKSCSGFMLKTTPKVGCPSLRVRASVSSPQKLYSSKTTQVKSGEEVQIAVLGASGYTGAEIVRLLANHPQFHIKVMTADRKASEQFGSVFPHLITQDLPNLVAIKDADFSNVDAVFCCLPHGTTQEIIKGLPKQLKIVDLSADFRLRDINEYAEWYGHAHRAPELQQEAVYGLTEVLRDEIRNARLVANPGCYPTSIQLPLVPLIKAKLIKLSNIIIDAKSGSIKWLQNVYLYLAICPPSAFKLALLTHCNKTVLAPEIEQGLSEAAKSKVTISFTPNLICKKRGMQSTIFAEMAHGVTAVDLYQHLKSTYESEEFVKLLHGSTVAHTRHVVGSNYCFMNVFEDRIPGRAIIISVVCVFNHLYAHCQTSFFRLKDAKFLFSCSSTPQIDNLVKGASGQAVQNLNLMMGLPENRGLQYQPLFP

SEQ ID NO: 113201 - protein, 584 aa, Oryza sativa
  Clone ID: PAT_MRT4530_17010C.1.pep
MGDVFMTPNYNIVATKASPDNINFNEYMVVNSTIGQIKVMVEATAVQHMEMAPTISAAGTSSSKTPQARSSYRNTHSDLREKIDSNRRLNANLRNVLNEWRRQRDTEQLCIHNIDEQAGRRHVERMPDGHIDDRPMHDYIDLSPDPRHRRDDTVKGIPTFTEPLRWVQWPTNVKPMGIDKAWLTGLPEYTINSWAELKARFIANFQGTFPHPSTHCDLYPITQGDGERFTDYIHRFKERRNTIPYVKDTEVMAAFHQGCKNEDFIKWWPRKTSLSASSAISVQQMFDRANKDANSELVEYAQIKKRSSYQSRRDNADSNRNKPPKRKSKQEVNVAKHSNSQRRFKPPKSDNINKFMDGPCLYDPNSKHNNSTRTSPPCQRRHTTQRKTMTSPGVRLKRVLVDRGSALNIQFSKTFKDMGLSQSLLQPSKSPFHGVIPGTSSTPLGQVTLQVTFCKPDNFRTESVVFEVANFETAYHAIFGRPAMAKFMVVPHYAYAMMKMPSPNSIISLRADIRQFFVCDKESCDMAQSLEAIKRLSPTTHWQNQPATLSCLLPKLPRSPSTHLMLDSATPTKTATIGVGLSTK

SEQ ID NO: 113202 - protein, 144 aa, Oryza sativa
  Clone ID: PAT_MRT4530_17011C.1.pep
ARNTTHYRANWVPGPPSGRAHPAAHPASHSSERAPPRPPRLFLPSLCAIVASPSSYCRCAGAALLASGSSHPEEGRVTRPSSHRCPLLPSHLQTTTAFLFLSLSSVSYRSGLGSLESMVSASPLVDPITGIIGELQVRFGGQRN

SEQ ID NO: 113203 - protein, 337 aa, Oryza sativa
  unsure (1)..(337): unsure at all Xaa locations
  Clone ID: PAT_MRT4530_17012C.1.pep
MFELLFLLLPIAALYGWYIGRLSVKKEQESINNKFSRDYVTGLNFLLSNQQEKAVDLFLSMLQKQESENQIATESQFEAELTLGNLFRSRGEVDRALRIHQALDSSLNYSIEQKLLAKQQLAKDFMAAGFYDRAENYYILLLDEPEFAVNSLTQLMVLYQKTNEWKKAINVAEKLLKIDPKTDRIPLSHYYCEYAQAIKSEDEDLYLRLLGKALEYSPLCTRASMLLGDYYLAQGQFSQALTHFEHILVKXPDYISEVLHNIKTCHAALHDFINYELFLIRSIQVKHNSSVDIALAELIEQKDGLIAAHFKLYQQLSKYPSMLIFHRFIYYQINEAG

SEQ ID NO: 113204 - protein, 86 aa, Oryza sativa
  Clone ID: PAT_MRT4530_17013C.1.pep
LLFTFLPQQNYFHYIAHQTSISFPSSHLSHFPKLLPLDHACHICLWLSNIVKGFPSSHLSHFPIIYFSSLAKLLPLDHACHICVAF

SEQ ID NO: 113205 - protein, 719 aa, Oryza sativa
  Clone ID: PAT_MRT4530_17014C.1.pep
MATPRAPPQAAVPGGGAGATAGGVTMRMFHGDVFLGEAEVFPMKQGAEGSLPFPSNEIRISHLSPTSERCPPLAILQTIAPFSVRCKLQAKLMPPHPSLHRLYLTCFNEYKSAVVVVVDEELHLVAMLSKVEKVPCFWCCSVRSGIYAASVGMLNLRCLAIVFDLDETLIVANTMKSFEDRIEMLSRRMDIEDDPVRIAGMSAEIKRYIEDRELLKEFIDTDTVTDNGRIVGTQKEEVLPISGGQERVLRPVIRLPERNAILTRINPEVRDTSVFVKLRPAWEDLRSYLTAKGRKRFEVYVCTMAERDYALEMWRLLDPEANLISSHNLAERVVCVKSGSKKCLQNVFKDKGCHPKMAMVIDDRLQVWDEKDQPRVHVVPAYTPYYAPQAEMANAVPVLCVARNVACNVRGGFFREFDENLLRKVFELMYENELLDLPYAPDVGDYLVCEDTNFAPNNKDVAPIPEGMSGAEVGKRLNGLAYPRDQKQIPSSTRLSDDDGVALRGIPGGTNIQSNGGSLATTPSLFVTVLQEIGRLCESRVEFRSTVLFSNEKIGIGIGKTRDEAQVLAAEKALQNLESNYLSFMAPVAGVLNKDVNKPPGSGNGFLEDITLSEDISMEEPSGSTLKEQDHSKALDRLSSVISLIRELCLEDQHAELGGQILGRGIDLNKDFAKLQAAEEALKTLKTTTDPQIKKHLRPMQQLNFPLYPTEVSLIMLKC

SEQ ID NO: 113206 - protein, 126 aa, Oryza sativa
  Clone ID: PAT_MRT4530_17015C.1.pep
MSSLLLSLLSVPLSQSPLLCSLQEKTGAVAREVGRATAARAAAREAGEAAAKSPRESRSSGEAVATAAGPATRRWVKTRQSCCASPCTKTTGSSSCSGAMATSSCRVRRPEAAEAGEDGDGGDGGG

SEQ ID NO: 113207 - protein, 758 aa, Oryza sativa
  Clone ID: PAT_MRT4530_17016C.1.pep
MGGMNRIGIRERETRGGSLIGIVVVGAAAAAHTAHQPSSRGRADSPRMMRASLLAPLELSADLTPPLPSARHFASRLTNCFFKALMVNASSLKVLQHLQPSPFSEKLVGILREEFVKTLFVRRDIRRLRESLKYFDSVREDADALALENRVTGTWWSDVKDVMYDVDDIVDFLRAHSYKQRCCDRVLFSRLAQLPLDYRIARRIKYVNERLVQITMNSKMFVPLAMRSPQTLQRNGVSRYVAALVDELDVVGREIKETTDDMVQMIIGCGHQSTISVYGILGMGGIGKTTLAQKIYNDRRIRERFHHVLIWLSISESISETDLLKEAIEKAGGQSYQGKSFVKKEGSRPIQEVAEDYYHELIMRNLLQARPEYIDKGISTMHDLLRLLGQYLTRDVAVFMDEDETPPNVRRLAVGNAVEEIPGIQDQKNLRCLLVYHHDACRSVKRDIYRKLEHLRILILVGAGLQSIPESVGHLVLLRLLDVSCNEEIKQLPGSIGNLTCLEHLSVSGCEKLASLPASLMTLSTISFLNIGGTALTPSSQRDRYEDSEVKNIEEIYNKLCPSRKLQYIFIDGFPGQLPMLQVLHVKGADAVVSIGHELFGKGVVSPTHTIIFPKLELLEIVDMYLQLINCPKLRALPEDLHRIVNLRRVLIEGVHSLQEIVYHPGIVWLKAEELSSLKTLYMVDCPMEQMFWDCFSKEQQSMMTHRKKTLRSRRNYREVARIDVEEVVDRTGSTFSSSGRCRTSRQRDACGDFVNCK

SEQ ID NO: 113208 - protein, 121 aa, Oryza sativa
  Clone ID: PAT_MRT4530_17017C.1.pep
MAGGEDVLVVAPGGGRDALLLVAQESAWRNSDGAGDGDDDDYGMLNFRPGLDGGDDDDGFPYETITMWLVVVFLAMCLYGLTKLVLAYVPASWIIIHRGFLIDPARAHYCCFELLRTGKLY

SEQ ID NO: 113209 - protein, 930 aa, Oryza sativa
  Clone ID: PAT_MRT4530_17018C.1.pep
MELGAWELDSMAPGAHASLNSDQEETSSEYVTTIKRGRSNPRQLQALMVNASSLKVLQHLQPSPFSEKLVGILREEFVKTLFVRRDIRRLRESLKYFDSVREDADALALENRVTGTWWSDVKDVMYDVDDIVDFLRAHSYKQRCCDRVLFSRLAQLPLDYRIARRIKYVNERLVQITMNSKMFVPLAMRSPQTLQRNGVSRYVAALVDELDVVGREIKETTDDMVQMIIGCGHQSTISVYGILGMGGIGKTTLAQKIYNDRRIRERFHHVLIWLSISESISETDLLKEAIEKAGGQSYQGKSKDQLLQALLNCITGQSIFLVLDNMTSSHIWIDLLRSPIERCADAHIVKKCDGLPLAIKAVAGVLSSKATKEEWARVLESRWCYEGLPEEIQGPLYLSYNDLSPQLKSCFLWCALMPQNFHIHRDVTYFWIAEGFVKKEGSRPIQEVAEDYYHELIMRNLLQARPEYIDKGISTMHDLLRLLGQYLTRDVAVFMDEDETPPNVRRLAVGNAVEEIPGIQDQKNLRCLLVYHHDACRSVKRDIYRKLEHLRILILVGAGLQSIPESVGHLVLLRLLDVSCNEEIKQLPGSIGNLTCLEHLSVSGCEKLASLPASLMTLSTISFLNIVFQDGTGGFRLDELDSLSKIRRLLLIKLEKASPPASPVLCNKRHLKELGLTCTMGEEADCRTSYEDSEVKNIEEIYNKLCPSRKLQYIFIDGFPELPPAGQLPMLQVLHVKGADAVVSIGHELFGKGVVSPTHTIIFPKLELLEIVDMYNWQSWSVSTESLSDGTSETISRSVFLMPCIRYLQLINCPKLRALPEDLHRIVNLRRVLIEGVHSLQEIVYHPGIVWLKVKNNKSLRRISNLSKLQLLLAQDCSELQQAEELSSLKTLYMVDCPMEQMFWDCFSKEQQSMMTHVVVGIRVGYDSIN

SEQ ID NO: 113210 - protein, 149 aa, Oryza sativa
  Clone ID: PAT_MRT4530_17019C.1.pep
PRPNLRAPASPEPAAAAPIVIVAVDIGVVTRGDEGRGVDTCSGEGGGVDAHGCEGGAEDARRRRPRRRGCPQQPSSRSQRPWQRQAAHSSQAGSECPRSLPSQPLHSSTAQSTSPSTSAWSAQRRRGRRRGRPRLRRRWRGRPGSPLPL

SEQ ID NO: 113211 - protein, 1692 aa, Oryza sativa
  unsure (1)..(1692): unsure at all Xaa locations
  Clone ID: PAT_MRT4530_1701C.1.pep
MSNKVNHVGKAPMFNGTNYSXWKIKISTHLKAMSFHIWSIVDVGFAITGTPLTEIDHRNLQLNAQAMNALFNSLSQEEFDRVSNLETAYEIWNKLAEIHEGTSEYKDAKLHFLKIQYETFSMLPHENVNDMYGRLNVIVNDLKGLGANYTDLEVAQKMLRALPEKYETLVTMLINSDMSRMTPASLLGKINTNDMYKLKKKEMEEASPSKKCIALQAEVEDKSKSKVNEVNEDLEEEMILLARRFNDLLGRRKERGRGSNSNRRRNRRPNKTLSNLRCFECSEKGHFASKCPSKDDDGDKSSKKKSGGYKLMKKLKKEGKKIEAFIGEWDSNEESSASSGSEEEGGDDASSKKKKMVVVAIKEAPSLFAPICLMAKGSSKVTSLSDSESDDDCDDVSYDELVSMFEELYAYSEKDIVKFKALKKDHASLEVLYEXLKISHERLTISHEKLKEAHDNLLSTTQHGAHIDVGISCDLLDDSATCHIAHVASSSISTSCDDLMYMPSPCSSSSSCVSICDASLVVENNELKEQVAKLNKSLERCFKGKNTLDKILSEQRCILNKEGLGFIPKKGKKPSHHATRFVKRNGKYCYKCREVGHLVSDCPEGKPPKTCMFDSHYMLSKAHDGSIVARYVGSPILGGKKNAIWVPKALVSNLQGLKQVWIILAILGXFFLHDKSIVAELFKKFAKRAQNEFSCTLVKIRSDNGSEFKNTNIEDYCDDLGIKHELSATYSPQQNGVVERKNRTLIEMARTMLDEYGVSDSFWAEAINTACHATNRLYLHRLLKKTSYELIVVRKPNVAYFRVFGCKCYIYRKGVRLTKFESRCDEGFLLGYASNSKAYQVYNKNKGDEGLMRAMKNMSIGDVKPIEVDDEPSTSASSSQAQVEVEEEKAQDPPMPPRIHTALSKDHPIDQVLGDISKGVQTRSHVASICEHYSFVSCLEPKHVDEALCDPDWMNAMHEELNNFARNKVLTLVERPRDHNVIGTKWIFRNKQDENGLVVRNKARLVAQGFTQVEGLDFGETFAPVARLEAIRILLAFASCFDIKLFQMDVKSAFLNGEIAXLVFVEQPPGFEDPKNPNHVYKLSKALYGLKQAPRXWYERLRDFLLSKDFKIGKVDTTLFTKIIGDDFFVCQIYVDDIIFGFTNEVFCKEFGDMMSREFEMSMIGELSFFLGLQIKQLKDGTFVSQTKYIKDLLKRFGLEDARPIKTPMATNGHLDLDEGGKPVDLKLYRSMIGSLLYLTASRPDIMFSVCMCARFQAVPKECHLVAYPKGAKFKLVGYSDSNYVGCKVDRKSTSGSCQMLAMPPRTRHGRRAPTPDPVSENEESSGDEYVQSDEDNMENVEGDEMEVSDDGDDNESGNGEDDEASDDGSPFDSSIQFVLNLRNAQQYAILHHHDQFRRPNDCNDPRFHTRFQKSVYVQVYAKKAFTEHKWISWRHIGETPEFENVQEMFRTVGIDRIVTMKQPFDEDLIRQFYATVWVSGDCDAMKWMSGTLRCSINRREFKELLHIRFNNGDDLHDEHTHNPFPIDHFSQFYEEGGRHTYGKVAGLRALPSVINRIVRATILPRCGNNDDIRGVAWHVIDAIMDGRRFDVINFMMKEITISKGTIGQGIYYAPYIMRLPPPRRLVEELPGDLSEKIVEEARHRFVSGLEFTTFGVKEELPRVIEAWVVLSVGRLPPCPPLDEGGVRWLRG

SEQ ID NO: 113212 - protein, 330 aa, Oryza sativa
  Clone ID: PAT_MRT4530_17020C.1.pep
MNNLFSSSWKRTGGGGGGDGDIESGGGVEMAPPPGAAAGASLDRFFEDVESIKDELRDLERIQRSLHDANEGGKSLHDAAAVRALRARMDADVAAAIKKAKVVKLRLESLDRANAANRSVPGCGPGSSTDRTRTSVVAGLRKKLRDSMESFSSLRARISSEYRETVARRYYTVTGEQPDEATLDNLAETGEGERFLQRAIAEQGRGEVLGVVAEIQERHGAVAELERSLLELHQVFNDMAVLVAAQGEQLDDIETHVGRARSFVDRGREQLVVARKHQKSTRKWTCIAIIILLVLILVVVLPIVLKFVNNNKSSSSSPAPATPSPPPPTA

SEQ ID NO: 113213 - protein, 165 aa, Oryza sativa
  Clone ID: PAT_MRT4530_17021C.1.pep
SPTRKFSPRFGGTPPPSTPRPLPPAPSSPPSSPHGAPALRQRRISSSALPPTASDVSAPAPPRPTTAATSTARTPTPPMRTRTLPYPATSGLLRFGVPCTVPNRFHPSSRTTNPTRPDGTQQCTTKTSPDTAERTCRREWTTEAAASAATTAYREQICPATEIRT

SEQ ID NO: 113214 - protein, 37 aa, Oryza sativa
  Clone ID: PAT_MRT4530_17022C.1.pep
MGSYLLLKSGLEQKELEGLINVIFNYFFIQSLFNGWI

SEQ ID NO: 113215 - protein, 132 aa, Oryza sativa
  Clone ID: PAT_MRT4530_17023C.1.pep
ERDRDRERRSCLAPRTPSAVEPNVRTQCLNLAGRRQLFQLSLAATRVAYREPGISPFFPLSFAFQLPNLLHPCQYAMHSLLSTLQCSSHTHTPMLDSKPRTLGEEKRRQQQLLYMYINTTTTTPPKPRAQLA

SEQ ID NO: 113216 - protein, 63 aa, Oryza sativa
  Clone ID: PAT_MRT4530_17024C.1.pep
LSAFVLAAFFLQQCRVVSSVQQPWLHLCDLCPCSCPVICTEGHRVPVFIVARRRDCSRRICAS

SEQ ID NO: 113217 - protein, 917 aa, Oryza sativa
  Clone ID: PAT_MRT4530_17025C.1.pep
MHTRGASSDVLRASISSAPSTSSHGSAQDDCDSLGDVYVWGEVFCENSVRVGSDTIIRSTEKTDFLLPKPLESRLVLDVYHVDCGVRHAALVTRNGDVFTWGEDSGGRLGHGTREDSVHPRLVESLAACNVDFVACGEFHTCAVTTTGELYTWGDGTHNVGLLGHGTDAGHWIPKRISGALDGLPVAYVSCGTWHTALITSMGQLFTFGDGSFGVLGHGNLTSISCPKEVESLSGLKTIAVACGVWHTAAIVEVIVTHSSSSVSAGKLFTWGDGDKHRLGHGDKESRLKPTCVASLIDYDFYRVACGHSLTVCLTTSGKVLSMGNSVYGQLGNPNSDGRLPCLVEDRIAGEHVLQVACGSYHVAVLTGRSEVFTWGKGANGRLGHGDIEDRKVPTQVEALKDRAVRHIACGANFTAAICLHKWVSGADQSQCSSCQQPFGFTRKRHNCYNCGLVHCNACTSRKALRAALAPNPGKPYRVCDSCFLKLKNALDSDSFNKRKDIVSHLAGESNGDTKASKTILSSNMDIIRSLDSKAARQGKKTDALSFLRTPQVSSLLQLRDIALSGSADMNRSVPRAVRTSAVRSVTTSRAVSPFSRKSSPPRSTTPVPTTHGLSFSKSATDNLAKTNELLNQEIDRLHAQVDNLRHRCEHQEVELHKSAKKVQEAMTLVAEESAKSKAAKEVIKSLTAQLKDMAERIPPEQGTYDVSEAKPVHVPNGIDSHIAIYSSINVAHQPQNELLNASNAQSLNSGRSLHPNGISSQHRLLGNATEASEGSAQSHRITSPCKLDVPHRRAHSNSDDMLTASHRGDDNVSIDAMSLQNGEDGYKPRGTVSSISSSQVQAEWIEQYEPGVYITLTTLLDGTRDLKRVRFSRRRFGEHQAEKWWNENREKVYERYNVRSSERVSSSSAASTRSAY

SEQ ID NO: 113218 - protein, 84 aa, Oryza sativa
  Clone ID: PAT_MRT4530_17026C.1.pep
MEIGLVQVERDGPWWVQSLSYQATRPKEEWAAGLSEADHKAEQDGQLAQLRLTLLVHKFHVKVSYEKFSNENFQMKVLQIKAFR

SEQ ID NO: 113219 - protein, 1239 aa, Oryza sativa
  Clone ID: PAT_MRT4530_17027C.1.pep
MAGGGGGGGDGGGGAGAGGGGGGGAKRVPMRRLFTFADRLDAALMAVGGVAAVANGVAMPFLAFLIGELVDAFGAADRAHVVHVVSKISLRFTYVAIGSGIAGFLQVSCWMVTGERQAARIRGLYLEAILRQDITFFDLETSTGEVTERMSSDTVLIQDAIGEKVAMSIAISKLANRSQLAYAEAGKLVEQTIGSIRTVVSFTGERRATDKYNEFLKISYRSAVHQGAAMGLGIGSVMFIVFCSYGLAVWYGAKLIIEKGYTGGYIINVLMAIMSGAMALGQSSPCLNAFASGQIAAYKMFATINREPEIDASDRSGLVLENFVGDVEFKDVHFSYPARPEQLIFTGFSISIPSGMTMALVGESGSGKSTVISLVERFYDPQSGEVLLDGVNMKLLNLSRIRQKIGLVSQEPILFTTTIRENIEYGKKDASEEEIRRAIVLANAAKFIDKLPNGLDTMVGEHGTQLSGGQKQRIAIARAILKDPRILLLDEATSALDAESEHVVQDALNNIMVNRTTIIVAHRLSTVRNADTISVLHRGQLVEQGPHAELIKYSNGAYYQLLQLQEVNARRNGTYELDPNRLSDVANRLSDVANRLSDAANRLSDAGNFVSRHSIRKLSFERSMSRHSSLGGSRRNSQTYALTEDEIEGCDDTKSGKNVLRRLLHLHKPETAILLLGCIAASANGAILPVFGLLLSSAINAFYEPPHKLRKDSVFWAEIYVILGVVSIFIIPVQHTLFNMAGGKLIERIRALSFSRVVYQDIGWFDDPLNSSGAIGARLSADAASVKSIAGDVLSLIVQSISTALVGIVIAMIANWKLAFIVLCFVPCVFAQSYAQSRLMRGFGADAKEMYEQASTIASDAISNIRTVTSFCVGEKIIESYRNKCKGPVKKGVRQGAISGVGYGFSFALLFCFYAVSFYVGARFVHNGTADVGEVFKVFFALTMMAVGVSQSSSLARDFSKVQDAAASIFKIIDRKSKIDASSDDGMAPEKIEGNIEFQHVSFKYPARTDVQIFTNLCLRIPSGKTVALVGESGSGKSTVVALLERFYDPDSGAIFLDGMDLKTLKLTWLRQQIGLVGQEPVLFNGTIRANIAYGKQDQVSEEEIVAVAEAANAHRFISSLPHGYDTSVGERGVQLSGGQKQRIAIARAILKDPKVLLLDEATSALDSESERIVQEALDRVMVGRTTVIVAHRLSTITGADKIAVIKNGVVAEEGRHGRLLRLPGGAYASLVALQSSSS

SEQ ID NO: 113220 - protein, 729 aa, Oryza sativa
  Clone ID: PAT_MRT4530_17028C.1.pep
MDAPFLTTSLAVLAILFLLALPWSAATHDILPLKSSLFVEEYETNILQSSDGTFSCGFYNITKAYNITSAFTFSIWYSNSADKAIVWSANRGRPVHSRRSEITLRKDGNIVLTDYDGTVVWQTDDPDYLYYENNRNLYNSTRIGSLDDYGEFFSSDLAKHQARVASDRSLGIKRRLTLDYDGNLRLYSLNNSDGTWTISWIAQPQTCMTHGLCGPYGICHYSPTPRCSCPPGYKMRNPGNWTQGCKPIVEIACDGKQNVTFLQLRNTDFWGSDQQHIEKVPWEVCWNTCISDCTCKEFQYQEGNGTCYPKSFLFNGRTFPTPFVRTMYIKLPSSLDVSKKPIPQSSIHDYTPSRLDCDRVNTITTEAVRNMNKIGGEEPKWFYFYGFIGVFFIVEVFFFAFAWFLVLRKEMWSSEVWAAEEGYRVMTSHFRMYSYRELVKATERFKHELGWGGSGVVYKGILDDDRAVVIKKLENVTRNREEFQDELHVISRINHMNLVRIYCFCSERFHRLLVLEYVENGSLANVLFNSKILLDWKQRFNIALGVAKGLAYLHHECLEWVIHCNLKPENILLDENLEPKIADFGLAKLLSRSGSKQNVSRARGTIGYIAPEWISGLPITAKVDVYSYGVVLLELVSGKRVFDLIIGEDKTKVHEMLKKFIKMICYRLDNEKSLWLAEFVDFRVGDEFNYLQAKTLVKLAVSCLEEDRKKRPRMESIVESLLSVDLATS

SEQ ID NO: 113221 - protein, 317 aa, Oryza sativa
  unsure (1)..(317): unsure at all Xaa locations
  Clone ID: PAT_MRT4530_17029C.1.pep
MVAPSPDAGKPLVILPRPLYPEFAAALDGRFRFVLAADADEGNAAEARAVLVPALTPVSADLVARLPKLEIVVATSTGVDHIDLDACRRRGISVTNAGEVFAPDVADYAVGLLVAVLRRVAAADAYVRRGAWXPAAGDYPLASKVSGKRVGIVGLGSIGGLVARRLAAFGCVIAYNSRSPKASAPYKFYPSVRELAAESDVLVLSCALTEETRRMVGREVMEALGKGGVLVNVGRGGLVDEAELVRCLREGVLGGAGLDVYENEPEVPPELWGMDNVVLSDHRAVITPESIQGVVDVVKANLDAFFSGKPLVSQVQL

SEQ ID NO: 113222 - protein, 119 aa, Oryza sativa
  unsure (1)..(119): unsure at all Xaa locations
  Clone ID: PAT_MRT4530_1702C.1.pep
TLLVNPPISVPPPPPASRARXPLAPXIRPSPLLSRHPHPVTTVSNASAAVGRPETTPLEAVAPSYKSFPISSTDPEHPSPFQLTPPAEPQAPPSGRPPRLPLPRSAMGGGGRELEIGFW

SEQ ID NO: 113223 - protein, 201 aa, Oryza sativa
  Clone ID: PAT_MRT4530_17030C.1.pep
STLEDPHWKQRFNIALGVAKGLAYLHHECLEWVIHCNLKPENILLDENLEPKITDFGLAKLLSRSGSNQNVSRARGTIGYIAPEWISGLPITAKVDVYSYGVVLLELVSGRRVFDLIVGEDKTKVHEMLKKFIKMICYRLDNEKSLWLAEFVDFRVGDEFNYLQAKTLVKLAVSCLEEDRKKRPTMESIVESLLSVDLARS

SEQ ID NO: 113224 - protein, 1043 aa, Oryza sativa
  Clone ID: PAT_MRT4530_17031C.1.pep
MAEAGPSRPAAAAAVAAGDFPELLAFCARAEALIAELLLLSDRAPSQFADRRFHPVLFDFRYFDSPGEFEARIEGNMELEALEDELRESCGSYMRRFFALLDAAVAYHDELCSYLNDLQEGLYVHCTLDGVLESNWACQLLTESMTLFGCMALLMEHRISGLLRERLLVAYLRHERCFSFPNVERICKLCRRHVTTPPSPGASGSSLHTVEIISVQKPEDLLRRFQFPELIVDAVITCLRNGDVYNNVRFYPDPQHRTTALSLQGGHMYVLLFYSRDLLHNGLAMREIVDRFFKDNWVVPIFLHFSVDLLVSWDAFKEAKSSLVSCLSPTFVRDRSLYHYTKVSSLLADLDSHMHAVNKEYVLDNSLNLLSIIRECNCTLRWLLLHRMLEFEVKELHAELLKTRKSMWYEKRHDALECMKDLSQNYLGTWAASCKLKNKSIKDWLEHLSSESWKLLTILYVSSLDYATIGNSGRIIHRVLSTLKDIELLHQIKENIQIKHGFSKIQKNLHDMIKVLNLNQESISVFSVITDDLTSEFQLSKLDSPDLQYVSTYYASKYAAKIFAVLDIIPAILLKISIDVDYINAEQSTHLINRINKETLEDLMQLDQQLCQAQQAAKLCIVSEGLLNMSKNFDGLIDLNLGGWLKQMIKKELVSQLQGKLKALSLLIYGDIEGNLMSLSNYMLSQMQRMEFLQKYPLVYTSLQLIQPCHLLQYIVHLTDPSRSMFIEAMMGWFDAGGNELLGMRFFHLLESCVGQVGLACLDSLIHVLVKQSVEHAMKDLHTLVDVKCREELNKLDDLLGPPMSIPLMGWSSYKEMVKMLHSSWGPLVEKLATIGQLQLVRNLVSFKLRSACKVRANTISSAVDILSSSVCLQNGRFETGAEDHNVRLFLNNIKDQQNFCGLLSPLQAIYISEEPPMFLTRLLCIFSISQLPKYVLDIHLGNLTNPLKKSVADFSALVIGLGTLLQQFGPSHITQYIEFMIQYIRMAEAAFNPTPVTNKGSAHSSEAPKALYWVMSFCKYMDISMDLVESCLPSSSLAILQS

SEQ ID NO: 113225 - protein, 1036 aa, Oryza sativa
  Clone ID: PAT_MRT4530_17032C.1.pep
MASIAFGQRNLRVFPLRRHIWDAVFQHGPYNCTIQRRWKKPVDSARTRQEGRTRDHKLDKLMIQLKNLRLALDLHELISQQRNGFASLQLLSRWRHEVGLNIEIGAFLKKYPHIFYIYVHPVKRNECCKVTPKMAELIAEEDAVIRENEPAIVKRLKKLLMLMKDGTLNMHALWLIRRELGLPDDYRCSILTNHQSDFSLGSPDTLTLVTRDETGFKIENGFREKLGNWQRLPYTKAYDKNDLHPIHNVGRLEKRIVGILHELLSLTVEKMIPLERLSHFRRPFGMEVNLRELILKHLGIFYISTKGSTQHVLLRESYSKGCLVDPNPVYNVFQREGALHHRLRAVLSLNYEQAAVEYSKEVRKRWDIIWKRQQMPTERELYVNNGILMSNSHDCFRFVEVDYEFGLPKTCITLTKLDCSFQANIIYSRCILGMFVLAIYSSSDHLSKTATMDAPFLSTSLAGLATLFLLALPLSAATHDILPLKSSLFVEEYETNILQSSDGTFSCGFYNITNAYNITSAFTFSIWYSNSADKAIVWSANRGRPVHSRRSEITLRKDGNIVLTDYDGTVVWQTDGKFPNVRYVQLLNTGNLVLKNSSGNIVWQSFDSPTDTLLPTQRILATTKLVSTTGLQVPSHYTFRFSDQSILSLIYDDTNVSGVYWPDPDYQYYENNRNLYNSTRIGSLDDYGEFFSSDLAKHQARVASDRSLGIKRRLTLDYDGNLRLYSLNNSDGTWTISWIAQPQTCMTHGLCGPYGICHYSPTPRCSCPPGYKMRNPGNWTQGCKPIVEIACDGKQNVTFLQLRNTDFWGSDQHCIEKVPWEVCWNTCISDCTCKGFQYQEGNGTCYPKSFLFNGRTFPTPFVRTMYIKLPSSLDVSKKPIPQSSIHDYTLSGLDCDHLNTITTEAVRNMNKIGGEEPKWFYFYGFIGVFFIVEVFFFAFAWFFVLRKEMRSSQVWIAEEGYRVMTSHFRMYSHRELVKATERFKHELGWGGSGVVYKGILDDDRAVVIKKLENVTQNREEFQDELHVISRINHMNL

SEQ ID NO: 113226 - protein, 106 aa, Oryza sativa
  Clone ID: PAT_MRT4530_17033C.1.pep
SRTSLRHRFVVPAAARSPHHARVLLPLPIARARFLSPSRARQRGPAAKRPRFLHRARARRGPAADALASSPRGRPKLPHPLRAPLLLRLPLPGDSFSTLTNEVLDG

SEQ ID NO: 113227 - protein, 51 aa, Oryza sativa
  Clone ID: PAT_MRT4530_17034C.1.pep
MTSMTSAMTSSPATTGRRKLAGELRLDDDGGAPAIFGGNGGVDEIGDGLAT

SEQ ID NO: 113228 - protein, 52 aa, Oryza sativa
  Clone ID: PAT_MRT4530_17035C.1.pep
IYPVREVSPSKLTPTCESDPFLPSAPSLLSRQEVLLTVDRPRGRRIGARQKR

SEQ ID NO: 113229 - protein, 406 aa, Oryza sativa
  Clone ID: PAT_MRT4530_17036C.1.pep
MADDGDGDCVNLEPFFYDEAATVAEAAAAAERREREEQEKAREAAANARRWAAHNAALAGIREYDPAEETYIYTRYHYADLSEFDLDEESRLPPMRHTAATYAPPARALHFLCDMINVLAVRIILPSSDRSDGGGVGFPISVYGSVIARDQLDYKCVHLFRRCRDDPQLITSEDELSLILTGPHRGLVLYDALYIEVDLKMKVKGDQQQGCKDKRLSKGLIVLDGVLLSTNLSDHLRAAVKTATLDRRSTMPCAVQVTYATIRDSIVLHDSRLLADDGIVADGSTVRLLRRVIGVCLDEVLIVTIVAQDGDLAKATNYCRQTVDFTPCVNGGDEARVVGGVGSFLVKVQFCATFTSHVYQEVVYGDQLRFIHPECFAFLLGFDKLYQQIQDFIPKASLKFDLLLLD

SEQ ID NO: 113230 - protein, 98 aa, Oryza sativa
  unsure (1)..(98): unsure at all Xaa locations
  Clone ID: PAT_MRT4530_17037C.1.pep
LPATRXPWLHTHRRRELLDXPQXLRVPAPHAIQTXAQGAPXXCRNPRRRAIXPAPQLTGARDXASPXTPRAGREEDXEGGEXEAEEXXHGDGAXXXDL

SEQ ID NO: 113231 - protein, 54 aa, Oryza sativa
  Clone ID: PAT_MRT4530_17038C.1.pep
KIALHCAHRGSGHLGPRGRGRSNPTPPLGEIRRRADTSPSGPTSPKVPGHVGDS

SEQ ID NO: 113232 - protein, 217 aa, Oryza sativa
  Clone ID: PAT_MRT4530_17039C.1.pep
MGGRVDHEYSYLFKMVLIGDSGVGKSNILSRFTRNHFSLDSKSTIGVEFATKSLQMEGKTIKAQIWDTAGQERYRAITSAYYRGAVGALLVYDITKRQSFDNVHRWLRELRDHADSSIVIMMVGNKSDLIHLRAVSEDEGKALAEKEGLFFLETSAMEAVNVEEAFQTIITEVYGIVNRKALAAKEAAAASAPLPSQGKTISIDSAAGNTKRACCSA
